United States Patent Application Publication US 2026/0258383 A1 - sequence listing, part 4

SEQ ID NO: 3217 - protein, 2021 aa, synthetic construct
MPAAKRVKLDGGDKKYSIGLDIGTNSVGWAVITDEYKVPSKKFKVLGNTDRHSIKKNLIGALLFDSGETAEATRLKRTARRRYTRRKNRICYLQEIFSNEMAKVDDSFFHRLEESFLVEEDKKHERHPIFGNIVDEVAYHEKYPTIYHLRKKLVDSTDKADLRLIYLALAHMIKFRGHFLIEGDLNPDNSDVDKLFIQLVQTYNQLFEENPINASGVDAKAILSARLSKSRRLENLIAQLPGEKKNGLFGNLIALSLGLTPNFKSNFDLAEDAKLQLSKDTYDDDLDNLLAQIGDQYADLFLAAKNLSDAILLSDILRVNTEITKAPLSASMIKRYDEHHQDLTLLKALVRQQLPEKYKEIFFDQSKNGYAGYIDGGASQEEFYKFIKPILEKMDGTEELLVKLNREDLLRKQRTFDNGSIPHQIHLGELHAILRRQEDFYPFLKDNREKIEKILTFRIPYYVGPLARGNSRFAWMTRKSEETITPWNFEEVVDKGASAQSFIERMTNFDKNLPNEKVLPKHSLLYEYFTVYNELTKVKYVTEGMRKPAFLSGEQKKAIVDLLFKTNRKVTVKQLKEDYFKKIECFDSVEISGVEDRFNASLGTYHDLLKIIKDKDFLDNEENEDILEDIVLTLTLFEDREMIEERLKTYAHLFDDKVMKQLKRRRYTGWGRLSRKLINGIRDKQSGKTILDFLKSDGFANRNFMQLIHDDSLTFKEDIQKAQVSGQGDSLHEHIANLAGSPAIKKGILQTVKVVDELVKVMGRHKPENIVIEMARENQTTQKGQKNSRERMKRIEEGIKELGSQILKEHPVENTQLQNEKLYLYYLQNGRDMYVDQELDINRLSDYDVDHIVPQSFLKDDSIDNKVLTRSDKARGKSDNVPSEEVVKKMKNYWRQLLNAKLITQRKFDNLTKAERGGLSELDKAGFIKRQLVETRQITKHVAQILDSRMNTKYDENDKLIREVKVITLKSKLVSDFRKDFQFYKVREINNYHHAHDAYLNAVVGTALIKKYPKLESEFVYGDYKVYDVRKMIAKSEQEIGKATAKYFFYSNIMNFFKTEITLANGEIRKRPLIETNGETGEIVWDKGRDFATVRKVLSMPQVNIVKKTEVQTGGFSKESILPKRNSDKLIARKKDWDPKKYGGFDSPTVAYSVLVVAKVEKGKSKKLKSVKELLGITIMERSSFEKNPIDFLEAKGYKEVKKDLIIKLPKYSLFELENGRKRMLASAGELQKGNELALPSKYVNFLYLASHYEKLKGSPEDNEQKQLFVEQHKHYLDEIIEQISEFSKRVILADANLDKVLSAYNKHRDKPIREQAENIIHLFTLTNLGAPAAFKYFDTTIDRKRYTSTKEVLDATLIHQSITGLYETRIDLSQLGGDGGPAPEAAAKGGGRDIMKDIKVRLMTDSPDDSQDLMIGAIESNLFADQISWKSDQPVWLNQWPLKQEKLQALQQLVTEQLQLGHLEESNSPWNTPVFVIKKKSGKWRLLQDLRAVNATMHDMGALQPGLPSPVAVPKGWEIIIIDLQDCFFNIKLHPEDCKRFAFSVPSPNFKRPYQRFQWKVLPQGMKNSPTLCQKFVDKAILTVRDKYQDSYIVHYMDDILLAHPSRSIVDEILTSMIQALNKHGLVVSTEKIQKYDNLKYLGTHIQGDSVSYQKLQIRTDKLRTLNDFQKLLGNINWIRPFLKLTTGELKPLFEILNGDSNPISTRKLTPEACKALQLMNERLSTARVKRLDLSQPWSLCILKTEYTPTACLWQDGVVEWIHLPHISPKVITPYDIFCTQLIIKGRHRSKELFSKDPDYIVVPYTKVQFDLLLQEKEDWPISLLGFLGEVHFHLPKDPLLTFTLQTAIIFPHMTSTTPLEKGIVIFTDGSANGRSVTYIQGREPIIKENTQNTAQQAEIVAVITAFEEVSQPFNLYTDSKYVTGLFPEIETATLSPRTKIYTELKHLQRLIHKRQEKFYIGHIRGHTGLPGPLAQGNAYADSLTRILTAGKRTADGSEFEKRTADGSEFESPKKKAKVE

SEQ ID NO: 3218 - protein, 2018 aa, synthetic construct
MPAAKRVKLDGGDKKYSIGLDIGTNSVGWAVITDEYKVPSKKFKVLGNTDRHSIKKNLIGALLFDSGETAEATRLKRTARRRYTRRKNRICYLQEIFSNEMAKVDDSFFHRLEESFLVEEDKKHERHPIFGNIVDEVAYHEKYPTIYHLRKKLVDSTDKADLRLIYLALAHMIKFRGHFLIEGDLNPDNSDVDKLFIQLVQTYNQLFEENPINASGVDAKAILSARLSKSRRLENLIAQLPGEKKNGLFGNLIALSLGLTPNFKSNFDLAEDAKLQLSKDTYDDDLDNLLAQIGDQYADLFLAAKNLSDAILLSDILRVNTEITKAPLSASMIKRYDEHHQDLTLLKALVRQQLPEKYKEIFFDQSKNGYAGYIDGGASQEEFYKFIKPILEKMDGTEELLVKLNREDLLRKQRTFDNGSIPHQIHLGELHAILRRQEDFYPFLKDNREKIEKILTFRIPYYVGPLARGNSRFAWMTRKSEETITPWNFEEVVDKGASAQSFIERMTNFDKNLPNEKVLPKHSLLYEYFTVYNELTKVKYVTEGMRKPAFLSGEQKKAIVDLLFKTNRKVTVKQLKEDYFKKIECFDSVEISGVEDRFNASLGTYHDLLKIIKDKDFLDNEENEDILEDIVLTLTLFEDREMIEERLKTYAHLFDDKVMKQLKRRRYTGWGRLSRKLINGIRDKQSGKTILDFLKSDGFANRNFMQLIHDDSLTFKEDIQKAQVSGQGDSLHEHIANLAGSPAIKKGILQTVKVVDELVKVMGRHKPENIVIEMARENQTTQKGQKNSRERMKRIEEGIKELGSQILKEHPVENTQLQNEKLYLYYLQNGRDMYVDQELDINRLSDYDVDHIVPQSFLKDDSIDNKVLTRSDKARGKSDNVPSEEVVKKMKNYWRQLLNAKLITQRKFDNLTKAERGGLSELDKAGFIKRQLVETRQITKHVAQILDSRMNTKYDENDKLIREVKVITLKSKLVSDFRKDFQFYKVREINNYHHAHDAYLNAVVGTALIKKYPKLESEFVYGDYKVYDVRKMIAKSEQEIGKATAKYFFYSNIMNFFKTEITLANGEIRKRPLIETNGETGEIVWDKGRDFATVRKVLSMPQVNIVKKTEVQTGGFSKESILPKRNSDKLIARKKDWDPKKYGGFDSPTVAYSVLVVAKVEKGKSKKLKSVKELLGITIMERSSFEKNPIDFLEAKGYKEVKKDLIIKLPKYSLFELENGRKRMLASAGELQKGNELALPSKYVNFLYLASHYEKLKGSPEDNEQKQLFVEQHKHYLDEIIEQISEFSKRVILADANLDKVLSAYNKHRDKPIREQAENIIHLFTLTNLGAPAAFKYFDTTIDRKRYTSTKEVLDATLIHQSITGLYETRIDLSQLGGDGGPAPAPGGGRDIMKDIKVRLMTDSPDDSQDLMIGAIESNLFADQISWKSDQPVWLNQWPLKQEKLQALQQLVTEQLQLGHLEESNSPWNTPVFVIKKKSGKWRLLQDLRAVNATMHDMGALQPGLPSPVAVPKGWEIIIIDLQDCFFNIKLHPEDCKRFAFSVPSPNFKRPYQRFQWKVLPQGMKNSPTLCQKFVDKAILTVRDKYQDSYIVHYMDDILLAHPSRSIVDEILTSMIQALNKHGLVVSTEKIQKYDNLKYLGTHIQGDSVSYQKLQIRTDKLRTLNDFQKLLGNINWIRPFLKLTTGELKPLFEILNGDSNPISTRKLTPEACKALQLMNERLSTARVKRLDLSQPWSLCILKTEYTPTACLWQDGVVEWIHLPHISPKVITPYDIFCTQLIIKGRHRSKELFSKDPDYIVVPYTKVQFDLLLQEKEDWPISLLGFLGEVHFHLPKDPLLTFTLQTAIIFPHMTSTTPLEKGIVIFTDGSANGRSVTYIQGREPIIKENTQNTAQQAEIVAVITAFEEVSQPFNLYTDSKYVTGLFPEIETATLSPRTKIYTELKHLQRLIHKRQEKFYIGHIRGHTGLPGPLAQGNAYADSLTRILTAGKRTADGSEFEKRTADGSEFESPKKKAKVE

SEQ ID NO: 3219 - protein, 2025 aa, synthetic construct
MPAAKRVKLDGGDKKYSIGLDIGTNSVGWAVITDEYKVPSKKFKVLGNTDRHSIKKNLIGALLFDSGETAEATRLKRTARRRYTRRKNRICYLQEIFSNEMAKVDDSFFHRLEESFLVEEDKKHERHPIFGNIVDEVAYHEKYPTIYHLRKKLVDSTDKADLRLIYLALAHMIKFRGHFLIEGDLNPDNSDVDKLFIQLVQTYNQLFEENPINASGVDAKAILSARLSKSRRLENLIAQLPGEKKNGLFGNLIALSLGLTPNFKSNFDLAEDAKLQLSKDTYDDDLDNLLAQIGDQYADLFLAAKNLSDAILLSDILRVNTEITKAPLSASMIKRYDEHHQDLTLLKALVRQQLPEKYKEIFFDQSKNGYAGYIDGGASQEEFYKFIKPILEKMDGTEELLVKLNREDLLRKQRTFDNGSIPHQIHLGELHAILRRQEDFYPFLKDNREKIEKILTFRIPYYVGPLARGNSRFAWMTRKSEETITPWNFEEVVDKGASAQSFIERMTNFDKNLPNEKVLPKHSLLYEYFTVYNELTKVKYVTEGMRKPAFLSGEQKKAIVDLLFKTNRKVTVKQLKEDYFKKIECFDSVEISGVEDRFNASLGTYHDLLKIIKDKDFLDNEENEDILEDIVLTLTLFEDREMIEERLKTYAHLFDDKVMKQLKRRRYTGWGRLSRKLINGIRDKQSGKTILDFLKSDGFANRNFMQLIHDDSLTFKEDIQKAQVSGQGDSLHEHIANLAGSPAIKKGILQTVKVVDELVKVMGRHKPENIVIEMARENQTTQKGQKNSRERMKRIEEGIKELGSQILKEHPVENTQLQNEKLYLYYLQNGRDMYVDQELDINRLSDYDVDHIVPQSFLKDDSIDNKVLTRSDKARGKSDNVPSEEVVKKMKNYWRQLLNAKLITQRKFDNLTKAERGGLSELDKAGFIKRQLVETRQITKHVAQILDSRMNTKYDENDKLIREVKVITLKSKLVSDFRKDFQFYKVREINNYHHAHDAYLNAVVGTALIKKYPKLESEFVYGDYKVYDVRKMIAKSEQEIGKATAKYFFYSNIMNFFKTEITLANGEIRKRPLIETNGETGEIVWDKGRDFATVRKVLSMPQVNIVKKTEVQTGGFSKESILPKRNSDKLIARKKDWDPKKYGGFDSPTVAYSVLVVAKVEKGKSKKLKSVKELLGITIMERSSFEKNPIDFLEAKGYKEVKKDLIIKLPKYSLFELENGRKRMLASAGELQKGNELALPSKYVNFLYLASHYEKLKGSPEDNEQKQLFVEQHKHYLDEIIEQISEFSKRVILADANLDKVLSAYNKHRDKPIREQAENIIHLFTLTNLGAPAAFKYFDTTIDRKRYTSTKEVLDATLIHQSITGLYETRIDLSQLGGDGGGSAGSAAGSGEFGGGRDIMKDIKVRLMTDSPDDSQDLMIGAIESNLFADQISWKSDQPVWLNQWPLKQEKLQALQQLVTEQLQLGHLEESNSPWNTPVFVIKKKSGKWRLLQDLRAVNATMHDMGALQPGLPSPVAVPKGWEIIIIDLQDCFFNIKLHPEDCKRFAFSVPSPNFKRPYQRFQWKVLPQGMKNSPTLCQKFVDKAILTVRDKYQDSYIVHYMDDILLAHPSRSIVDEILTSMIQALNKHGLVVSTEKIQKYDNLKYLGTHIQGDSVSYQKLQIRTDKLRTLNDFQKLLGNINWIRPFLKLTTGELKPLFEILNGDSNPISTRKLTPEACKALQLMNERLSTARVKRLDLSQPWSLCILKTEYTPTACLWQDGVVEWIHLPHISPKVITPYDIFCTQLIIKGRHRSKELFSKDPDYIVVPYTKVQFDLLLQEKEDWPISLLGFLGEVHFHLPKDPLLTFTLQTAIIFPHMTSTTPLEKGIVIFTDGSANGRSVTYIQGREPIIKENTQNTAQQAEIVAVITAFEEVSQPFNLYTDSKYVTGLFPEIETATLSPRTKIYTELKHLQRLIHKRQEKFYIGHIRGHTGLPGPLAQGNAYADSLTRILTAGKRTADGSEFEKRTADGSEFESPKKKAKVE

SEQ ID NO: 3220 - protein, 2022 aa, synthetic construct
MPAAKRVKLDGGDKKYSIGLDIGTNSVGWAVITDEYKVPSKKFKVLGNTDRHSIKKNLIGALLFDSGETAEATRLKRTARRRYTRRKNRICYLQEIFSNEMAKVDDSFFHRLEESFLVEEDKKHERHPIFGNIVDEVAYHEKYPTIYHLRKKLVDSTDKADLRLIYLALAHMIKFRGHFLIEGDLNPDNSDVDKLFIQLVQTYNQLFEENPINASGVDAKAILSARLSKSRRLENLIAQLPGEKKNGLFGNLIALSLGLTPNFKSNFDLAEDAKLQLSKDTYDDDLDNLLAQIGDQYADLFLAAKNLSDAILLSDILRVNTEITKAPLSASMIKRYDEHHQDLTLLKALVRQQLPEKYKEIFFDQSKNGYAGYIDGGASQEEFYKFIKPILEKMDGTEELLVKLNREDLLRKQRTFDNGSIPHQIHLGELHAILRRQEDFYPFLKDNREKIEKILTFRIPYYVGPLARGNSRFAWMTRKSEETITPWNFEEVVDKGASAQSFIERMTNFDKNLPNEKVLPKHSLLYEYFTVYNELTKVKYVTEGMRKPAFLSGEQKKAIVDLLFKTNRKVTVKQLKEDYFKKIECFDSVEISGVEDRFNASLGTYHDLLKIIKDKDFLDNEENEDILEDIVLTLTLFEDREMIEERLKTYAHLFDDKVMKQLKRRRYTGWGRLSRKLINGIRDKQSGKTILDFLKSDGFANRNFMQLIHDDSLTFKEDIQKAQVSGQGDSLHEHIANLAGSPAIKKGILQTVKVVDELVKVMGRHKPENIVIEMARENQTTQKGQKNSRERMKRIEEGIKELGSQILKEHPVENTQLQNEKLYLYYLQNGRDMYVDQELDINRLSDYDVDHIVPQSFLKDDSIDNKVLTRSDKARGKSDNVPSEEVVKKMKNYWRQLLNAKLITQRKFDNLTKAERGGLSELDKAGFIKRQLVETRQITKHVAQILDSRMNTKYDENDKLIREVKVITLKSKLVSDFRKDFQFYKVREINNYHHAHDAYLNAVVGTALIKKYPKLESEFVYGDYKVYDVRKMIAKSEQEIGKATAKYFFYSNIMNFFKTEITLANGEIRKRPLIETNGETGEIVWDKGRDFATVRKVLSMPQVNIVKKTEVQTGGFSKESILPKRNSDKLIARKKDWDPKKYGGFDSPTVAYSVLVVAKVEKGKSKKLKSVKELLGITIMERSSFEKNPIDFLEAKGYKEVKKDLIIKLPKYSLFELENGRKRMLASAGELQKGNELALPSKYVNFLYLASHYEKLKGSPEDNEQKQLFVEQHKHYLDEIIEQISEFSKRVILADANLDKVLSAYNKHRDKPIREQAENIIHLFTLTNLGAPAAFKYFDTTIDRKRYTSTKEVLDATLIHQSITGLYETRIDLSQLGGDGGPAPGGGGGSGGGRDIMKDIKVRLMTDSPDDSQDLMIGAIESNLFADQISWKSDQPVWLNQWPLKQEKLQALQQLVTEQLQLGHLEESNSPWNTPVFVIKKKSGKWRLLQDLRAVNATMHDMGALQPGLPSPVAVPKGWEIIIIDLQDCFFNIKLHPEDCKRFAFSVPSPNFKRPYQRFQWKVLPQGMKNSPTLCQKFVDKAILTVRDKYQDSYIVHYMDDILLAHPSRSIVDEILTSMIQALNKHGLVVSTEKIQKYDNLKYLGTHIQGDSVSYQKLQIRTDKLRTLNDFQKLLGNINWIRPFLKLTTGELKPLFEILNGDSNPISTRKLTPEACKALQLMNERLSTARVKRLDLSQPWSLCILKTEYTPTACLWQDGVVEWIHLPHISPKVITPYDIFCTQLIIKGRHRSKELFSKDPDYIVVPYTKVQFDLLLQEKEDWPISLLGFLGEVHFHLPKDPLLTFTLQTAIIFPHMTSTTPLEKGIVIFTDGSANGRSVTYIQGREPIIKENTQNTAQQAEIVAVITAFEEVSQPFNLYTDSKYVTGLFPEIETATLSPRTKIYTELKHLQRLIHKRQEKFYIGHIRGHTGLPGPLAQGNAYADSLTRILTAGKRTADGSEFEKRTADGSEFESPKKKAKVE

SEQ ID NO: 3221 - protein, 2022 aa, synthetic construct
MPAAKRVKLDGGDKKYSIGLDIGTNSVGWAVITDEYKVPSKKFKVLGNTDRHSIKKNLIGALLFDSGETAEATRLKRTARRRYTRRKNRICYLQEIFSNEMAKVDDSFFHRLEESFLVEEDKKHERHPIFGNIVDEVAYHEKYPTIYHLRKKLVDSTDKADLRLIYLALAHMIKFRGHFLIEGDLNPDNSDVDKLFIQLVQTYNQLFEENPINASGVDAKAILSARLSKSRRLENLIAQLPGEKKNGLFGNLIALSLGLTPNFKSNFDLAEDAKLQLSKDTYDDDLDNLLAQIGDQYADLFLAAKNLSDAILLSDILRVNTEITKAPLSASMIKRYDEHHQDLTLLKALVRQQLPEKYKEIFFDQSKNGYAGYIDGGASQEEFYKFIKPILEKMDGTEELLVKLNREDLLRKQRTFDNGSIPHQIHLGELHAILRRQEDFYPFLKDNREKIEKILTFRIPYYVGPLARGNSRFAWMTRKSEETITPWNFEEVVDKGASAQSFIERMTNFDKNLPNEKVLPKHSLLYEYFTVYNELTKVKYVTEGMRKPAFLSGEQKKAIVDLLFKTNRKVTVKQLKEDYFKKIECFDSVEISGVEDRFNASLGTYHDLLKIIKDKDFLDNEENEDILEDIVLTLTLFEDREMIEERLKTYAHLFDDKVMKQLKRRRYTGWGRLSRKLINGIRDKQSGKTILDFLKSDGFANRNFMQLIHDDSLTFKEDIQKAQVSGQGDSLHEHIANLAGSPAIKKGILQTVKVVDELVKVMGRHKPENIVIEMARENQTTQKGQKNSRERMKRIEEGIKELGSQILKEHPVENTQLQNEKLYLYYLQNGRDMYVDQELDINRLSDYDVDHIVPQSFLKDDSIDNKVLTRSDKARGKSDNVPSEEVVKKMKNYWRQLLNAKLITQRKFDNLTKAERGGLSELDKAGFIKRQLVETRQITKHVAQILDSRMNTKYDENDKLIREVKVITLKSKLVSDFRKDFQFYKVREINNYHHAHDAYLNAVVGTALIKKYPKLESEFVYGDYKVYDVRKMIAKSEQEIGKATAKYFFYSNIMNFFKTEITLANGEIRKRPLIETNGETGEIVWDKGRDFATVRKVLSMPQVNIVKKTEVQTGGFSKESILPKRNSDKLIARKKDWDPKKYGGFDSPTVAYSVLVVAKVEKGKSKKLKSVKELLGITIMERSSFEKNPIDFLEAKGYKEVKKDLIIKLPKYSLFELENGRKRMLASAGELQKGNELALPSKYVNFLYLASHYEKLKGSPEDNEQKQLFVEQHKHYLDEIIEQISEFSKRVILADANLDKVLSAYNKHRDKPIREQAENIIHLFTLTNLGAPAAFKYFDTTIDRKRYTSTKEVLDATLIHQSITGLYETRIDLSQLGGDGGPAPAPAPAPGGGRDIMKDIKVRLMTDSPDDSQDLMIGAIESNLFADQISWKSDQPVWLNQWPLKQEKLQALQQLVTEQLQLGHLEESNSPWNTPVFVIKKKSGKWRLLQDLRAVNATMHDMGALQPGLPSPVAVPKGWEIIIIDLQDCFFNIKLHPEDCKRFAFSVPSPNFKRPYQRFQWKVLPQGMKNSPTLCQKFVDKAILTVRDKYQDSYIVHYMDDILLAHPSRSIVDEILTSMIQALNKHGLVVSTEKIQKYDNLKYLGTHIQGDSVSYQKLQIRTDKLRTLNDFQKLLGNINWIRPFLKLTTGELKPLFEILNGDSNPISTRKLTPEACKALQLMNERLSTARVKRLDLSQPWSLCILKTEYTPTACLWQDGVVEWIHLPHISPKVITPYDIFCTQLIIKGRHRSKELFSKDPDYIVVPYTKVQFDLLLQEKEDWPISLLGFLGEVHFHLPKDPLLTFTLQTAIIFPHMTSTTPLEKGIVIFTDGSANGRSVTYIQGREPIIKENTQNTAQQAEIVAVITAFEEVSQPFNLYTDSKYVTGLFPEIETATLSPRTKIYTELKHLQRLIHKRQEKFYIGHIRGHTGLPGPLAQGNAYADSLTRILTAGKRTADGSEFEKRTADGSEFESPKKKAKVE

SEQ ID NO: 3222 - protein, 2024 aa, synthetic construct
MPAAKRVKLDGGDKKYSIGLDIGTNSVGWAVITDEYKVPSKKFKVLGNTDRHSIKKNLIGALLFDSGETAEATRLKRTARRRYTRRKNRICYLQEIFSNEMAKVDDSFFHRLEESFLVEEDKKHERHPIFGNIVDEVAYHEKYPTIYHLRKKLVDSTDKADLRLIYLALAHMIKFRGHFLIEGDLNPDNSDVDKLFIQLVQTYNQLFEENPINASGVDAKAILSARLSKSRRLENLIAQLPGEKKNGLFGNLIALSLGLTPNFKSNFDLAEDAKLQLSKDTYDDDLDNLLAQIGDQYADLFLAAKNLSDAILLSDILRVNTEITKAPLSASMIKRYDEHHQDLTLLKALVRQQLPEKYKEIFFDQSKNGYAGYIDGGASQEEFYKFIKPILEKMDGTEELLVKLNREDLLRKQRTFDNGSIPHQIHLGELHAILRRQEDFYPFLKDNREKIEKILTFRIPYYVGPLARGNSRFAWMTRKSEETITPWNFEEVVDKGASAQSFIERMTNFDKNLPNEKVLPKHSLLYEYFTVYNELTKVKYVTEGMRKPAFLSGEQKKAIVDLLFKTNRKVTVKQLKEDYFKKIECFDSVEISGVEDRFNASLGTYHDLLKIIKDKDFLDNEENEDILEDIVLTLTLFEDREMIEERLKTYAHLFDDKVMKQLKRRRYTGWGRLSRKLINGIRDKQSGKTILDFLKSDGFANRNFMQLIHDDSLTFKEDIQKAQVSGQGDSLHEHIANLAGSPAIKKGILQTVKVVDELVKVMGRHKPENIVIEMARENQTTQKGQKNSRERMKRIEEGIKELGSQILKEHPVENTQLQNEKLYLYYLQNGRDMYVDQELDINRLSDYDVDHIVPQSFLKDDSIDNKVLTRSDKARGKSDNVPSEEVVKKMKNYWRQLLNAKLITQRKFDNLTKAERGGLSELDKAGFIKRQLVETRQITKHVAQILDSRMNTKYDENDKLIREVKVITLKSKLVSDFRKDFQFYKVREINNYHHAHDAYLNAVVGTALIKKYPKLESEFVYGDYKVYDVRKMIAKSEQEIGKATAKYFFYSNIMNFFKTEITLANGEIRKRPLIETNGETGEIVWDKGRDFATVRKVLSMPQVNIVKKTEVQTGGFSKESILPKRNSDKLIARKKDWDPKKYGGFDSPTVAYSVLVVAKVEKGKSKKLKSVKELLGITIMERSSFEKNPIDFLEAKGYKEVKKDLIIKLPKYSLFELENGRKRMLASAGELQKGNELALPSKYVNFLYLASHYEKLKGSPEDNEQKQLFVEQHKHYLDEIIEQISEFSKRVILADANLDKVLSAYNKHRDKPIREQAENIIHLFTLTNLGAPAAFKYFDTTIDRKRYTSTKEVLDATLIHQSITGLYETRIDLSQLGGDGGPAPEAAAKGGSGGGRDIMKDIKVRLMTDSPDDSQDLMIGAIESNLFADQISWKSDQPVWLNQWPLKQEKLQALQQLVTEQLQLGHLEESNSPWNTPVFVIKKKSGKWRLLQDLRAVNATMHDMGALQPGLPSPVAVPKGWEIIIIDLQDCFFNIKLHPEDCKRFAFSVPSPNFKRPYQRFQWKVLPQGMKNSPTLCQKFVDKAILTVRDKYQDSYIVHYMDDILLAHPSRSIVDEILTSMIQALNKHGLVVSTEKIQKYDNLKYLGTHIQGDSVSYQKLQIRTDKLRTLNDFQKLLGNINWIRPFLKLTTGELKPLFEILNGDSNPISTRKLTPEACKALQLMNERLSTARVKRLDLSQPWSLCILKTEYTPTACLWQDGVVEWIHLPHISPKVITPYDIFCTQLIIKGRHRSKELFSKDPDYIVVPYTKVQFDLLLQEKEDWPISLLGFLGEVHFHLPKDPLLTFTLQTAIIFPHMTSTTPLEKGIVIFTDGSANGRSVTYIQGREPIIKENTQNTAQQAEIVAVITAFEEVSQPFNLYTDSKYVTGLFPEIETATLSPRTKIYTELKHLQRLIHKRQEKFYIGHIRGHTGLPGPLAQGNAYADSLTRILTAGKRTADGSEFEKRTADGSEFESPKKKAKVE

SEQ ID NO: 3223 - protein, 2022 aa, synthetic construct
MPAAKRVKLDGGDKKYSIGLDIGTNSVGWAVITDEYKVPSKKFKVLGNTDRHSIKKNLIGALLFDSGETAEATRLKRTARRRYTRRKNRICYLQEIFSNEMAKVDDSFFHRLEESFLVEEDKKHERHPIFGNIVDEVAYHEKYPTIYHLRKKLVDSTDKADLRLIYLALAHMIKFRGHFLIEGDLNPDNSDVDKLFIQLVQTYNQLFEENPINASGVDAKAILSARLSKSRRLENLIAQLPGEKKNGLFGNLIALSLGLTPNFKSNFDLAEDAKLQLSKDTYDDDLDNLLAQIGDQYADLFLAAKNLSDAILLSDILRVNTEITKAPLSASMIKRYDEHHQDLTLLKALVRQQLPEKYKEIFFDQSKNGYAGYIDGGASQEEFYKFIKPILEKMDGTEELLVKLNREDLLRKQRTFDNGSIPHQIHLGELHAILRRQEDFYPFLKDNREKIEKILTFRIPYYVGPLARGNSRFAWMTRKSEETITPWNFEEVVDKGASAQSFIERMTNFDKNLPNEKVLPKHSLLYEYFTVYNELTKVKYVTEGMRKPAFLSGEQKKAIVDLLFKTNRKVTVKQLKEDYFKKIECFDSVEISGVEDRFNASLGTYHDLLKIIKDKDFLDNEENEDILEDIVLTLTLFEDREMIEERLKTYAHLFDDKVMKQLKRRRYTGWGRLSRKLINGIRDKQSGKTILDFLKSDGFANRNFMQLIHDDSLTFKEDIQKAQVSGQGDSLHEHIANLAGSPAIKKGILQTVKVVDELVKVMGRHKPENIVIEMARENQTTQKGQKNSRERMKRIEEGIKELGSQILKEHPVENTQLQNEKLYLYYLQNGRDMYVDQELDINRLSDYDVDHIVPQSFLKDDSIDNKVLTRSDKARGKSDNVPSEEVVKKMKNYWRQLLNAKLITQRKFDNLTKAERGGLSELDKAGFIKRQLVETRQITKHVAQILDSRMNTKYDENDKLIREVKVITLKSKLVSDFRKDFQFYKVREINNYHHAHDAYLNAVVGTALIKKYPKLESEFVYGDYKVYDVRKMIAKSEQEIGKATAKYFFYSNIMNFFKTEITLANGEIRKRPLIETNGETGEIVWDKGRDFATVRKVLSMPQVNIVKKTEVQTGGFSKESILPKRNSDKLIARKKDWDPKKYGGFDSPTVAYSVLVVAKVEKGKSKKLKSVKELLGITIMERSSFEKNPIDFLEAKGYKEVKKDLIIKLPKYSLFELENGRKRMLASAGELQKGNELALPSKYVNFLYLASHYEKLKGSPEDNEQKQLFVEQHKHYLDEIIEQISEFSKRVILADANLDKVLSAYNKHRDKPIREQAENIIHLFTLTNLGAPAAFKYFDTTIDRKRYTSTKEVLDATLIHQSITGLYETRIDLSQLGGDGGGGGPAPGSSGGGRDIMKDIKVRLMTDSPDDSQDLMIGAIESNLFADQISWKSDQPVWLNQWPLKQEKLQALQQLVTEQLQLGHLEESNSPWNTPVFVIKKKSGKWRLLQDLRAVNATMHDMGALQPGLPSPVAVPKGWEIIIIDLQDCFFNIKLHPEDCKRFAFSVPSPNFKRPYQRFQWKVLPQGMKNSPTLCQKFVDKAILTVRDKYQDSYIVHYMDDILLAHPSRSIVDEILTSMIQALNKHGLVVSTEKIQKYDNLKYLGTHIQGDSVSYQKLQIRTDKLRTLNDFQKLLGNINWIRPFLKLTTGELKPLFEILNGDSNPISTRKLTPEACKALQLMNERLSTARVKRLDLSQPWSLCILKTEYTPTACLWQDGVVEWIHLPHISPKVITPYDIFCTQLIIKGRHRSKELFSKDPDYIVVPYTKVQFDLLLQEKEDWPISLLGFLGEVHFHLPKDPLLTFTLQTAIIFPHMTSTTPLEKGIVIFTDGSANGRSVTYIQGREPIIKENTQNTAQQAEIVAVITAFEEVSQPFNLYTDSKYVTGLFPEIETATLSPRTKIYTELKHLQRLIHKRQEKFYIGHIRGHTGLPGPLAQGNAYADSLTRILTAGKRTADGSEFEKRTADGSEFESPKKKAKVE

SEQ ID NO: 3224 - protein, 2022 aa, synthetic construct
MPAAKRVKLDGGDKKYSIGLDIGTNSVGWAVITDEYKVPSKKFKVLGNTDRHSIKKNLIGALLFDSGETAEATRLKRTARRRYTRRKNRICYLQEIFSNEMAKVDDSFFHRLEESFLVEEDKKHERHPIFGNIVDEVAYHEKYPTIYHLRKKLVDSTDKADLRLIYLALAHMIKFRGHFLIEGDLNPDNSDVDKLFIQLVQTYNQLFEENPINASGVDAKAILSARLSKSRRLENLIAQLPGEKKNGLFGNLIALSLGLTPNFKSNFDLAEDAKLQLSKDTYDDDLDNLLAQIGDQYADLFLAAKNLSDAILLSDILRVNTEITKAPLSASMIKRYDEHHQDLTLLKALVRQQLPEKYKEIFFDQSKNGYAGYIDGGASQEEFYKFIKPILEKMDGTEELLVKLNREDLLRKQRTFDNGSIPHQIHLGELHAILRRQEDFYPFLKDNREKIEKILTFRIPYYVGPLARGNSRFAWMTRKSEETITPWNFEEVVDKGASAQSFIERMTNFDKNLPNEKVLPKHSLLYEYFTVYNELTKVKYVTEGMRKPAFLSGEQKKAIVDLLFKTNRKVTVKQLKEDYFKKIECFDSVEISGVEDRFNASLGTYHDLLKIIKDKDFLDNEENEDILEDIVLTLTLFEDREMIEERLKTYAHLFDDKVMKQLKRRRYTGWGRLSRKLINGIRDKQSGKTILDFLKSDGFANRNFMQLIHDDSLTFKEDIQKAQVSGQGDSLHEHIANLAGSPAIKKGILQTVKVVDELVKVMGRHKPENIVIEMARENQTTQKGQKNSRERMKRIEEGIKELGSQILKEHPVENTQLQNEKLYLYYLQNGRDMYVDQELDINRLSDYDVDHIVPQSFLKDDSIDNKVLTRSDKARGKSDNVPSEEVVKKMKNYWRQLLNAKLITQRKFDNLTKAERGGLSELDKAGFIKRQLVETRQITKHVAQILDSRMNTKYDENDKLIREVKVITLKSKLVSDFRKDFQFYKVREINNYHHAHDAYLNAVVGTALIKKYPKLESEFVYGDYKVYDVRKMIAKSEQEIGKATAKYFFYSNIMNFFKTEITLANGEIRKRPLIETNGETGEIVWDKGRDFATVRKVLSMPQVNIVKKTEVQTGGFSKESILPKRNSDKLIARKKDWDPKKYGGFDSPTVAYSVLVVAKVEKGKSKKLKSVKELLGITIMERSSFEKNPIDFLEAKGYKEVKKDLIIKLPKYSLFELENGRKRMLASAGELQKGNELALPSKYVNFLYLASHYEKLKGSPEDNEQKQLFVEQHKHYLDEIIEQISEFSKRVILADANLDKVLSAYNKHRDKPIREQAENIIHLFTLTNLGAPAAFKYFDTTIDRKRYTSTKEVLDATLIHQSITGLYETRIDLSQLGGDGGGGSPAPGGGGGGRDIMKDIKVRLMTDSPDDSQDLMIGAIESNLFADQISWKSDQPVWLNQWPLKQEKLQALQQLVTEQLQLGHLEESNSPWNTPVFVIKKKSGKWRLLQDLRAVNATMHDMGALQPGLPSPVAVPKGWEIIIIDLQDCFFNIKLHPEDCKRFAFSVPSPNFKRPYQRFQWKVLPQGMKNSPTLCQKFVDKAILTVRDKYQDSYIVHYMDDILLAHPSRSIVDEILTSMIQALNKHGLVVSTEKIQKYDNLKYLGTHIQGDSVSYQKLQIRTDKLRTLNDFQKLLGNINWIRPFLKLTTGELKPLFEILNGDSNPISTRKLTPEACKALQLMNERLSTARVKRLDLSQPWSLCILKTEYTPTACLWQDGVVEWIHLPHISPKVITPYDIFCTQLIIKGRHRSKELFSKDPDYIVVPYTKVQFDLLLQEKEDWPISLLGFLGEVHFHLPKDPLLTFTLQTAIIFPHMTSTTPLEKGIVIFTDGSANGRSVTYIQGREPIIKENTQNTAQQAEIVAVITAFEEVSQPFNLYTDSKYVTGLFPEIETATLSPRTKIYTELKHLQRLIHKRQEKFYIGHIRGHTGLPGPLAQGNAYADSLTRILTAGKRTADGSEFEKRTADGSEFESPKKKAKVE

SEQ ID NO: 3225 - protein, 2019 aa, synthetic construct
MPAAKRVKLDGGDKKYSIGLDIGTNSVGWAVITDEYKVPSKKFKVLGNTDRHSIKKNLIGALLFDSGETAEATRLKRTARRRYTRRKNRICYLQEIFSNEMAKVDDSFFHRLEESFLVEEDKKHERHPIFGNIVDEVAYHEKYPTIYHLRKKLVDSTDKADLRLIYLALAHMIKFRGHFLIEGDLNPDNSDVDKLFIQLVQTYNQLFEENPINASGVDAKAILSARLSKSRRLENLIAQLPGEKKNGLFGNLIALSLGLTPNFKSNFDLAEDAKLQLSKDTYDDDLDNLLAQIGDQYADLFLAAKNLSDAILLSDILRVNTEITKAPLSASMIKRYDEHHQDLTLLKALVRQQLPEKYKEIFFDQSKNGYAGYIDGGASQEEFYKFIKPILEKMDGTEELLVKLNREDLLRKQRTFDNGSIPHQIHLGELHAILRRQEDFYPFLKDNREKIEKILTFRIPYYVGPLARGNSRFAWMTRKSEETITPWNFEEVVDKGASAQSFIERMTNFDKNLPNEKVLPKHSLLYEYFTVYNELTKVKYVTEGMRKPAFLSGEQKKAIVDLLFKTNRKVTVKQLKEDYFKKIECFDSVEISGVEDRFNASLGTYHDLLKIIKDKDFLDNEENEDILEDIVLTLTLFEDREMIEERLKTYAHLFDDKVMKQLKRRRYTGWGRLSRKLINGIRDKQSGKTILDFLKSDGFANRNFMQLIHDDSLTFKEDIQKAQVSGQGDSLHEHIANLAGSPAIKKGILQTVKVVDELVKVMGRHKPENIVIEMARENQTTQKGQKNSRERMKRIEEGIKELGSQILKEHPVENTQLQNEKLYLYYLQNGRDMYVDQELDINRLSDYDVDHIVPQSFLKDDSIDNKVLTRSDKARGKSDNVPSEEVVKKMKNYWRQLLNAKLITQRKFDNLTKAERGGLSELDKAGFIKRQLVETRQITKHVAQILDSRMNTKYDENDKLIREVKVITLKSKLVSDFRKDFQFYKVREINNYHHAHDAYLNAVVGTALIKKYPKLESEFVYGDYKVYDVRKMIAKSEQEIGKATAKYFFYSNIMNFFKTEITLANGEIRKRPLIETNGETGEIVWDKGRDFATVRKVLSMPQVNIVKKTEVQTGGFSKESILPKRNSDKLIARKKDWDPKKYGGFDSPTVAYSVLVVAKVEKGKSKKLKSVKELLGITIMERSSFEKNPIDFLEAKGYKEVKKDLIIKLPKYSLFELENGRKRMLASAGELQKGNELALPSKYVNFLYLASHYEKLKGSPEDNEQKQLFVEQHKHYLDEIIEQISEFSKRVILADANLDKVLSAYNKHRDKPIREQAENIIHLFTLTNLGAPAAFKYFDTTIDRKRYTSTKEVLDATLIHQSITGLYETRIDLSQLGGDGGGGGGGSGGGRDIMKDIKVRLMTDSPDDSQDLMIGAIESNLFADQISWKSDQPVWLNQWPLKQEKLQALQQLVTEQLQLGHLEESNSPWNTPVFVIKKKSGKWRLLQDLRAVNATMHDMGALQPGLPSPVAVPKGWEIIIIDLQDCFFNIKLHPEDCKRFAFSVPSPNFKRPYQRFQWKVLPQGMKNSPTLCQKFVDKAILTVRDKYQDSYIVHYMDDILLAHPSRSIVDEILTSMIQALNKHGLVVSTEKIQKYDNLKYLGTHIQGDSVSYQKLQIRTDKLRTLNDFQKLLGNINWIRPFLKLTTGELKPLFEILNGDSNPISTRKLTPEACKALQLMNERLSTARVKRLDLSQPWSLCILKTEYTPTACLWQDGVVEWIHLPHISPKVITPYDIFCTQLIIKGRHRSKELFSKDPDYIVVPYTKVQFDLLLQEKEDWPISLLGFLGEVHFHLPKDPLLTFTLQTAIIFPHMTSTTPLEKGIVIFTDGSANGRSVTYIQGREPIIKENTQNTAQQAEIVAVITAFEEVSQPFNLYTDSKYVTGLFPEIETATLSPRTKIYTELKHLQRLIHKRQEKFYIGHIRGHTGLPGPLAQGNAYADSLTRILTAGKRTADGSEFEKRTADGSEFESPKKKAKVE

SEQ ID NO: 3226 - protein, 2024 aa, synthetic construct
MPAAKRVKLDGGDKKYSIGLDIGTNSVGWAVITDEYKVPSKKFKVLGNTDRHSIKKNLIGALLFDSGETAEATRLKRTARRRYTRRKNRICYLQEIFSNEMAKVDDSFFHRLEESFLVEEDKKHERHPIFGNIVDEVAYHEKYPTIYHLRKKLVDSTDKADLRLIYLALAHMIKFRGHFLIEGDLNPDNSDVDKLFIQLVQTYNQLFEENPINASGVDAKAILSARLSKSRRLENLIAQLPGEKKNGLFGNLIALSLGLTPNFKSNFDLAEDAKLQLSKDTYDDDLDNLLAQIGDQYADLFLAAKNLSDAILLSDILRVNTEITKAPLSASMIKRYDEHHQDLTLLKALVRQQLPEKYKEIFFDQSKNGYAGYIDGGASQEEFYKFIKPILEKMDGTEELLVKLNREDLLRKQRTFDNGSIPHQIHLGELHAILRRQEDFYPFLKDNREKIEKILTFRIPYYVGPLARGNSRFAWMTRKSEETITPWNFEEVVDKGASAQSFIERMTNFDKNLPNEKVLPKHSLLYEYFTVYNELTKVKYVTEGMRKPAFLSGEQKKAIVDLLFKTNRKVTVKQLKEDYFKKIECFDSVEISGVEDRFNASLGTYHDLLKIIKDKDFLDNEENEDILEDIVLTLTLFEDREMIEERLKTYAHLFDDKVMKQLKRRRYTGWGRLSRKLINGIRDKQSGKTILDFLKSDGFANRNFMQLIHDDSLTFKEDIQKAQVSGQGDSLHEHIANLAGSPAIKKGILQTVKVVDELVKVMGRHKPENIVIEMARENQTTQKGQKNSRERMKRIEEGIKELGSQILKEHPVENTQLQNEKLYLYYLQNGRDMYVDQELDINRLSDYDVDHIVPQSFLKDDSIDNKVLTRSDKARGKSDNVPSEEVVKKMKNYWRQLLNAKLITQRKFDNLTKAERGGLSELDKAGFIKRQLVETRQITKHVAQILDSRMNTKYDENDKLIREVKVITLKSKLVSDFRKDFQFYKVREINNYHHAHDAYLNAVVGTALIKKYPKLESEFVYGDYKVYDVRKMIAKSEQEIGKATAKYFFYSNIMNFFKTEITLANGEIRKRPLIETNGETGEIVWDKGRDFATVRKVLSMPQVNIVKKTEVQTGGFSKESILPKRNSDKLIARKKDWDPKKYGGFDSPTVAYSVLVVAKVEKGKSKKLKSVKELLGITIMERSSFEKNPIDFLEAKGYKEVKKDLIIKLPKYSLFELENGRKRMLASAGELQKGNELALPSKYVNFLYLASHYEKLKGSPEDNEQKQLFVEQHKHYLDEIIEQISEFSKRVILADANLDKVLSAYNKHRDKPIREQAENIIHLFTLTNLGAPAAFKYFDTTIDRKRYTSTKEVLDATLIHQSITGLYETRIDLSQLGGDGGEAAAKGGGGGSGGGRDIMKDIKVRLMTDSPDDSQDLMIGAIESNLFADQISWKSDQPVWLNQWPLKQEKLQALQQLVTEQLQLGHLEESNSPWNTPVFVIKKKSGKWRLLQDLRAVNATMHDMGALQPGLPSPVAVPKGWEIIIIDLQDCFFNIKLHPEDCKRFAFSVPSPNFKRPYQRFQWKVLPQGMKNSPTLCQKFVDKAILTVRDKYQDSYIVHYMDDILLAHPSRSIVDEILTSMIQALNKHGLVVSTEKIQKYDNLKYLGTHIQGDSVSYQKLQIRTDKLRTLNDFQKLLGNINWIRPFLKLTTGELKPLFEILNGDSNPISTRKLTPEACKALQLMNERLSTARVKRLDLSQPWSLCILKTEYTPTACLWQDGVVEWIHLPHISPKVITPYDIFCTQLIIKGRHRSKELFSKDPDYIVVPYTKVQFDLLLQEKEDWPISLLGFLGEVHFHLPKDPLLTFTLQTAIIFPHMTSTTPLEKGIVIFTDGSANGRSVTYIQGREPIIKENTQNTAQQAEIVAVITAFEEVSQPFNLYTDSKYVTGLFPEIETATLSPRTKIYTELKHLQRLIHKRQEKFYIGHIRGHTGLPGPLAQGNAYADSLTRILTAGKRTADGSEFEKRTADGSEFESPKKKAKVE

SEQ ID NO: 3227 - protein, 2019 aa, synthetic construct
MPAAKRVKLDGGDKKYSIGLDIGTNSVGWAVITDEYKVPSKKFKVLGNTDRHSIKKNLIGALLFDSGETAEATRLKRTARRRYTRRKNRICYLQEIFSNEMAKVDDSFFHRLEESFLVEEDKKHERHPIFGNIVDEVAYHEKYPTIYHLRKKLVDSTDKADLRLIYLALAHMIKFRGHFLIEGDLNPDNSDVDKLFIQLVQTYNQLFEENPINASGVDAKAILSARLSKSRRLENLIAQLPGEKKNGLFGNLIALSLGLTPNFKSNFDLAEDAKLQLSKDTYDDDLDNLLAQIGDQYADLFLAAKNLSDAILLSDILRVNTEITKAPLSASMIKRYDEHHQDLTLLKALVRQQLPEKYKEIFFDQSKNGYAGYIDGGASQEEFYKFIKPILEKMDGTEELLVKLNREDLLRKQRTFDNGSIPHQIHLGELHAILRRQEDFYPFLKDNREKIEKILTFRIPYYVGPLARGNSRFAWMTRKSEETITPWNFEEVVDKGASAQSFIERMTNFDKNLPNEKVLPKHSLLYEYFTVYNELTKVKYVTEGMRKPAFLSGEQKKAIVDLLFKTNRKVTVKQLKEDYFKKIECFDSVEISGVEDRFNASLGTYHDLLKIIKDKDFLDNEENEDILEDIVLTLTLFEDREMIEERLKTYAHLFDDKVMKQLKRRRYTGWGRLSRKLINGIRDKQSGKTILDFLKSDGFANRNFMQLIHDDSLTFKEDIQKAQVSGQGDSLHEHIANLAGSPAIKKGILQTVKVVDELVKVMGRHKPENIVIEMARENQTTQKGQKNSRERMKRIEEGIKELGSQILKEHPVENTQLQNEKLYLYYLQNGRDMYVDQELDINRLSDYDVDHIVPQSFLKDDSIDNKVLTRSDKARGKSDNVPSEEVVKKMKNYWRQLLNAKLITQRKFDNLTKAERGGLSELDKAGFIKRQLVETRQITKHVAQILDSRMNTKYDENDKLIREVKVITLKSKLVSDFRKDFQFYKVREINNYHHAHDAYLNAVVGTALIKKYPKLESEFVYGDYKVYDVRKMIAKSEQEIGKATAKYFFYSNIMNFFKTEITLANGEIRKRPLIETNGETGEIVWDKGRDFATVRKVLSMPQVNIVKKTEVQTGGFSKESILPKRNSDKLIARKKDWDPKKYGGFDSPTVAYSVLVVAKVEKGKSKKLKSVKELLGITIMERSSFEKNPIDFLEAKGYKEVKKDLIIKLPKYSLFELENGRKRMLASAGELQKGNELALPSKYVNFLYLASHYEKLKGSPEDNEQKQLFVEQHKHYLDEIIEQISEFSKRVILADANLDKVLSAYNKHRDKPIREQAENIIHLFTLTNLGAPAAFKYFDTTIDRKRYTSTKEVLDATLIHQSITGLYETRIDLSQLGGDGGGGSPAPGGGRDIMKDIKVRLMTDSPDDSQDLMIGAIESNLFADQISWKSDQPVWLNQWPLKQEKLQALQQLVTEQLQLGHLEESNSPWNTPVFVIKKKSGKWRLLQDLRAVNATMHDMGALQPGLPSPVAVPKGWEIIIIDLQDCFFNIKLHPEDCKRFAFSVPSPNFKRPYQRFQWKVLPQGMKNSPTLCQKFVDKAILTVRDKYQDSYIVHYMDDILLAHPSRSIVDEILTSMIQALNKHGLVVSTEKIQKYDNLKYLGTHIQGDSVSYQKLQIRTDKLRTLNDFQKLLGNINWIRPFLKLTTGELKPLFEILNGDSNPISTRKLTPEACKALQLMNERLSTARVKRLDLSQPWSLCILKTEYTPTACLWQDGVVEWIHLPHISPKVITPYDIFCTQLIIKGRHRSKELFSKDPDYIVVPYTKVQFDLLLQEKEDWPISLLGFLGEVHFHLPKDPLLTFTLQTAIIFPHMTSTTPLEKGIVIFTDGSANGRSVTYIQGREPIIKENTQNTAQQAEIVAVITAFEEVSQPFNLYTDSKYVTGLFPEIETATLSPRTKIYTELKHLQRLIHKRQEKFYIGHIRGHTGLPGPLAQGNAYADSLTRILTAGKRTADGSEFEKRTADGSEFESPKKKAKVE

SEQ ID NO: 3228 - protein, 2024 aa, synthetic construct
MPAAKRVKLDGGDKKYSIGLDIGTNSVGWAVITDEYKVPSKKFKVLGNTDRHSIKKNLIGALLFDSGETAEATRLKRTARRRYTRRKNRICYLQEIFSNEMAKVDDSFFHRLEESFLVEEDKKHERHPIFGNIVDEVAYHEKYPTIYHLRKKLVDSTDKADLRLIYLALAHMIKFRGHFLIEGDLNPDNSDVDKLFIQLVQTYNQLFEENPINASGVDAKAILSARLSKSRRLENLIAQLPGEKKNGLFGNLIALSLGLTPNFKSNFDLAEDAKLQLSKDTYDDDLDNLLAQIGDQYADLFLAAKNLSDAILLSDILRVNTEITKAPLSASMIKRYDEHHQDLTLLKALVRQQLPEKYKEIFFDQSKNGYAGYIDGGASQEEFYKFIKPILEKMDGTEELLVKLNREDLLRKQRTFDNGSIPHQIHLGELHAILRRQEDFYPFLKDNREKIEKILTFRIPYYVGPLARGNSRFAWMTRKSEETITPWNFEEVVDKGASAQSFIERMTNFDKNLPNEKVLPKHSLLYEYFTVYNELTKVKYVTEGMRKPAFLSGEQKKAIVDLLFKTNRKVTVKQLKEDYFKKIECFDSVEISGVEDRFNASLGTYHDLLKIIKDKDFLDNEENEDILEDIVLTLTLFEDREMIEERLKTYAHLFDDKVMKQLKRRRYTGWGRLSRKLINGIRDKQSGKTILDFLKSDGFANRNFMQLIHDDSLTFKEDIQKAQVSGQGDSLHEHIANLAGSPAIKKGILQTVKVVDELVKVMGRHKPENIVIEMARENQTTQKGQKNSRERMKRIEEGIKELGSQILKEHPVENTQLQNEKLYLYYLQNGRDMYVDQELDINRLSDYDVDHIVPQSFLKDDSIDNKVLTRSDKARGKSDNVPSEEVVKKMKNYWRQLLNAKLITQRKFDNLTKAERGGLSELDKAGFIKRQLVETRQITKHVAQILDSRMNTKYDENDKLIREVKVITLKSKLVSDFRKDFQFYKVREINNYHHAHDAYLNAVVGTALIKKYPKLESEFVYGDYKVYDVRKMIAKSEQEIGKATAKYFFYSNIMNFFKTEITLANGEIRKRPLIETNGETGEIVWDKGRDFATVRKVLSMPQVNIVKKTEVQTGGFSKESILPKRNSDKLIARKKDWDPKKYGGFDSPTVAYSVLVVAKVEKGKSKKLKSVKELLGITIMERSSFEKNPIDFLEAKGYKEVKKDLIIKLPKYSLFELENGRKRMLASAGELQKGNELALPSKYVNFLYLASHYEKLKGSPEDNEQKQLFVEQHKHYLDEIIEQISEFSKRVILADANLDKVLSAYNKHRDKPIREQAENIIHLFTLTNLGAPAAFKYFDTTIDRKRYTSTKEVLDATLIHQSITGLYETRIDLSQLGGDGGEAAAKGGSGGGGGGRDIMKDIKVRLMTDSPDDSQDLMIGAIESNLFADQISWKSDQPVWLNQWPLKQEKLQALQQLVTEQLQLGHLEESNSPWNTPVFVIKKKSGKWRLLQDLRAVNATMHDMGALQPGLPSPVAVPKGWEIIIIDLQDCFFNIKLHPEDCKRFAFSVPSPNFKRPYQRFQWKVLPQGMKNSPTLCQKFVDKAILTVRDKYQDSYIVHYMDDILLAHPSRSIVDEILTSMIQALNKHGLVVSTEKIQKYDNLKYLGTHIQGDSVSYQKLQIRTDKLRTLNDFQKLLGNINWIRPFLKLTTGELKPLFEILNGDSNPISTRKLTPEACKALQLMNERLSTARVKRLDLSQPWSLCILKTEYTPTACLWQDGVVEWIHLPHISPKVITPYDIFCTQLIIKGRHRSKELFSKDPDYIVVPYTKVQFDLLLQEKEDWPISLLGFLGEVHFHLPKDPLLTFTLQTAIIFPHMTSTTPLEKGIVIFTDGSANGRSVTYIQGREPIIKENTQNTAQQAEIVAVITAFEEVSQPFNLYTDSKYVTGLFPEIETATLSPRTKIYTELKHLQRLIHKRQEKFYIGHIRGHTGLPGPLAQGNAYADSLTRILTAGKRTADGSEFEKRTADGSEFESPKKKAKVE

SEQ ID NO: 3229 - protein, 2022 aa, synthetic construct
MPAAKRVKLDGGDKKYSIGLDIGTNSVGWAVITDEYKVPSKKFKVLGNTDRHSIKKNLIGALLFDSGETAEATRLKRTARRRYTRRKNRICYLQEIFSNEMAKVDDSFFHRLEESFLVEEDKKHERHPIFGNIVDEVAYHEKYPTIYHLRKKLVDSTDKADLRLIYLALAHMIKFRGHFLIEGDLNPDNSDVDKLFIQLVQTYNQLFEENPINASGVDAKAILSARLSKSRRLENLIAQLPGEKKNGLFGNLIALSLGLTPNFKSNFDLAEDAKLQLSKDTYDDDLDNLLAQIGDQYADLFLAAKNLSDAILLSDILRVNTEITKAPLSASMIKRYDEHHQDLTLLKALVRQQLPEKYKEIFFDQSKNGYAGYIDGGASQEEFYKFIKPILEKMDGTEELLVKLNREDLLRKQRTFDNGSIPHQIHLGELHAILRRQEDFYPFLKDNREKIEKILTFRIPYYVGPLARGNSRFAWMTRKSEETITPWNFEEVVDKGASAQSFIERMTNFDKNLPNEKVLPKHSLLYEYFTVYNELTKVKYVTEGMRKPAFLSGEQKKAIVDLLFKTNRKVTVKQLKEDYFKKIECFDSVEISGVEDRFNASLGTYHDLLKIIKDKDFLDNEENEDILEDIVLTLTLFEDREMIEERLKTYAHLFDDKVMKQLKRRRYTGWGRLSRKLINGIRDKQSGKTILDFLKSDGFANRNFMQLIHDDSLTFKEDIQKAQVSGQGDSLHEHIANLAGSPAIKKGILQTVKVVDELVKVMGRHKPENIVIEMARENQTTQKGQKNSRERMKRIEEGIKELGSQILKEHPVENTQLQNEKLYLYYLQNGRDMYVDQELDINRLSDYDVDHIVPQSFLKDDSIDNKVLTRSDKARGKSDNVPSEEVVKKMKNYWRQLLNAKLITQRKFDNLTKAERGGLSELDKAGFIKRQLVETRQITKHVAQILDSRMNTKYDENDKLIREVKVITLKSKLVSDFRKDFQFYKVREINNYHHAHDAYLNAVVGTALIKKYPKLESEFVYGDYKVYDVRKMIAKSEQEIGKATAKYFFYSNIMNFFKTEITLANGEIRKRPLIETNGETGEIVWDKGRDFATVRKVLSMPQVNIVKKTEVQTGGFSKESILPKRNSDKLIARKKDWDPKKYGGFDSPTVAYSVLVVAKVEKGKSKKLKSVKELLGITIMERSSFEKNPIDFLEAKGYKEVKKDLIIKLPKYSLFELENGRKRMLASAGELQKGNELALPSKYVNFLYLASHYEKLKGSPEDNEQKQLFVEQHKHYLDEIIEQISEFSKRVILADANLDKVLSAYNKHRDKPIREQAENIIHLFTLTNLGAPAAFKYFDTTIDRKRYTSTKEVLDATLIHQSITGLYETRIDLSQLGGDGGGGSPAPGSSGGGRDIMKDIKVRLMTDSPDDSQDLMIGAIESNLFADQISWKSDQPVWLNQWPLKQEKLQALQQLVTEQLQLGHLEESNSPWNTPVFVIKKKSGKWRLLQDLRAVNATMHDMGALQPGLPSPVAVPKGWEIIIIDLQDCFFNIKLHPEDCKRFAFSVPSPNFKRPYQRFQWKVLPQGMKNSPTLCQKFVDKAILTVRDKYQDSYIVHYMDDILLAHPSRSIVDEILTSMIQALNKHGLVVSTEKIQKYDNLKYLGTHIQGDSVSYQKLQIRTDKLRTLNDFQKLLGNINWIRPFLKLTTGELKPLFEILNGDSNPISTRKLTPEACKALQLMNERLSTARVKRLDLSQPWSLCILKTEYTPTACLWQDGVVEWIHLPHISPKVITPYDIFCTQLIIKGRHRSKELFSKDPDYIVVPYTKVQFDLLLQEKEDWPISLLGFLGEVHFHLPKDPLLTFTLQTAIIFPHMTSTTPLEKGIVIFTDGSANGRSVTYIQGREPIIKENTQNTAQQAEIVAVITAFEEVSQPFNLYTDSKYVTGLFPEIETATLSPRTKIYTELKHLQRLIHKRQEKFYIGHIRGHTGLPGPLAQGNAYADSLTRILTAGKRTADGSEFEKRTADGSEFESPKKKAKVE

SEQ ID NO: 3230 - protein, 2024 aa, synthetic construct
MPAAKRVKLDGGDKKYSIGLDIGTNSVGWAVITDEYKVPSKKFKVLGNTDRHSIKKNLIGALLFDSGETAEATRLKRTARRRYTRRKNRICYLQEIFSNEMAKVDDSFFHRLEESFLVEEDKKHERHPIFGNIVDEVAYHEKYPTIYHLRKKLVDSTDKADLRLIYLALAHMIKFRGHFLIEGDLNPDNSDVDKLFIQLVQTYNQLFEENPINASGVDAKAILSARLSKSRRLENLIAQLPGEKKNGLFGNLIALSLGLTPNFKSNFDLAEDAKLQLSKDTYDDDLDNLLAQIGDQYADLFLAAKNLSDAILLSDILRVNTEITKAPLSASMIKRYDEHHQDLTLLKALVRQQLPEKYKEIFFDQSKNGYAGYIDGGASQEEFYKFIKPILEKMDGTEELLVKLNREDLLRKQRTFDNGSIPHQIHLGELHAILRRQEDFYPFLKDNREKIEKILTFRIPYYVGPLARGNSRFAWMTRKSEETITPWNFEEVVDKGASAQSFIERMTNFDKNLPNEKVLPKHSLLYEYFTVYNELTKVKYVTEGMRKPAFLSGEQKKAIVDLLFKTNRKVTVKQLKEDYFKKIECFDSVEISGVEDRFNASLGTYHDLLKIIKDKDFLDNEENEDILEDIVLTLTLFEDREMIEERLKTYAHLFDDKVMKQLKRRRYTGWGRLSRKLINGIRDKQSGKTILDFLKSDGFANRNFMQLIHDDSLTFKEDIQKAQVSGQGDSLHEHIANLAGSPAIKKGILQTVKVVDELVKVMGRHKPENIVIEMARENQTTQKGQKNSRERMKRIEEGIKELGSQILKEHPVENTQLQNEKLYLYYLQNGRDMYVDQELDINRLSDYDVDHIVPQSFLKDDSIDNKVLTRSDKARGKSDNVPSEEVVKKMKNYWRQLLNAKLITQRKFDNLTKAERGGLSELDKAGFIKRQLVETRQITKHVAQILDSRMNTKYDENDKLIREVKVITLKSKLVSDFRKDFQFYKVREINNYHHAHDAYLNAVVGTALIKKYPKLESEFVYGDYKVYDVRKMIAKSEQEIGKATAKYFFYSNIMNFFKTEITLANGEIRKRPLIETNGETGEIVWDKGRDFATVRKVLSMPQVNIVKKTEVQTGGFSKESILPKRNSDKLIARKKDWDPKKYGGFDSPTVAYSVLVVAKVEKGKSKKLKSVKELLGITIMERSSFEKNPIDFLEAKGYKEVKKDLIIKLPKYSLFELENGRKRMLASAGELQKGNELALPSKYVNFLYLASHYEKLKGSPEDNEQKQLFVEQHKHYLDEIIEQISEFSKRVILADANLDKVLSAYNKHRDKPIREQAENIIHLFTLTNLGAPAAFKYFDTTIDRKRYTSTKEVLDATLIHQSITGLYETRIDLSQLGGDGGEAAAKGGSGSSGGGRDIMKDIKVRLMTDSPDDSQDLMIGAIESNLFADQISWKSDQPVWLNQWPLKQEKLQALQQLVTEQLQLGHLEESNSPWNTPVFVIKKKSGKWRLLQDLRAVNATMHDMGALQPGLPSPVAVPKGWEIIIIDLQDCFFNIKLHPEDCKRFAFSVPSPNFKRPYQRFQWKVLPQGMKNSPTLCQKFVDKAILTVRDKYQDSYIVHYMDDILLAHPSRSIVDEILTSMIQALNKHGLVVSTEKIQKYDNLKYLGTHIQGDSVSYQKLQIRTDKLRTLNDFQKLLGNINWIRPFLKLTTGELKPLFEILNGDSNPISTRKLTPEACKALQLMNERLSTARVKRLDLSQPWSLCILKTEYTPTACLWQDGVVEWIHLPHISPKVITPYDIFCTQLIIKGRHRSKELFSKDPDYIVVPYTKVQFDLLLQEKEDWPISLLGFLGEVHFHLPKDPLLTFTLQTAIIFPHMTSTTPLEKGIVIFTDGSANGRSVTYIQGREPIIKENTQNTAQQAEIVAVITAFEEVSQPFNLYTDSKYVTGLFPEIETATLSPRTKIYTELKHLQRLIHKRQEKFYIGHIRGHTGLPGPLAQGNAYADSLTRILTAGKRTADGSEFEKRTADGSEFESPKKKAKVE

SEQ ID NO: 3231 - protein, 2022 aa, synthetic construct
MPAAKRVKLDGGDKKYSIGLDIGTNSVGWAVITDEYKVPSKKFKVLGNTDRHSIKKNLIGALLFDSGETAEATRLKRTARRRYTRRKNRICYLQEIFSNEMAKVDDSFFHRLEESFLVEEDKKHERHPIFGNIVDEVAYHEKYPTIYHLRKKLVDSTDKADLRLIYLALAHMIKFRGHFLIEGDLNPDNSDVDKLFIQLVQTYNQLFEENPINASGVDAKAILSARLSKSRRLENLIAQLPGEKKNGLFGNLIALSLGLTPNFKSNFDLAEDAKLQLSKDTYDDDLDNLLAQIGDQYADLFLAAKNLSDAILLSDILRVNTEITKAPLSASMIKRYDEHHQDLTLLKALVRQQLPEKYKEIFFDQSKNGYAGYIDGGASQEEFYKFIKPILEKMDGTEELLVKLNREDLLRKQRTFDNGSIPHQIHLGELHAILRRQEDFYPFLKDNREKIEKILTFRIPYYVGPLARGNSRFAWMTRKSEETITPWNFEEVVDKGASAQSFIERMTNFDKNLPNEKVLPKHSLLYEYFTVYNELTKVKYVTEGMRKPAFLSGEQKKAIVDLLFKTNRKVTVKQLKEDYFKKIECFDSVEISGVEDRFNASLGTYHDLLKIIKDKDFLDNEENEDILEDIVLTLTLFEDREMIEERLKTYAHLFDDKVMKQLKRRRYTGWGRLSRKLINGIRDKQSGKTILDFLKSDGFANRNFMQLIHDDSLTFKEDIQKAQVSGQGDSLHEHIANLAGSPAIKKGILQTVKVVDELVKVMGRHKPENIVIEMARENQTTQKGQKNSRERMKRIEEGIKELGSQILKEHPVENTQLQNEKLYLYYLQNGRDMYVDQELDINRLSDYDVDHIVPQSFLKDDSIDNKVLTRSDKARGKSDNVPSEEVVKKMKNYWRQLLNAKLITQRKFDNLTKAERGGLSELDKAGFIKRQLVETRQITKHVAQILDSRMNTKYDENDKLIREVKVITLKSKLVSDFRKDFQFYKVREINNYHHAHDAYLNAVVGTALIKKYPKLESEFVYGDYKVYDVRKMIAKSEQEIGKATAKYFFYSNIMNFFKTEITLANGEIRKRPLIETNGETGEIVWDKGRDFATVRKVLSMPQVNIVKKTEVQTGGFSKESILPKRNSDKLIARKKDWDPKKYGGFDSPTVAYSVLVVAKVEKGKSKKLKSVKELLGITIMERSSFEKNPIDFLEAKGYKEVKKDLIIKLPKYSLFELENGRKRMLASAGELQKGNELALPSKYVNFLYLASHYEKLKGSPEDNEQKQLFVEQHKHYLDEIIEQISEFSKRVILADANLDKVLSAYNKHRDKPIREQAENIIHLFTLTNLGAPAAFKYFDTTIDRKRYTSTKEVLDATLIHQSITGLYETRIDLSQLGGDGGGGGGSSPAPGGGRDIMKDIKVRLMTDSPDDSQDLMIGAIESNLFADQISWKSDQPVWLNQWPLKQEKLQALQQLVTEQLQLGHLEESNSPWNTPVFVIKKKSGKWRLLQDLRAVNATMHDMGALQPGLPSPVAVPKGWEIIIIDLQDCFFNIKLHPEDCKRFAFSVPSPNFKRPYQRFQWKVLPQGMKNSPTLCQKFVDKAILTVRDKYQDSYIVHYMDDILLAHPSRSIVDEILTSMIQALNKHGLVVSTEKIQKYDNLKYLGTHIQGDSVSYQKLQIRTDKLRTLNDFQKLLGNINWIRPFLKLTTGELKPLFEILNGDSNPISTRKLTPEACKALQLMNERLSTARVKRLDLSQPWSLCILKTEYTPTACLWQDGVVEWIHLPHISPKVITPYDIFCTQLIIKGRHRSKELFSKDPDYIVVPYTKVQFDLLLQEKEDWPISLLGFLGEVHFHLPKDPLLTFTLQTAIIFPHMTSTTPLEKGIVIFTDGSANGRSVTYIQGREPIIKENTQNTAQQAEIVAVITAFEEVSQPFNLYTDSKYVTGLFPEIETATLSPRTKIYTELKHLQRLIHKRQEKFYIGHIRGHTGLPGPLAQGNAYADSLTRILTAGKRTADGSEFEKRTADGSEFESPKKKAKVE

SEQ ID NO: 3232 - protein, 2024 aa, synthetic construct
MPAAKRVKLDGGDKKYSIGLDIGTNSVGWAVITDEYKVPSKKFKVLGNTDRHSIKKNLIGALLFDSGETAEATRLKRTARRRYTRRKNRICYLQEIFSNEMAKVDDSFFHRLEESFLVEEDKKHERHPIFGNIVDEVAYHEKYPTIYHLRKKLVDSTDKADLRLIYLALAHMIKFRGHFLIEGDLNPDNSDVDKLFIQLVQTYNQLFEENPINASGVDAKAILSARLSKSRRLENLIAQLPGEKKNGLFGNLIALSLGLTPNFKSNFDLAEDAKLQLSKDTYDDDLDNLLAQIGDQYADLFLAAKNLSDAILLSDILRVNTEITKAPLSASMIKRYDEHHQDLTLLKALVRQQLPEKYKEIFFDQSKNGYAGYIDGGASQEEFYKFIKPILEKMDGTEELLVKLNREDLLRKQRTFDNGSIPHQIHLGELHAILRRQEDFYPFLKDNREKIEKILTFRIPYYVGPLARGNSRFAWMTRKSEETITPWNFEEVVDKGASAQSFIERMTNFDKNLPNEKVLPKHSLLYEYFTVYNELTKVKYVTEGMRKPAFLSGEQKKAIVDLLFKTNRKVTVKQLKEDYFKKIECFDSVEISGVEDRFNASLGTYHDLLKIIKDKDFLDNEENEDILEDIVLTLTLFEDREMIEERLKTYAHLFDDKVMKQLKRRRYTGWGRLSRKLINGIRDKQSGKTILDFLKSDGFANRNFMQLIHDDSLTFKEDIQKAQVSGQGDSLHEHIANLAGSPAIKKGILQTVKVVDELVKVMGRHKPENIVIEMARENQTTQKGQKNSRERMKRIEEGIKELGSQILKEHPVENTQLQNEKLYLYYLQNGRDMYVDQELDINRLSDYDVDHIVPQSFLKDDSIDNKVLTRSDKARGKSDNVPSEEVVKKMKNYWRQLLNAKLITQRKFDNLTKAERGGLSELDKAGFIKRQLVETRQITKHVAQILDSRMNTKYDENDKLIREVKVITLKSKLVSDFRKDFQFYKVREINNYHHAHDAYLNAVVGTALIKKYPKLESEFVYGDYKVYDVRKMIAKSEQEIGKATAKYFFYSNIMNFFKTEITLANGEIRKRPLIETNGETGEIVWDKGRDFATVRKVLSMPQVNIVKKTEVQTGGFSKESILPKRNSDKLIARKKDWDPKKYGGFDSPTVAYSVLVVAKVEKGKSKKLKSVKELLGITIMERSSFEKNPIDFLEAKGYKEVKKDLIIKLPKYSLFELENGRKRMLASAGELQKGNELALPSKYVNFLYLASHYEKLKGSPEDNEQKQLFVEQHKHYLDEIIEQISEFSKRVILADANLDKVLSAYNKHRDKPIREQAENIIHLFTLTNLGAPAAFKYFDTTIDRKRYTSTKEVLDATLIHQSITGLYETRIDLSQLGGDGGGSSPAPEAAAKGGGRDIMKDIKVRLMTDSPDDSQDLMIGAIESNLFADQISWKSDQPVWLNQWPLKQEKLQALQQLVTEQLQLGHLEESNSPWNTPVFVIKKKSGKWRLLQDLRAVNATMHDMGALQPGLPSPVAVPKGWEIIIIDLQDCFFNIKLHPEDCKRFAFSVPSPNFKRPYQRFQWKVLPQGMKNSPTLCQKFVDKAILTVRDKYQDSYIVHYMDDILLAHPSRSIVDEILTSMIQALNKHGLVVSTEKIQKYDNLKYLGTHIQGDSVSYQKLQIRTDKLRTLNDFQKLLGNINWIRPFLKLTTGELKPLFEILNGDSNPISTRKLTPEACKALQLMNERLSTARVKRLDLSQPWSLCILKTEYTPTACLWQDGVVEWIHLPHISPKVITPYDIFCTQLIIKGRHRSKELFSKDPDYIVVPYTKVQFDLLLQEKEDWPISLLGFLGEVHFHLPKDPLLTFTLQTAIIFPHMTSTTPLEKGIVIFTDGSANGRSVTYIQGREPIIKENTQNTAQQAEIVAVITAFEEVSQPFNLYTDSKYVTGLFPEIETATLSPRTKIYTELKHLQRLIHKRQEKFYIGHIRGHTGLPGPLAQGNAYADSLTRILTAGKRTADGSEFEKRTADGSEFESPKKKAKVE

SEQ ID NO: 3233 - protein, 2022 aa, synthetic construct
MPAAKRVKLDGGDKKYSIGLDIGTNSVGWAVITDEYKVPSKKFKVLGNTDRHSIKKNLIGALLFDSGETAEATRLKRTARRRYTRRKNRICYLQEIFSNEMAKVDDSFFHRLEESFLVEEDKKHERHPIFGNIVDEVAYHEKYPTIYHLRKKLVDSTDKADLRLIYLALAHMIKFRGHFLIEGDLNPDNSDVDKLFIQLVQTYNQLFEENPINASGVDAKAILSARLSKSRRLENLIAQLPGEKKNGLFGNLIALSLGLTPNFKSNFDLAEDAKLQLSKDTYDDDLDNLLAQIGDQYADLFLAAKNLSDAILLSDILRVNTEITKAPLSASMIKRYDEHHQDLTLLKALVRQQLPEKYKEIFFDQSKNGYAGYIDGGASQEEFYKFIKPILEKMDGTEELLVKLNREDLLRKQRTFDNGSIPHQIHLGELHAILRRQEDFYPFLKDNREKIEKILTFRIPYYVGPLARGNSRFAWMTRKSEETITPWNFEEVVDKGASAQSFIERMTNFDKNLPNEKVLPKHSLLYEYFTVYNELTKVKYVTEGMRKPAFLSGEQKKAIVDLLFKTNRKVTVKQLKEDYFKKIECFDSVEISGVEDRFNASLGTYHDLLKIIKDKDFLDNEENEDILEDIVLTLTLFEDREMIEERLKTYAHLFDDKVMKQLKRRRYTGWGRLSRKLINGIRDKQSGKTILDFLKSDGFANRNFMQLIHDDSLTFKEDIQKAQVSGQGDSLHEHIANLAGSPAIKKGILQTVKVVDELVKVMGRHKPENIVIEMARENQTTQKGQKNSRERMKRIEEGIKELGSQILKEHPVENTQLQNEKLYLYYLQNGRDMYVDQELDINRLSDYDVDHIVPQSFLKDDSIDNKVLTRSDKARGKSDNVPSEEVVKKMKNYWRQLLNAKLITQRKFDNLTKAERGGLSELDKAGFIKRQLVETRQITKHVAQILDSRMNTKYDENDKLIREVKVITLKSKLVSDFRKDFQFYKVREINNYHHAHDAYLNAVVGTALIKKYPKLESEFVYGDYKVYDVRKMIAKSEQEIGKATAKYFFYSNIMNFFKTEITLANGEIRKRPLIETNGETGEIVWDKGRDFATVRKVLSMPQVNIVKKTEVQTGGFSKESILPKRNSDKLIARKKDWDPKKYGGFDSPTVAYSVLVVAKVEKGKSKKLKSVKELLGITIMERSSFEKNPIDFLEAKGYKEVKKDLIIKLPKYSLFELENGRKRMLASAGELQKGNELALPSKYVNFLYLASHYEKLKGSPEDNEQKQLFVEQHKHYLDEIIEQISEFSKRVILADANLDKVLSAYNKHRDKPIREQAENIIHLFTLTNLGAPAAFKYFDTTIDRKRYTSTKEVLDATLIHQSITGLYETRIDLSQLGGDGGPAPGGGGSSGGGRDIMKDIKVRLMTDSPDDSQDLMIGAIESNLFADQISWKSDQPVWLNQWPLKQEKLQALQQLVTEQLQLGHLEESNSPWNTPVFVIKKKSGKWRLLQDLRAVNATMHDMGALQPGLPSPVAVPKGWEIIIIDLQDCFFNIKLHPEDCKRFAFSVPSPNFKRPYQRFQWKVLPQGMKNSPTLCQKFVDKAILTVRDKYQDSYIVHYMDDILLAHPSRSIVDEILTSMIQALNKHGLVVSTEKIQKYDNLKYLGTHIQGDSVSYQKLQIRTDKLRTLNDFQKLLGNINWIRPFLKLTTGELKPLFEILNGDSNPISTRKLTPEACKALQLMNERLSTARVKRLDLSQPWSLCILKTEYTPTACLWQDGVVEWIHLPHISPKVITPYDIFCTQLIIKGRHRSKELFSKDPDYIVVPYTKVQFDLLLQEKEDWPISLLGFLGEVHFHLPKDPLLTFTLQTAIIFPHMTSTTPLEKGIVIFTDGSANGRSVTYIQGREPIIKENTQNTAQQAEIVAVITAFEEVSQPFNLYTDSKYVTGLFPEIETATLSPRTKIYTELKHLQRLIHKRQEKFYIGHIRGHTGLPGPLAQGNAYADSLTRILTAGKRTADGSEFEKRTADGSEFESPKKKAKVE

SEQ ID NO: 3234 - protein, 2022 aa, synthetic construct
MPAAKRVKLDGGDKKYSIGLDIGTNSVGWAVITDEYKVPSKKFKVLGNTDRHSIKKNLIGALLFDSGETAEATRLKRTARRRYTRRKNRICYLQEIFSNEMAKVDDSFFHRLEESFLVEEDKKHERHPIFGNIVDEVAYHEKYPTIYHLRKKLVDSTDKADLRLIYLALAHMIKFRGHFLIEGDLNPDNSDVDKLFIQLVQTYNQLFEENPINASGVDAKAILSARLSKSRRLENLIAQLPGEKKNGLFGNLIALSLGLTPNFKSNFDLAEDAKLQLSKDTYDDDLDNLLAQIGDQYADLFLAAKNLSDAILLSDILRVNTEITKAPLSASMIKRYDEHHQDLTLLKALVRQQLPEKYKEIFFDQSKNGYAGYIDGGASQEEFYKFIKPILEKMDGTEELLVKLNREDLLRKQRTFDNGSIPHQIHLGELHAILRRQEDFYPFLKDNREKIEKILTFRIPYYVGPLARGNSRFAWMTRKSEETITPWNFEEVVDKGASAQSFIERMTNFDKNLPNEKVLPKHSLLYEYFTVYNELTKVKYVTEGMRKPAFLSGEQKKAIVDLLFKTNRKVTVKQLKEDYFKKIECFDSVEISGVEDRFNASLGTYHDLLKIIKDKDFLDNEENEDILEDIVLTLTLFEDREMIEERLKTYAHLFDDKVMKQLKRRRYTGWGRLSRKLINGIRDKQSGKTILDFLKSDGFANRNFMQLIHDDSLTFKEDIQKAQVSGQGDSLHEHIANLAGSPAIKKGILQTVKVVDELVKVMGRHKPENIVIEMARENQTTQKGQKNSRERMKRIEEGIKELGSQILKEHPVENTQLQNEKLYLYYLQNGRDMYVDQELDINRLSDYDVDHIVPQSFLKDDSIDNKVLTRSDKARGKSDNVPSEEVVKKMKNYWRQLLNAKLITQRKFDNLTKAERGGLSELDKAGFIKRQLVETRQITKHVAQILDSRMNTKYDENDKLIREVKVITLKSKLVSDFRKDFQFYKVREINNYHHAHDAYLNAVVGTALIKKYPKLESEFVYGDYKVYDVRKMIAKSEQEIGKATAKYFFYSNIMNFFKTEITLANGEIRKRPLIETNGETGEIVWDKGRDFATVRKVLSMPQVNIVKKTEVQTGGFSKESILPKRNSDKLIARKKDWDPKKYGGFDSPTVAYSVLVVAKVEKGKSKKLKSVKELLGITIMERSSFEKNPIDFLEAKGYKEVKKDLIIKLPKYSLFELENGRKRMLASAGELQKGNELALPSKYVNFLYLASHYEKLKGSPEDNEQKQLFVEQHKHYLDEIIEQISEFSKRVILADANLDKVLSAYNKHRDKPIREQAENIIHLFTLTNLGAPAAFKYFDTTIDRKRYTSTKEVLDATLIHQSITGLYETRIDLSQLGGDGGPAPGGSGGGGGGRDIMKDIKVRLMTDSPDDSQDLMIGAIESNLFADQISWKSDQPVWLNQWPLKQEKLQALQQLVTEQLQLGHLEESNSPWNTPVFVIKKKSGKWRLLQDLRAVNATMHDMGALQPGLPSPVAVPKGWEIIIIDLQDCFFNIKLHPEDCKRFAFSVPSPNFKRPYQRFQWKVLPQGMKNSPTLCQKFVDKAILTVRDKYQDSYIVHYMDDILLAHPSRSIVDEILTSMIQALNKHGLVVSTEKIQKYDNLKYLGTHIQGDSVSYQKLQIRTDKLRTLNDFQKLLGNINWIRPFLKLTTGELKPLFEILNGDSNPISTRKLTPEACKALQLMNERLSTARVKRLDLSQPWSLCILKTEYTPTACLWQDGVVEWIHLPHISPKVITPYDIFCTQLIIKGRHRSKELFSKDPDYIVVPYTKVQFDLLLQEKEDWPISLLGFLGEVHFHLPKDPLLTFTLQTAIIFPHMTSTTPLEKGIVIFTDGSANGRSVTYIQGREPIIKENTQNTAQQAEIVAVITAFEEVSQPFNLYTDSKYVTGLFPEIETATLSPRTKIYTELKHLQRLIHKRQEKFYIGHIRGHTGLPGPLAQGNAYADSLTRILTAGKRTADGSEFEKRTADGSEFESPKKKAKVE

SEQ ID NO: 3235 - protein, 2024 aa, synthetic construct
MPAAKRVKLDGGDKKYSIGLDIGTNSVGWAVITDEYKVPSKKFKVLGNTDRHSIKKNLIGALLFDSGETAEATRLKRTARRRYTRRKNRICYLQEIFSNEMAKVDDSFFHRLEESFLVEEDKKHERHPIFGNIVDEVAYHEKYPTIYHLRKKLVDSTDKADLRLIYLALAHMIKFRGHFLIEGDLNPDNSDVDKLFIQLVQTYNQLFEENPINASGVDAKAILSARLSKSRRLENLIAQLPGEKKNGLFGNLIALSLGLTPNFKSNFDLAEDAKLQLSKDTYDDDLDNLLAQIGDQYADLFLAAKNLSDAILLSDILRVNTEITKAPLSASMIKRYDEHHQDLTLLKALVRQQLPEKYKEIFFDQSKNGYAGYIDGGASQEEFYKFIKPILEKMDGTEELLVKLNREDLLRKQRTFDNGSIPHQIHLGELHAILRRQEDFYPFLKDNREKIEKILTFRIPYYVGPLARGNSRFAWMTRKSEETITPWNFEEVVDKGASAQSFIERMTNFDKNLPNEKVLPKHSLLYEYFTVYNELTKVKYVTEGMRKPAFLSGEQKKAIVDLLFKTNRKVTVKQLKEDYFKKIECFDSVEISGVEDRFNASLGTYHDLLKIIKDKDFLDNEENEDILEDIVLTLTLFEDREMIEERLKTYAHLFDDKVMKQLKRRRYTGWGRLSRKLINGIRDKQSGKTILDFLKSDGFANRNFMQLIHDDSLTFKEDIQKAQVSGQGDSLHEHIANLAGSPAIKKGILQTVKVVDELVKVMGRHKPENIVIEMARENQTTQKGQKNSRERMKRIEEGIKELGSQILKEHPVENTQLQNEKLYLYYLQNGRDMYVDQELDINRLSDYDVDHIVPQSFLKDDSIDNKVLTRSDKARGKSDNVPSEEVVKKMKNYWRQLLNAKLITQRKFDNLTKAERGGLSELDKAGFIKRQLVETRQITKHVAQILDSRMNTKYDENDKLIREVKVITLKSKLVSDFRKDFQFYKVREINNYHHAHDAYLNAVVGTALIKKYPKLESEFVYGDYKVYDVRKMIAKSEQEIGKATAKYFFYSNIMNFFKTEITLANGEIRKRPLIETNGETGEIVWDKGRDFATVRKVLSMPQVNIVKKTEVQTGGFSKESILPKRNSDKLIARKKDWDPKKYGGFDSPTVAYSVLVVAKVEKGKSKKLKSVKELLGITIMERSSFEKNPIDFLEAKGYKEVKKDLIIKLPKYSLFELENGRKRMLASAGELQKGNELALPSKYVNFLYLASHYEKLKGSPEDNEQKQLFVEQHKHYLDEIIEQISEFSKRVILADANLDKVLSAYNKHRDKPIREQAENIIHLFTLTNLGAPAAFKYFDTTIDRKRYTSTKEVLDATLIHQSITGLYETRIDLSQLGGDGGGGSEAAAKGGGGGGRDIMKDIKVRLMTDSPDDSQDLMIGAIESNLFADQISWKSDQPVWLNQWPLKQEKLQALQQLVTEQLQLGHLEESNSPWNTPVFVIKKKSGKWRLLQDLRAVNATMHDMGALQPGLPSPVAVPKGWEIIIIDLQDCFFNIKLHPEDCKRFAFSVPSPNFKRPYQRFQWKVLPQGMKNSPTLCQKFVDKAILTVRDKYQDSYIVHYMDDILLAHPSRSIVDEILTSMIQALNKHGLVVSTEKIQKYDNLKYLGTHIQGDSVSYQKLQIRTDKLRTLNDFQKLLGNINWIRPFLKLTTGELKPLFEILNGDSNPISTRKLTPEACKALQLMNERLSTARVKRLDLSQPWSLCILKTEYTPTACLWQDGVVEWIHLPHISPKVITPYDIFCTQLIIKGRHRSKELFSKDPDYIVVPYTKVQFDLLLQEKEDWPISLLGFLGEVHFHLPKDPLLTFTLQTAIIFPHMTSTTPLEKGIVIFTDGSANGRSVTYIQGREPIIKENTQNTAQQAEIVAVITAFEEVSQPFNLYTDSKYVTGLFPEIETATLSPRTKIYTELKHLQRLIHKRQEKFYIGHIRGHTGLPGPLAQGNAYADSLTRILTAGKRTADGSEFEKRTADGSEFESPKKKAKVE

SEQ ID NO: 3236 - protein, 2024 aa, synthetic construct
MPAAKRVKLDGGDKKYSIGLDIGTNSVGWAVITDEYKVPSKKFKVLGNTDRHSIKKNLIGALLFDSGETAEATRLKRTARRRYTRRKNRICYLQEIFSNEMAKVDDSFFHRLEESFLVEEDKKHERHPIFGNIVDEVAYHEKYPTIYHLRKKLVDSTDKADLRLIYLALAHMIKFRGHFLIEGDLNPDNSDVDKLFIQLVQTYNQLFEENPINASGVDAKAILSARLSKSRRLENLIAQLPGEKKNGLFGNLIALSLGLTPNFKSNFDLAEDAKLQLSKDTYDDDLDNLLAQIGDQYADLFLAAKNLSDAILLSDILRVNTEITKAPLSASMIKRYDEHHQDLTLLKALVRQQLPEKYKEIFFDQSKNGYAGYIDGGASQEEFYKFIKPILEKMDGTEELLVKLNREDLLRKQRTFDNGSIPHQIHLGELHAILRRQEDFYPFLKDNREKIEKILTFRIPYYVGPLARGNSRFAWMTRKSEETITPWNFEEVVDKGASAQSFIERMTNFDKNLPNEKVLPKHSLLYEYFTVYNELTKVKYVTEGMRKPAFLSGEQKKAIVDLLFKTNRKVTVKQLKEDYFKKIECFDSVEISGVEDRFNASLGTYHDLLKIIKDKDFLDNEENEDILEDIVLTLTLFEDREMIEERLKTYAHLFDDKVMKQLKRRRYTGWGRLSRKLINGIRDKQSGKTILDFLKSDGFANRNFMQLIHDDSLTFKEDIQKAQVSGQGDSLHEHIANLAGSPAIKKGILQTVKVVDELVKVMGRHKPENIVIEMARENQTTQKGQKNSRERMKRIEEGIKELGSQILKEHPVENTQLQNEKLYLYYLQNGRDMYVDQELDINRLSDYDVDHIVPQSFLKDDSIDNKVLTRSDKARGKSDNVPSEEVVKKMKNYWRQLLNAKLITQRKFDNLTKAERGGLSELDKAGFIKRQLVETRQITKHVAQILDSRMNTKYDENDKLIREVKVITLKSKLVSDFRKDFQFYKVREINNYHHAHDAYLNAVVGTALIKKYPKLESEFVYGDYKVYDVRKMIAKSEQEIGKATAKYFFYSNIMNFFKTEITLANGEIRKRPLIETNGETGEIVWDKGRDFATVRKVLSMPQVNIVKKTEVQTGGFSKESILPKRNSDKLIARKKDWDPKKYGGFDSPTVAYSVLVVAKVEKGKSKKLKSVKELLGITIMERSSFEKNPIDFLEAKGYKEVKKDLIIKLPKYSLFELENGRKRMLASAGELQKGNELALPSKYVNFLYLASHYEKLKGSPEDNEQKQLFVEQHKHYLDEIIEQISEFSKRVILADANLDKVLSAYNKHRDKPIREQAENIIHLFTLTNLGAPAAFKYFDTTIDRKRYTSTKEVLDATLIHQSITGLYETRIDLSQLGGDGGPAPEAAAKGSSGGGRDIMKDIKVRLMTDSPDDSQDLMIGAIESNLFADQISWKSDQPVWLNQWPLKQEKLQALQQLVTEQLQLGHLEESNSPWNTPVFVIKKKSGKWRLLQDLRAVNATMHDMGALQPGLPSPVAVPKGWEIIIIDLQDCFFNIKLHPEDCKRFAFSVPSPNFKRPYQRFQWKVLPQGMKNSPTLCQKFVDKAILTVRDKYQDSYIVHYMDDILLAHPSRSIVDEILTSMIQALNKHGLVVSTEKIQKYDNLKYLGTHIQGDSVSYQKLQIRTDKLRTLNDFQKLLGNINWIRPFLKLTTGELKPLFEILNGDSNPISTRKLTPEACKALQLMNERLSTARVKRLDLSQPWSLCILKTEYTPTACLWQDGVVEWIHLPHISPKVITPYDIFCTQLIIKGRHRSKELFSKDPDYIVVPYTKVQFDLLLQEKEDWPISLLGFLGEVHFHLPKDPLLTFTLQTAIIFPHMTSTTPLEKGIVIFTDGSANGRSVTYIQGREPIIKENTQNTAQQAEIVAVITAFEEVSQPFNLYTDSKYVTGLFPEIETATLSPRTKIYTELKHLQRLIHKRQEKFYIGHIRGHTGLPGPLAQGNAYADSLTRILTAGKRTADGSEFEKRTADGSEFESPKKKAKVE

SEQ ID NO: 3237 - protein, 2024 aa, synthetic construct
MPAAKRVKLDGGDKKYSIGLDIGTNSVGWAVITDEYKVPSKKFKVLGNTDRHSIKKNLIGALLFDSGETAEATRLKRTARRRYTRRKNRICYLQEIFSNEMAKVDDSFFHRLEESFLVEEDKKHERHPIFGNIVDEVAYHEKYPTIYHLRKKLVDSTDKADLRLIYLALAHMIKFRGHFLIEGDLNPDNSDVDKLFIQLVQTYNQLFEENPINASGVDAKAILSARLSKSRRLENLIAQLPGEKKNGLFGNLIALSLGLTPNFKSNFDLAEDAKLQLSKDTYDDDLDNLLAQIGDQYADLFLAAKNLSDAILLSDILRVNTEITKAPLSASMIKRYDEHHQDLTLLKALVRQQLPEKYKEIFFDQSKNGYAGYIDGGASQEEFYKFIKPILEKMDGTEELLVKLNREDLLRKQRTFDNGSIPHQIHLGELHAILRRQEDFYPFLKDNREKIEKILTFRIPYYVGPLARGNSRFAWMTRKSEETITPWNFEEVVDKGASAQSFIERMTNFDKNLPNEKVLPKHSLLYEYFTVYNELTKVKYVTEGMRKPAFLSGEQKKAIVDLLFKTNRKVTVKQLKEDYFKKIECFDSVEISGVEDRFNASLGTYHDLLKIIKDKDFLDNEENEDILEDIVLTLTLFEDREMIEERLKTYAHLFDDKVMKQLKRRRYTGWGRLSRKLINGIRDKQSGKTILDFLKSDGFANRNFMQLIHDDSLTFKEDIQKAQVSGQGDSLHEHIANLAGSPAIKKGILQTVKVVDELVKVMGRHKPENIVIEMARENQTTQKGQKNSRERMKRIEEGIKELGSQILKEHPVENTQLQNEKLYLYYLQNGRDMYVDQELDINRLSDYDVDHIVPQSFLKDDSIDNKVLTRSDKARGKSDNVPSEEVVKKMKNYWRQLLNAKLITQRKFDNLTKAERGGLSELDKAGFIKRQLVETRQITKHVAQILDSRMNTKYDENDKLIREVKVITLKSKLVSDFRKDFQFYKVREINNYHHAHDAYLNAVVGTALIKKYPKLESEFVYGDYKVYDVRKMIAKSEQEIGKATAKYFFYSNIMNFFKTEITLANGEIRKRPLIETNGETGEIVWDKGRDFATVRKVLSMPQVNIVKKTEVQTGGFSKESILPKRNSDKLIARKKDWDPKKYGGFDSPTVAYSVLVVAKVEKGKSKKLKSVKELLGITIMERSSFEKNPIDFLEAKGYKEVKKDLIIKLPKYSLFELENGRKRMLASAGELQKGNELALPSKYVNFLYLASHYEKLKGSPEDNEQKQLFVEQHKHYLDEIIEQISEFSKRVILADANLDKVLSAYNKHRDKPIREQAENIIHLFTLTNLGAPAAFKYFDTTIDRKRYTSTKEVLDATLIHQSITGLYETRIDLSQLGGDGGGGSEAAAKPAPGGGRDIMKDIKVRLMTDSPDDSQDLMIGAIESNLFADQISWKSDQPVWLNQWPLKQEKLQALQQLVTEQLQLGHLEESNSPWNTPVFVIKKKSGKWRLLQDLRAVNATMHDMGALQPGLPSPVAVPKGWEIIIIDLQDCFFNIKLHPEDCKRFAFSVPSPNFKRPYQRFQWKVLPQGMKNSPTLCQKFVDKAILTVRDKYQDSYIVHYMDDILLAHPSRSIVDEILTSMIQALNKHGLVVSTEKIQKYDNLKYLGTHIQGDSVSYQKLQIRTDKLRTLNDFQKLLGNINWIRPFLKLTTGELKPLFEILNGDSNPISTRKLTPEACKALQLMNERLSTARVKRLDLSQPWSLCILKTEYTPTACLWQDGVVEWIHLPHISPKVITPYDIFCTQLIIKGRHRSKELFSKDPDYIVVPYTKVQFDLLLQEKEDWPISLLGFLGEVHFHLPKDPLLTFTLQTAIIFPHMTSTTPLEKGIVIFTDGSANGRSVTYIQGREPIIKENTQNTAQQAEIVAVITAFEEVSQPFNLYTDSKYVTGLFPEIETATLSPRTKIYTELKHLQRLIHKRQEKFYIGHIRGHTGLPGPLAQGNAYADSLTRILTAGKRTADGSEFEKRTADGSEFESPKKKAKVE

SEQ ID NO: 3238 - protein, 2046 aa, synthetic construct
MPAAKRVKLDGGDKKYSIGLDIGTNSVGWAVITDEYKVPSKKFKVLGNTDRHSIKKNLIGALLFDSGETAEATRLKRTARRRYTRRKNRICYLQEIFSNEMAKVDDSFFHRLEESFLVEEDKKHERHPIFGNIVDEVAYHEKYPTIYHLRKKLVDSTDKADLRLIYLALAHMIKFRGHFLIEGDLNPDNSDVDKLFIQLVQTYNQLFEENPINASGVDAKAILSARLSKSRRLENLIAQLPGEKKNGLFGNLIALSLGLTPNFKSNFDLAEDAKLQLSKDTYDDDLDNLLAQIGDQYADLFLAAKNLSDAILLSDILRVNTEITKAPLSASMIKRYDEHHQDLTLLKALVRQQLPEKYKEIFFDQSKNGYAGYIDGGASQEEFYKFIKPILEKMDGTEELLVKLNREDLLRKQRTFDNGSIPHQIHLGELHAILRRQEDFYPFLKDNREKIEKILTFRIPYYVGPLARGNSRFAWMTRKSEETITPWNFEEVVDKGASAQSFIERMTNFDKNLPNEKVLPKHSLLYEYFTVYNELTKVKYVTEGMRKPAFLSGEQKKAIVDLLFKTNRKVTVKQLKEDYFKKIECFDSVEISGVEDRFNASLGTYHDLLKIIKDKDFLDNEENEDILEDIVLTLTLFEDREMIEERLKTYAHLFDDKVMKQLKRRRYTGWGRLSRKLINGIRDKQSGKTILDFLKSDGFANRNFMQLIHDDSLTFKEDIQKAQVSGQGDSLHEHIANLAGSPAIKKGILQTVKVVDELVKVMGRHKPENIVIEMARENQTTQKGQKNSRERMKRIEEGIKELGSQILKEHPVENTQLQNEKLYLYYLQNGRDMYVDQELDINRLSDYDVDHIVPQSFLKDDSIDNKVLTRSDKARGKSDNVPSEEVVKKMKNYWRQLLNAKLITQRKFDNLTKAERGGLSELDKAGFIKRQLVETRQITKHVAQILDSRMNTKYDENDKLIREVKVITLKSKLVSDFRKDFQFYKVREINNYHHAHDAYLNAVVGTALIKKYPKLESEFVYGDYKVYDVRKMIAKSEQEIGKATAKYFFYSNIMNFFKTEITLANGEIRKRPLIETNGETGEIVWDKGRDFATVRKVLSMPQVNIVKKTEVQTGGFSKESILPKRNSDKLIARKKDWDPKKYGGFDSPTVAYSVLVVAKVEKGKSKKLKSVKELLGITIMERSSFEKNPIDFLEAKGYKEVKKDLIIKLPKYSLFELENGRKRMLASAGELQKGNELALPSKYVNFLYLASHYEKLKGSPEDNEQKQLFVEQHKHYLDEIIEQISEFSKRVILADANLDKVLSAYNKHRDKPIREQAENIIHLFTLTNLGAPAAFKYFDTTIDRKRYTSTKEVLDATLIHQSITGLYETRIDLSQLGGDGGSGGSSGGSSGSETPGTSESATPESSGGSSGGSSGGGRDIMKDIKVRLMTDSPDDSQDLMIGAIESNLFADQISWKSDQPVWLNQWPLKQEKLQALQQLVTEQLQLGHLEESNSPWNTPVFVIKKKSGKWRLLQDLRAVNATMHDMGALQPGLPSPVAVPKGWEIIIIDLQDCFFNIKLHPEDCKRFAFSVPSPNFKRPYQRFQWKVLPQGMKNSPTLCQKFVDKAILTVRDKYQDSYIVHYMDDILLAHPSRSIVDEILTSMIQALNKHGLVVSTEKIQKYDNLKYLGTHIQGDSVSYQKLQIRTDKLRTLNDFQKLLGNINWIRPFLKLTTGELKPLFEILNGDSNPISTRKLTPEACKALQLMNERLSTARVKRLDLSQPWSLCILKTEYTPTACLWQDGVVEWIHLPHISPKVITPYDIFCTQLIIKGRHRSKELFSKDPDYIVVPYTKVQFDLLLQEKEDWPISLLGFLGEVHFHLPKDPLLTFTLQTAIIFPHMTSTTPLEKGIVIFTDGSANGRSVTYIQGREPIIKENTQNTAQQAEIVAVITAFEEVSQPFNLYTDSKYVTGLFPEIETATLSPRTKIYTELKHLQRLIHKRQEKFYIGHIRGHTGLPGPLAQGNAYADSLTRILTAGKRTADGSEFEKRTADGSEFESPKKKAKVE

SEQ ID NO: 3239 - protein, 2025 aa, synthetic construct
MPAAKRVKLDGGDKKYSIGLDIGTNSVGWAVITDEYKVPSKKFKVLGNTDRHSIKKNLIGALLFDSGETAEATRLKRTARRRYTRRKNRICYLQEIFSNEMAKVDDSFFHRLEESFLVEEDKKHERHPIFGNIVDEVAYHEKYPTIYHLRKKLVDSTDKADLRLIYLALAHMIKFRGHFLIEGDLNPDNSDVDKLFIQLVQTYNQLFEENPINASGVDAKAILSARLSKSRRLENLIAQLPGEKKNGLFGNLIALSLGLTPNFKSNFDLAEDAKLQLSKDTYDDDLDNLLAQIGDQYADLFLAAKNLSDAILLSDILRVNTEITKAPLSASMIKRYDEHHQDLTLLKALVRQQLPEKYKEIFFDQSKNGYAGYIDGGASQEEFYKFIKPILEKMDGTEELLVKLNREDLLRKQRTFDNGSIPHQIHLGELHAILRRQEDFYPFLKDNREKIEKILTFRIPYYVGPLARGNSRFAWMTRKSEETITPWNFEEVVDKGASAQSFIERMTNFDKNLPNEKVLPKHSLLYEYFTVYNELTKVKYVTEGMRKPAFLSGEQKKAIVDLLFKTNRKVTVKQLKEDYFKKIECFDSVEISGVEDRFNASLGTYHDLLKIIKDKDFLDNEENEDILEDIVLTLTLFEDREMIEERLKTYAHLFDDKVMKQLKRRRYTGWGRLSRKLINGIRDKQSGKTILDFLKSDGFANRNFMQLIHDDSLTFKEDIQKAQVSGQGDSLHEHIANLAGSPAIKKGILQTVKVVDELVKVMGRHKPENIVIEMARENQTTQKGQKNSRERMKRIEEGIKELGSQILKEHPVENTQLQNEKLYLYYLQNGRDMYVDQELDINRLSDYDVDHIVPQSFLKDDSIDNKVLTRSDKARGKSDNVPSEEVVKKMKNYWRQLLNAKLITQRKFDNLTKAERGGLSELDKAGFIKRQLVETRQITKHVAQILDSRMNTKYDENDKLIREVKVITLKSKLVSDFRKDFQFYKVREINNYHHAHDAYLNAVVGTALIKKYPKLESEFVYGDYKVYDVRKMIAKSEQEIGKATAKYFFYSNIMNFFKTEITLANGEIRKRPLIETNGETGEIVWDKGRDFATVRKVLSMPQVNIVKKTEVQTGGFSKESILPKRNSDKLIARKKDWDPKKYGGFDSPTVAYSVLVVAKVEKGKSKKLKSVKELLGITIMERSSFEKNPIDFLEAKGYKEVKKDLIIKLPKYSLFELENGRKRMLASAGELQKGNELALPSKYVNFLYLASHYEKLKGSPEDNEQKQLFVEQHKHYLDEIIEQISEFSKRVILADANLDKVLSAYNKHRDKPIREQAENIIHLFTLTNLGAPAAFKYFDTTIDRKRYTSTKEVLDATLIHQSITGLYETRIDLSQLGGDGGGSSGSSGSSGSSGGGRDIMKDIKVRLMTDSPDDSQDLMIGAIESNLFADQISWKSDQPVWLNQWPLKQEKLQALQQLVTEQLQLGHLEESNSPWNTPVFVIKKKSGKWRLLQDLRAVNATMHDMGALQPGLPSPVAVPKGWEIIIIDLQDCFFNIKLHPEDCKRFAFSVPSPNFKRPYQRFQWKVLPQGMKNSPTLCQKFVDKAILTVRDKYQDSYIVHYMDDILLAHPSRSIVDEILTSMIQALNKHGLVVSTEKIQKYDNLKYLGTHIQGDSVSYQKLQIRTDKLRTLNDFQKLLGNINWIRPFLKLTTGELKPLFEILNGDSNPISTRKLTPEACKALQLMNERLSTARVKRLDLSQPWSLCILKTEYTPTACLWQDGVVEWIHLPHISPKVITPYDIFCTQLIIKGRHRSKELFSKDPDYIVVPYTKVQFDLLLQEKEDWPISLLGFLGEVHFHLPKDPLLTFTLQTAIIFPHMTSTTPLEKGIVIFTDGSANGRSVTYIQGREPIIKENTQNTAQQAEIVAVITAFEEVSQPFNLYTDSKYVTGLFPEIETATLSPRTKIYTELKHLQRLIHKRQEKFYIGHIRGHTGLPGPLAQGNAYADSLTRILTAGKRTADGSEFEKRTADGSEFESPKKKAKVE

SEQ ID NO: 3240 - protein, 2022 aa, synthetic construct
MPAAKRVKLDGGDKKYSIGLDIGTNSVGWAVITDEYKVPSKKFKVLGNTDRHSIKKNLIGALLFDSGETAEATRLKRTARRRYTRRKNRICYLQEIFSNEMAKVDDSFFHRLEESFLVEEDKKHERHPIFGNIVDEVAYHEKYPTIYHLRKKLVDSTDKADLRLIYLALAHMIKFRGHFLIEGDLNPDNSDVDKLFIQLVQTYNQLFEENPINASGVDAKAILSARLSKSRRLENLIAQLPGEKKNGLFGNLIALSLGLTPNFKSNFDLAEDAKLQLSKDTYDDDLDNLLAQIGDQYADLFLAAKNLSDAILLSDILRVNTEITKAPLSASMIKRYDEHHQDLTLLKALVRQQLPEKYKEIFFDQSKNGYAGYIDGGASQEEFYKFIKPILEKMDGTEELLVKLNREDLLRKQRTFDNGSIPHQIHLGELHAILRRQEDFYPFLKDNREKIEKILTFRIPYYVGPLARGNSRFAWMTRKSEETITPWNFEEVVDKGASAQSFIERMTNFDKNLPNEKVLPKHSLLYEYFTVYNELTKVKYVTEGMRKPAFLSGEQKKAIVDLLFKTNRKVTVKQLKEDYFKKIECFDSVEISGVEDRFNASLGTYHDLLKIIKDKDFLDNEENEDILEDIVLTLTLFEDREMIEERLKTYAHLFDDKVMKQLKRRRYTGWGRLSRKLINGIRDKQSGKTILDFLKSDGFANRNFMQLIHDDSLTFKEDIQKAQVSGQGDSLHEHIANLAGSPAIKKGILQTVKVVDELVKVMGRHKPENIVIEMARENQTTQKGQKNSRERMKRIEEGIKELGSQILKEHPVENTQLQNEKLYLYYLQNGRDMYVDQELDINRLSDYDVDHIVPQSFLKDDSIDNKVLTRSDKARGKSDNVPSEEVVKKMKNYWRQLLNAKLITQRKFDNLTKAERGGLSELDKAGFIKRQLVETRQITKHVAQILDSRMNTKYDENDKLIREVKVITLKSKLVSDFRKDFQFYKVREINNYHHAHDAYLNAVVGTALIKKYPKLESEFVYGDYKVYDVRKMIAKSEQEIGKATAKYFFYSNIMNFFKTEITLANGEIRKRPLIETNGETGEIVWDKGRDFATVRKVLSMPQVNIVKKTEVQTGGFSKESILPKRNSDKLIARKKDWDPKKYGGFDSPTVAYSVLVVAKVEKGKSKKLKSVKELLGITIMERSSFEKNPIDFLEAKGYKEVKKDLIIKLPKYSLFELENGRKRMLASAGELQKGNELALPSKYVNFLYLASHYEKLKGSPEDNEQKQLFVEQHKHYLDEIIEQISEFSKRVILADANLDKVLSAYNKHRDKPIREQAENIIHLFTLTNLGAPAAFKYFDTTIDRKRYTSTKEVLDATLIHQSITGLYETRIDLSQLGGDGGGGGGGSGSSGGGRDIMKDIKVRLMTDSPDDSQDLMIGAIESNLFADQISWKSDQPVWLNQWPLKQEKLQALQQLVTEQLQLGHLEESNSPWNTPVFVIKKKSGKWRLLQDLRAVNATMHDMGALQPGLPSPVAVPKGWEIIIIDLQDCFFNIKLHPEDCKRFAFSVPSPNFKRPYQRFQWKVLPQGMKNSPTLCQKFVDKAILTVRDKYQDSYIVHYMDDILLAHPSRSIVDEILTSMIQALNKHGLVVSTEKIQKYDNLKYLGTHIQGDSVSYQKLQIRTDKLRTLNDFQKLLGNINWIRPFLKLTTGELKPLFEILNGDSNPISTRKLTPEACKALQLMNERLSTARVKRLDLSQPWSLCILKTEYTPTACLWQDGVVEWIHLPHISPKVITPYDIFCTQLIIKGRHRSKELFSKDPDYIVVPYTKVQFDLLLQEKEDWPISLLGFLGEVHFHLPKDPLLTFTLQTAIIFPHMTSTTPLEKGIVIFTDGSANGRSVTYIQGREPIIKENTQNTAQQAEIVAVITAFEEVSQPFNLYTDSKYVTGLFPEIETATLSPRTKIYTELKHLQRLIHKRQEKFYIGHIRGHTGLPGPLAQGNAYADSLTRILTAGKRTADGSEFEKRTADGSEFESPKKKAKVE

SEQ ID NO: 3241 - protein, 2022 aa, synthetic construct
MPAAKRVKLDGGDKKYSIGLDIGTNSVGWAVITDEYKVPSKKFKVLGNTDRHSIKKNLIGALLFDSGETAEATRLKRTARRRYTRRKNRICYLQEIFSNEMAKVDDSFFHRLEESFLVEEDKKHERHPIFGNIVDEVAYHEKYPTIYHLRKKLVDSTDKADLRLIYLALAHMIKFRGHFLIEGDLNPDNSDVDKLFIQLVQTYNQLFEENPINASGVDAKAILSARLSKSRRLENLIAQLPGEKKNGLFGNLIALSLGLTPNFKSNFDLAEDAKLQLSKDTYDDDLDNLLAQIGDQYADLFLAAKNLSDAILLSDILRVNTEITKAPLSASMIKRYDEHHQDLTLLKALVRQQLPEKYKEIFFDQSKNGYAGYIDGGASQEEFYKFIKPILEKMDGTEELLVKLNREDLLRKQRTFDNGSIPHQIHLGELHAILRRQEDFYPFLKDNREKIEKILTFRIPYYVGPLARGNSRFAWMTRKSEETITPWNFEEVVDKGASAQSFIERMTNFDKNLPNEKVLPKHSLLYEYFTVYNELTKVKYVTEGMRKPAFLSGEQKKAIVDLLFKTNRKVTVKQLKEDYFKKIECFDSVEISGVEDRFNASLGTYHDLLKIIKDKDFLDNEENEDILEDIVLTLTLFEDREMIEERLKTYAHLFDDKVMKQLKRRRYTGWGRLSRKLINGIRDKQSGKTILDFLKSDGFANRNFMQLIHDDSLTFKEDIQKAQVSGQGDSLHEHIANLAGSPAIKKGILQTVKVVDELVKVMGRHKPENIVIEMARENQTTQKGQKNSRERMKRIEEGIKELGSQILKEHPVENTQLQNEKLYLYYLQNGRDMYVDQELDINRLSDYDVDHIVPQSFLKDDSIDNKVLTRSDKARGKSDNVPSEEVVKKMKNYWRQLLNAKLITQRKFDNLTKAERGGLSELDKAGFIKRQLVETRQITKHVAQILDSRMNTKYDENDKLIREVKVITLKSKLVSDFRKDFQFYKVREINNYHHAHDAYLNAVVGTALIKKYPKLESEFVYGDYKVYDVRKMIAKSEQEIGKATAKYFFYSNIMNFFKTEITLANGEIRKRPLIETNGETGEIVWDKGRDFATVRKVLSMPQVNIVKKTEVQTGGFSKESILPKRNSDKLIARKKDWDPKKYGGFDSPTVAYSVLVVAKVEKGKSKKLKSVKELLGITIMERSSFEKNPIDFLEAKGYKEVKKDLIIKLPKYSLFELENGRKRMLASAGELQKGNELALPSKYVNFLYLASHYEKLKGSPEDNEQKQLFVEQHKHYLDEIIEQISEFSKRVILADANLDKVLSAYNKHRDKPIREQAENIIHLFTLTNLGAPAAFKYFDTTIDRKRYTSTKEVLDATLIHQSITGLYETRIDLSQLGGDGGGGGGSSGGSGGGRDIMKDIKVRLMTDSPDDSQDLMIGAIESNLFADQISWKSDQPVWLNQWPLKQEKLQALQQLVTEQLQLGHLEESNSPWNTPVFVIKKKSGKWRLLQDLRAVNATMHDMGALQPGLPSPVAVPKGWEIIIIDLQDCFFNIKLHPEDCKRFAFSVPSPNFKRPYQRFQWKVLPQGMKNSPTLCQKFVDKAILTVRDKYQDSYIVHYMDDILLAHPSRSIVDEILTSMIQALNKHGLVVSTEKIQKYDNLKYLGTHIQGDSVSYQKLQIRTDKLRTLNDFQKLLGNINWIRPFLKLTTGELKPLFEILNGDSNPISTRKLTPEACKALQLMNERLSTARVKRLDLSQPWSLCILKTEYTPTACLWQDGVVEWIHLPHISPKVITPYDIFCTQLIIKGRHRSKELFSKDPDYIVVPYTKVQFDLLLQEKEDWPISLLGFLGEVHFHLPKDPLLTFTLQTAIIFPHMTSTTPLEKGIVIFTDGSANGRSVTYIQGREPIIKENTQNTAQQAEIVAVITAFEEVSQPFNLYTDSKYVTGLFPEIETATLSPRTKIYTELKHLQRLIHKRQEKFYIGHIRGHTGLPGPLAQGNAYADSLTRILTAGKRTADGSEFEKRTADGSEFESPKKKAKVE

SEQ ID NO: 3242 - protein, 2019 aa, synthetic construct
MPAAKRVKLDGGDKKYSIGLDIGTNSVGWAVITDEYKVPSKKFKVLGNTDRHSIKKNLIGALLFDSGETAEATRLKRTARRRYTRRKNRICYLQEIFSNEMAKVDDSFFHRLEESFLVEEDKKHERHPIFGNIVDEVAYHEKYPTIYHLRKKLVDSTDKADLRLIYLALAHMIKFRGHFLIEGDLNPDNSDVDKLFIQLVQTYNQLFEENPINASGVDAKAILSARLSKSRRLENLIAQLPGEKKNGLFGNLIALSLGLTPNFKSNFDLAEDAKLQLSKDTYDDDLDNLLAQIGDQYADLFLAAKNLSDAILLSDILRVNTEITKAPLSASMIKRYDEHHQDLTLLKALVRQQLPEKYKEIFFDQSKNGYAGYIDGGASQEEFYKFIKPILEKMDGTEELLVKLNREDLLRKQRTFDNGSIPHQIHLGELHAILRRQEDFYPFLKDNREKIEKILTFRIPYYVGPLARGNSRFAWMTRKSEETITPWNFEEVVDKGASAQSFIERMTNFDKNLPNEKVLPKHSLLYEYFTVYNELTKVKYVTEGMRKPAFLSGEQKKAIVDLLFKTNRKVTVKQLKEDYFKKIECFDSVEISGVEDRFNASLGTYHDLLKIIKDKDFLDNEENEDILEDIVLTLTLFEDREMIEERLKTYAHLFDDKVMKQLKRRRYTGWGRLSRKLINGIRDKQSGKTILDFLKSDGFANRNFMQLIHDDSLTFKEDIQKAQVSGQGDSLHEHIANLAGSPAIKKGILQTVKVVDELVKVMGRHKPENIVIEMARENQTTQKGQKNSRERMKRIEEGIKELGSQILKEHPVENTQLQNEKLYLYYLQNGRDMYVDQELDINRLSDYDVDHIVPQSFLKDDSIDNKVLTRSDKARGKSDNVPSEEVVKKMKNYWRQLLNAKLITQRKFDNLTKAERGGLSELDKAGFIKRQLVETRQITKHVAQILDSRMNTKYDENDKLIREVKVITLKSKLVSDFRKDFQFYKVREINNYHHAHDAYLNAVVGTALIKKYPKLESEFVYGDYKVYDVRKMIAKSEQEIGKATAKYFFYSNIMNFFKTEITLANGEIRKRPLIETNGETGEIVWDKGRDFATVRKVLSMPQVNIVKKTEVQTGGFSKESILPKRNSDKLIARKKDWDPKKYGGFDSPTVAYSVLVVAKVEKGKSKKLKSVKELLGITIMERSSFEKNPIDFLEAKGYKEVKKDLIIKLPKYSLFELENGRKRMLASAGELQKGNELALPSKYVNFLYLASHYEKLKGSPEDNEQKQLFVEQHKHYLDEIIEQISEFSKRVILADANLDKVLSAYNKHRDKPIREQAENIIHLFTLTNLGAPAAFKYFDTTIDRKRYTSTKEVLDATLIHQSITGLYETRIDLSQLGGDGGGGSGSSGGGRDIMKDIKVRLMTDSPDDSQDLMIGAIESNLFADQISWKSDQPVWLNQWPLKQEKLQALQQLVTEQLQLGHLEESNSPWNTPVFVIKKKSGKWRLLQDLRAVNATMHDMGALQPGLPSPVAVPKGWEIIIIDLQDCFFNIKLHPEDCKRFAFSVPSPNFKRPYQRFQWKVLPQGMKNSPTLCQKFVDKAILTVRDKYQDSYIVHYMDDILLAHPSRSIVDEILTSMIQALNKHGLVVSTEKIQKYDNLKYLGTHIQGDSVSYQKLQIRTDKLRTLNDFQKLLGNINWIRPFLKLTTGELKPLFEILNPDSNPISTRKLTPEACKALQLMNERLSTARVKRLDLSQPWSLCILKTEYTPTACLWQDGVVEWIHLPHISPKVITPYDIFCTQLIIKGRHRSKELFSKDPDYIVVPYTKVQFDLLLQEKEDWPISLLGFLGEVHFHLPKDPLLTFTLQTAIIFPHMTSTTPLEKGIVIFTDGSANGRSVTYIQGREPIIKENTQNTAQQAEIVAVITAFEEVSQPFNLYTDSKYVTGLFPEIETATLSPRTKIYTELKHLQRLIHKRQEKFYIGHIRGHTGLPGPLAQGNAYADSLTRILTAGKRTADGSEFEKRTADGSEFESPKKKAKVE

SEQ ID NO: 3243 - protein, 2022 aa, synthetic construct
MPAAKRVKLDGGDKKYSIGLDIGTNSVGWAVITDEYKVPSKKFKVLGNTDRHSIKKNLIGALLFDSGETAEATRLKRTARRRYTRRKNRICYLQEIFSNEMAKVDDSFFHRLEESFLVEEDKKHERHPIFGNIVDEVAYHEKYPTIYHLRKKLVDSTDKADLRLIYLALAHMIKFRGHFLIEGDLNPDNSDVDKLFIQLVQTYNQLFEENPINASGVDAKAILSARLSKSRRLENLIAQLPGEKKNGLFGNLIALSLGLTPNFKSNFDLAEDAKLQLSKDTYDDDLDNLLAQIGDQYADLFLAAKNLSDAILLSDILRVNTEITKAPLSASMIKRYDEHHQDLTLLKALVRQQLPEKYKEIFFDQSKNGYAGYIDGGASQEEFYKFIKPILEKMDGTEELLVKLNREDLLRKQRTFDNGSIPHQIHLGELHAILRRQEDFYPFLKDNREKIEKILTFRIPYYVGPLARGNSRFAWMTRKSEETITPWNFEEVVDKGASAQSFIERMTNFDKNLPNEKVLPKHSLLYEYFTVYNELTKVKYVTEGMRKPAFLSGEQKKAIVDLLFKTNRKVTVKQLKEDYFKKIECFDSVEISGVEDRFNASLGTYHDLLKIIKDKDFLDNEENEDILEDIVLTLTLFEDREMIEERLKTYAHLFDDKVMKQLKRRRYTGWGRLSRKLINGIRDKQSGKTILDFLKSDGFANRNFMQLIHDDSLTFKEDIQKAQVSGQGDSLHEHIANLAGSPAIKKGILQTVKVVDELVKVMGRHKPENIVIEMARENQTTQKGQKNSRERMKRIEEGIKELGSQILKEHPVENTQLQNEKLYLYYLQNGRDMYVDQELDINRLSDYDVDHIVPQSFLKDDSIDNKVLTRSDKARGKSDNVPSEEVVKKMKNYWRQLLNAKLITQRKFDNLTKAERGGLSELDKAGFIKRQLVETRQITKHVAQILDSRMNTKYDENDKLIREVKVITLKSKLVSDFRKDFQFYKVREINNYHHAHDAYLNAVVGTALIKKYPKLESEFVYGDYKVYDVRKMIAKSEQEIGKATAKYFFYSNIMNFFKTEITLANGEIRKRPLIETNGETGEIVWDKGRDFATVRKVLSMPQVNIVKKTEVQTGGFSKESILPKRNSDKLIARKKDWDPKKYGGFDSPTVAYSVLVVAKVEKGKSKKLKSVKELLGITIMERSSFEKNPIDFLEAKGYKEVKKDLIIKLPKYSLFELENGRKRMLASAGELQKGNELALPSKYVNFLYLASHYEKLKGSPEDNEQKQLFVEQHKHYLDEIIEQISEFSKRVILADANLDKVLSAYNKHRDKPIREQAENIIHLFTLTNLGAPAAFKYFDTTIDRKRYTSTKEVLDATLIHQSITGLYETRIDLSQLGGDGGGGGGGSGSSGGGRDIMKDIKVRLMTDSPDDSQDLMIGAIESNLFADQISWKSDQPVWLNQWPLKQEKLQALQQLVTEQLQLGHLEESNSPWNTPVFVIKKKSGKWRLLQDLRAVNATMHDMGALQPGLPSPVAVPKGWEIIIIDLQDCFFNIKLHPEDCKRFAFSVPSPNFKRPYQRFQWKVLPQGMKNSPTLCQKFVDKAILTVRDKYQDSYIVHYMDDILLAHPSRSIVDEILTSMIQALNKHGLVVSTEKIQKYDNLKYLGTHIQGDSVSYQKLQIRTDKLRTLNDFQKLLGNINWIRPFLKLTTGELKPLFEILNPDSNPISTRKLTPEACKALQLMNERLSTARVKRLDLSQPWSLCILKTEYTPTACLWQDGVVEWIHLPHISPKVITPYDIFCTQLIIKGRHRSKELFSKDPDYIVVPYTKVQFDLLLQEKEDWPISLLGFLGEVHFHLPKDPLLTFTLQTAIIFPHMTSTTPLEKGIVIFTDGSANGRSVTYIQGREPIIKENTQNTAQQAEIVAVITAFEEVSQPFNLYTDSKYVTGLFPEIETATLSPRTKIYTELKHLQRLIHKRQEKFYIGHIRGHTGLPGPLAQGNAYADSLTRILTAGKRTADGSEFEKRTADGSEFESPKKKAKVE

SEQ ID NO: 3244 - protein, 2024 aa, synthetic construct
MPAAKRVKLDGGDKKYSIGLDIGTNSVGWAVITDEYKVPSKKFKVLGNTDRHSIKKNLIGALLFDSGETAEATRLKRTARRRYTRRKNRICYLQEIFSNEMAKVDDSFFHRLEESFLVEEDKKHERHPIFGNIVDEVAYHEKYPTIYHLRKKLVDSTDKADLRLIYLALAHMIKFRGHFLIEGDLNPDNSDVDKLFIQLVQTYNQLFEENPINASGVDAKAILSARLSKSRRLENLIAQLPGEKKNGLFGNLIALSLGLTPNFKSNFDLAEDAKLQLSKDTYDDDLDNLLAQIGDQYADLFLAAKNLSDAILLSDILRVNTEITKAPLSASMIKRYDEHHQDLTLLKALVRQQLPEKYKEIFFDQSKNGYAGYIDGGASQEEFYKFIKPILEKMDGTEELLVKLNREDLLRKQRTFDNGSIPHQIHLGELHAILRRQEDFYPFLKDNREKIEKILTFRIPYYVGPLARGNSRFAWMTRKSEETITPWNFEEVVDKGASAQSFIERMTNFDKNLPNEKVLPKHSLLYEYFTVYNELTKVKYVTEGMRKPAFLSGEQKKAIVDLLFKTNRKVTVKQLKEDYFKKIECFDSVEISGVEDRFNASLGTYHDLLKIIKDKDFLDNEENEDILEDIVLTLTLFEDREMIEERLKTYAHLFDDKVMKQLKRRRYTGWGRLSRKLINGIRDKQSGKTILDFLKSDGFANRNFMQLIHDDSLTFKEDIQKAQVSGQGDSLHEHIANLAGSPAIKKGILQTVKVVDELVKVMGRHKPENIVIEMARENQTTQKGQKNSRERMKRIEEGIKELGSQILKEHPVENTQLQNEKLYLYYLQNGRDMYVDQELDINRLSDYDVDHIVPQSFLKDDSIDNKVLTRSDKARGKSDNVPSEEVVKKMKNYWRQLLNAKLITQRKFDNLTKAERGGLSELDKAGFIKRQLVETRQITKHVAQILDSRMNTKYDENDKLIREVKVITLKSKLVSDFRKDFQFYKVREINNYHHAHDAYLNAVVGTALIKKYPKLESEFVYGDYKVYDVRKMIAKSEQEIGKATAKYFFYSNIMNFFKTEITLANGEIRKRPLIETNGETGEIVWDKGRDFATVRKVLSMPQVNIVKKTEVQTGGFSKESILPKRNSDKLIARKKDWDPKKYGGFDSPTVAYSVLVVAKVEKGKSKKLKSVKELLGITIMERSSFEKNPIDFLEAKGYKEVKKDLIIKLPKYSLFELENGRKRMLASAGELQKGNELALPSKYVNFLYLASHYEKLKGSPEDNEQKQLFVEQHKHYLDEIIEQISEFSKRVILADANLDKVLSAYNKHRDKPIREQAENIIHLFTLTNLGAPAAFKYFDTTIDRKRYTSTKEVLDATLIHQSITGLYETRIDLSQLGGDGGGSSEAAAKGGSGGGRDIMKDIKVRLMTDSPDDSQDLMIGAIESNLFADQISWKSDQPVWLNQWPLKQEKLQALQQLVTEQLQLGHLEESNSPWNTPVFVIKKKSGKWRLLQDLRAVNATMHDMGALQPGLPSPVAPPKGWEIIIIDLQDCFFNIKLHPEDCKRFAFSVPSPNFKRPYQRFQWKVLPQGMKNSPTLCQKFVDKAILTVRDKYQDSYIVHYMDDILLAHPSRSIVDEILTSMIQALNKHGLVVSTEKIQKYDNLKYLGTHIQGDSVSYQKLQIRTDKLRTLNDFQKLLGNINWIRPFLKLTTGELKPLFEILNPDSNPISTRKLTPEACKALQLMNERLSTARVKRLDLSQPWSLCILKTEYTPTACLWQDGVVEWIHLPHISPKVITPYDIFCTQLIIKGRHRSKELFSKDPDYIVVPYTKVQFDLLLQEKEDWPISLLGFLGEVHFHLPKDPLLTFTLQTAIIFPHMTSTTPLEKGIVIFTDGSANGRSVTYIQGREPIIKENTQNTAQQAEIVAVITAFEEVSQPFNLYTDSKYVTGLFPEIETATLSPRTKIYTELKHLQRLIHKRQEKFYIGHIRGHTGLPGPLAQGNAYADSLTRILTAGKRTADGSEFEKRTADGSEFESPKKKAKVE

SEQ ID NO: 3245 - protein, 2125 aa, synthetic construct
MPAAKRVKLDGGDKKYSIGLDIGTNSVGWAVITDEYKVPSKKFKVLGNTDRHSIKKNLIGALLFDSGETAEATRLKRTARRRYTRRKNRICYLQEIFSNEMAKVDDSFFHRLEESFLVEEDKKHERHPIFGNIVDEVAYHEKYPTIYHLRKKLVDSTDKADLRLIYLALAHMIKFRGHFLIEGDLNPDNSDVDKLFIQLVQTYNQLFEENPINASGVDAKAILSARLSKSRRLENLIAQLPGEKKNGLFGNLIALSLGLTPNFKSNFDLAEDAKLQLSKDTYDDDLDNLLAQIGDQYADLFLAAKNLSDAILLSDILRVNTEITKAPLSASMIKRYDEHHQDLTLLKALVRQQLPEKYKEIFFDQSKNGYAGYIDGGASQEEFYKFIKPILEKMDGTEELLVKLNREDLLRKQRTFDNGSIPHQIHLGELHAILRRQEDFYPFLKDNREKIEKILTFRIPYYVGPLARGNSRFAWMTRKSEETITPWNFEEVVDKGASAQSFIERMTNFDKNLPNEKVLPKHSLLYEYFTVYNELTKVKYVTEGMRKPAFLSGEQKKAIVDLLFKTNRKVTVKQLKEDYFKKIECFDSVEISGVEDRFNASLGTYHDLLKIIKDKDFLDNEENEDILEDIVLTLTLFEDREMIEERLKTYAHLFDDKVMKQLKRRRYTGWGRLSRKLINGIRDKQSGKTILDFLKSDGFANRNFMQLIHDDSLTFKEDIQKAQVSGQGDSLHEHIANLAGSPAIKKGILQTVKVVDELVKVMGRHKPENIVIEMARENQTTQKGQKNSRERMKRIEEGIKELGSQILKEHPVENTQLQNEKLYLYYLQNGRDMYVDQELDINRLSDYDVDHIVPQSFLKDDSIDNKVLTRSDKARGKSDNVPSEEVVKKMKNYWRQLLNAKLITQRKFDNLTKAERGGLSELDKAGFIKRQLVETRQITKHVAQILDSRMNTKYDENDKLIREVKVITLKSKLVSDFRKDFQFYKVREINNYHHAHDAYLNAVVGTALIKKYPKLESEFVYGDYKVYDVRKMIAKSEQEIGKATAKYFFYSNIMNFFKTEITLANGEIRKRPLIETNGETGEIVWDKGRDFATVRKVLSMPQVNIVKKTEVQTGGFSKESILPKRNSDKLIARKKDWDPKKYGGFDSPTVAYSVLVVAKVEKGKSKKLKSVKELLGITIMERSSFEKNPIDFLEAKGYKEVKKDLIIKLPKYSLFELENGRKRMLASAGELQKGNELALPSKYVNFLYLASHYEKLKGSPEDNEQKQLFVEQHKHYLDEIIEQISEFSKRVILADANLDKVLSAYNKHRDKPIREQAENIIHLFTLTNLGAPAAFKYFDTTIDRKRYTSTKEVLDATLIHQSITGLYETRIDLSQLGGDGGEAAAKEAAAKEAAAKEAAAKGGWVQEISDSRPMLHIYLNGRRFLGLLNTGADKTCIAGRDWPANWPIHQTESSLQGLGMACGVARSSQPLRWQHEDKSGIIHPFVIPTLPFTLWGRDIMKDIKVRLMTDSPDDSQDLMIGAIESNLFADQISWKSDQPVWLNQWPLKQEKLQALQQLVTEQLQLGHLEESNSPWNTPVFVIKKKSGKWRLLQDLRAVNATMHDMGALQPGLPSPVAVPKGWEIIIIDLQDCFFNIKLHPEDCKRFAFSVPSPNFKRPYQRFQWKVLPQGMKNSPTLCQKFVDKAILTVRDKYQDSYIVHYMDDILLAHPSRSIVDEILTSMIQALNKHGLVVSTEKIQKYDNLKYLGTHIQGDSVSYQKLQIRTDKLRTLNDFQKLLGNINWIRPFLKLTTGELKPLFEILNPDSNPISTRKLTPEACKALQLMNERLSTARVKRLDLSQPWSLCILKTEYTPTACLWQDGVVEWIHLPHISPKVITPYDIFCTQLIIKGRHRSKELFSKDPDYIVVPYTKVQFDLLLQEKEDWPISLLGFLGEVHFHLPKDPLLTFTLQTAIIFPHMTSTTPLEKGIVIFTDGSANGRSVTYIQGREPIIKENTQNTAQQAEIVAVITAFEEVSQPFNLYTDSKYVTGLFPEIETATLSPRTKIYTELKHLQRLIHKRQEKFYIGHIRGHTGLPGPLAQGNAYADSLTRILTAGKRTADGSEFEKRTADGSEFESPKKKAKVE

SEQ ID NO: 3246 - protein, 2116 aa, synthetic construct
MPAAKRVKLDGGDKKYSIGLDIGTNSVGWAVITDEYKVPSKKFKVLGNTDRHSIKKNLIGALLFDSGETAEATRLKRTARRRYTRRKNRICYLQEIFSNEMAKVDDSFFHRLEESFLVEEDKKHERHPIFGNIVDEVAYHEKYPTIYHLRKKLVDSTDKADLRLIYLALAHMIKFRGHFLIEGDLNPDNSDVDKLFIQLVQTYNQLFEENPINASGVDAKAILSARLSKSRRLENLIAQLPGEKKNGLFGNLIALSLGLTPNFKSNFDLAEDAKLQLSKDTYDDDLDNLLAQIGDQYADLFLAAKNLSDAILLSDILRVNTEITKAPLSASMIKRYDEHHQDLTLLKALVRQQLPEKYKEIFFDQSKNGYAGYIDGGASQEEFYKFIKPILEKMDGTEELLVKLNREDLLRKQRTFDNGSIPHQIHLGELHAILRRQEDFYPFLKDNREKIEKILTFRIPYYVGPLARGNSRFAWMTRKSEETITPWNFEEVVDKGASAQSFIERMTNFDKNLPNEKVLPKHSLLYEYFTVYNELTKVKYVTEGMRKPAFLSGEQKKAIVDLLFKTNRKVTVKQLKEDYFKKIECFDSVEISGVEDRFNASLGTYHDLLKIIKDKDFLDNEENEDILEDIVLTLTLFEDREMIEERLKTYAHLFDDKVMKQLKRRRYTGWGRLSRKLINGIRDKQSGKTILDFLKSDGFANRNFMQLIHDDSLTFKEDIQKAQVSGQGDSLHEHIANLAGSPAIKKGILQTVKVVDELVKVMGRHKPENIVIEMARENQTTQKGQKNSRERMKRIEEGIKELGSQILKEHPVENTQLQNEKLYLYYLQNGRDMYVDQELDINRLSDYDVDHIVPQSFLKDDSIDNKVLTRSDKARGKSDNVPSEEVVKKMKNYWRQLLNAKLITQRKFDNLTKAERGGLSELDKAGFIKRQLVETRQITKHVAQILDSRMNTKYDENDKLIREVKVITLKSKLVSDFRKDFQFYKVREINNYHHAHDAYLNAVVGTALIKKYPKLESEFVYGDYKVYDVRKMIAKSEQEIGKATAKYFFYSNIMNFFKTEITLANGEIRKRPLIETNGETGEIVWDKGRDFATVRKVLSMPQVNIVKKTEVQTGGFSKESILPKRNSDKLIARKKDWDPKKYGGFDSPTVAYSVLVVAKVEKGKSKKLKSVKELLGITIMERSSFEKNPIDFLEAKGYKEVKKDLIIKLPKYSLFELENGRKRMLASAGELQKGNELALPSKYVNFLYLASHYEKLKGSPEDNEQKQLFVEQHKHYLDEIIEQISEFSKRVILADANLDKVLSAYNKHRDKPIREQAENIIHLFTLTNLGAPAAFKYFDTTIDRKRYTSTKEVLDATLIHQSITGLYETRIDLSQLGGDGGGSSGGSEAAAKGGWVQEISDSRPMLHIYLNGRRFLGLLNTGADKTCIAGRDWPANWPIHQTESSLQGLGMACGVARSSQPLRWQHEDKSGIIHPFVIPTLPFTLWGRDIMKDIKVRLMTDSPDDSQDLMIGAIESNLFADQISWKSDQPVWLNQWPLKQEKLQALQQLVTEQLQLGHLEESNSPWNTPVFVIKKKSGKWRLLQDLRAVNATMHDMGALQPGLPSPVAVPKGWEIIIIDLQDCFFNIKLHPEDCKRFAFSVPSPNFKRPYQRFQWKVLPQGMKNSPTLCQKFVDKAILTVRDKYQDSYIVHYMDDILLAHPSRSIVDEILTSMIQALNKHGLVVSTEKIQKYDNLKYLGTHIQGDSVSYQKLQIRTDKLRTLNDFQKLLGNINWIRPFLKLTTGELKPLFEILNPDSNPISTRKLTPEACKALQLMNERLSTARVKRLDLSQPWSLCILKTEYTPTACLWQDGVVEWIHLPHISPKVITPYDIFCTQLIIKGRHRSKELFSKDPDYIVVPYTKVQFDLLLQEKEDWPISLLGFLGEVHFHLPKDPLLTFTLQTAIIFPHMTSTTPLEKGIVIFTDGSANGRSVTYIQGREPIIKENTQNTAQQAEIVAVITAFEEVSQPFNLYTDSKYVTGLFPEIETATLSPRTKIYTELKHLQRLIHKRQEKFYIGHIRGHTGLPGPLAQGNAYADSLTRILTAGKRTADGSEFEKRTADGSEFESPKKKAKVE

SEQ ID NO: 3247 - protein, 2114 aa, synthetic construct
MPAAKRVKLDGGDKKYSIGLDIGTNSVGWAVITDEYKVPSKKFKVLGNTDRHSIKKNLIGALLFDSGETAEATRLKRTARRRYTRRKNRICYLQEIFSNEMAKVDDSFFHRLEESFLVEEDKKHERHPIFGNIVDEVAYHEKYPTIYHLRKKLVDSTDKADLRLIYLALAHMIKFRGHFLIEGDLNPDNSDVDKLFIQLVQTYNQLFEENPINASGVDAKAILSARLSKSRRLENLIAQLPGEKKNGLFGNLIALSLGLTPNFKSNFDLAEDAKLQLSKDTYDDDLDNLLAQIGDQYADLFLAAKNLSDAILLSDILRVNTEITKAPLSASMIKRYDEHHQDLTLLKALVRQQLPEKYKEIFFDQSKNGYAGYIDGGASQEEFYKFIKPILEKMDGTEELLVKLNREDLLRKQRTFDNGSIPHQIHLGELHAILRRQEDFYPFLKDNREKIEKILTFRIPYYVGPLARGNSRFAWMTRKSEETITPWNFEEVVDKGASAQSFIERMTNFDKNLPNEKVLPKHSLLYEYFTVYNELTKVKYVTEGMRKPAFLSGEQKKAIVDLLFKTNRKVTVKQLKEDYFKKIECFDSVEISGVEDRFNASLGTYHDLLKIIKDKDFLDNEENEDILEDIVLTLTLFEDREMIEERLKTYAHLFDDKVMKQLKRRRYTGWGRLSRKLINGIRDKQSGKTILDFLKSDGFANRNFMQLIHDDSLTFKEDIQKAQVSGQGDSLHEHIANLAGSPAIKKGILQTVKVVDELVKVMGRHKPENIVIEMARENQTTQKGQKNSRERMKRIEEGIKELGSQILKEHPVENTQLQNEKLYLYYLQNGRDMYVDQELDINRLSDYDVDHIVPQSFLKDDSIDNKVLTRSDKARGKSDNVPSEEVVKKMKNYWRQLLNAKLITQRKFDNLTKAERGGLSELDKAGFIKRQLVETRQITKHVAQILDSRMNTKYDENDKLIREVKVITLKSKLVSDFRKDFQFYKVREINNYHHAHDAYLNAVVGTALIKKYPKLESEFVYGDYKVYDVRKMIAKSEQEIGKATAKYFFYSNIMNFFKTEITLANGEIRKRPLIETNGETGEIVWDKGRDFATVRKVLSMPQVNIVKKTEVQTGGFSKESILPKRNSDKLIARKKDWDPKKYGGFDSPTVAYSVLVVAKVEKGKSKKLKSVKELLGITIMERSSFEKNPIDFLEAKGYKEVKKDLIIKLPKYSLFELENGRKRMLASAGELQKGNELALPSKYVNFLYLASHYEKLKGSPEDNEQKQLFVEQHKHYLDEIIEQISEFSKRVILADANLDKVLSAYNKHRDKPIREQAENIIHLFTLTNLGAPAAFKYFDTTIDRKRYTSTKEVLDATLIHQSITGLYETRIDLSQLGGDGGGGGGGSGSSGGWVQEISDSRPMLHIYLNGRRFLGLLNTGADKTCIAGRDWPANWPIHQTESSLQGLGMACGVARSSQPLRWQHEDKSGIIHPFVIPTLPFTLWGRDIMKDIKVRLMTDSPDDSQDLMIGAIESNLFADQISWKSDQPVWLNQWPLKQEKLQALQQLVTEQLQLGHLEESNSPWNTPVFVIKKKSGKWRLLQDLRAVNATMHDMGALQPGLPSPVAVPKGWEIIIIDLQDCFFNIKLHPEDCKRFAFSVPSPNFKRPYQRFQWKVLPQGMKNSPTLCQKFVDKAILTVRDKYQDSYIVHYMDDILLAHPSRSIVDEILTSMIQALNKHGLVVSTEKIQKYDNLKYLGTHIQGDSVSYQKLQIRTDKLRTLNDFQKLLGNINWIRPFLKLTTGELKPLFEILNPDSNPISTRKLTPEACKALQLMNERLSTARVKRLDLSQPWSLCILKTEYTPTACLWQDGVVEWIHLPHISPKVITPYDIFCTQLIIKGRHRSKELFSKDPDYIVVPYTKVQFDLLLQEKEDWPISLLGFLGEVHFHLPKDPLLTFTLQTAIIFPHMTSTTPLEKGIVIFTDGSANGRSVTYIQGREPIIKENTQNTAQQAEIVAVITAFEEVSQPFNLYTDSKYVTGLFPEIETATLSPRTKIYTELKHLQRLIHKRQEKFYIGHIRGHTGLPGPLAQGNAYADSLTRILTAGKRTADGSEFEKRTADGSEFESPKKKAKVE

SEQ ID NO: 3248 - protein, 2116 aa, synthetic construct
MPAAKRVKLDGGDKKYSIGLDIGTNSVGWAVITDEYKVPSKKFKVLGNTDRHSIKKNLIGALLFDSGETAEATRLKRTARRRYTRRKNRICYLQEIFSNEMAKVDDSFFHRLEESFLVEEDKKHERHPIFGNIVDEVAYHEKYPTIYHLRKKLVDSTDKADLRLIYLALAHMIKFRGHFLIEGDLNPDNSDVDKLFIQLVQTYNQLFEENPINASGVDAKAILSARLSKSRRLENLIAQLPGEKKNGLFGNLIALSLGLTPNFKSNFDLAEDAKLQLSKDTYDDDLDNLLAQIGDQYADLFLAAKNLSDAILLSDILRVNTEITKAPLSASMIKRYDEHHQDLTLLKALVRQQLPEKYKEIFFDQSKNGYAGYIDGGASQEEFYKFIKPILEKMDGTEELLVKLNREDLLRKQRTFDNGSIPHQIHLGELHAILRRQEDFYPFLKDNREKIEKILTFRIPYYVGPLARGNSRFAWMTRKSEETITPWNFEEVVDKGASAQSFIERMTNFDKNLPNEKVLPKHSLLYEYFTVYNELTKVKYVTEGMRKPAFLSGEQKKAIVDLLFKTNRKVTVKQLKEDYFKKIECFDSVEISGVEDRFNASLGTYHDLLKIIKDKDFLDNEENEDILEDIVLTLTLFEDREMIEERLKTYAHLFDDKVMKQLKRRRYTGWGRLSRKLINGIRDKQSGKTILDFLKSDGFANRNFMQLIHDDSLTFKEDIQKAQVSGQGDSLHEHIANLAGSPAIKKGILQTVKVVDELVKVMGRHKPENIVIEMARENQTTQKGQKNSRERMKRIEEGIKELGSQILKEHPVENTQLQNEKLYLYYLQNGRDMYVDQELDINRLSDYDVDHIVPQSFLKDDSIDNKVLTRSDKARGKSDNVPSEEVVKKMKNYWRQLLNAKLITQRKFDNLTKAERGGLSELDKAGFIKRQLVETRQITKHVAQILDSRMNTKYDENDKLIREVKVITLKSKLVSDFRKDFQFYKVREINNYHHAHDAYLNAVVGTALIKKYPKLESEFVYGDYKVYDVRKMIAKSEQEIGKATAKYFFYSNIMNFFKTEITLANGEIRKRPLIETNGETGEIVWDKGRDFATVRKVLSMPQVNIVKKTEVQTGGFSKESILPKRNSDKLIARKKDWDPKKYGGFDSPTVAYSVLVVAKVEKGKSKKLKSVKELLGITIMERSSFEKNPIDFLEAKGYKEVKKDLIIKLPKYSLFELENGRKRMLASAGELQKGNELALPSKYVNFLYLASHYEKLKGSPEDNEQKQLFVEQHKHYLDEIIEQISEFSKRVILADANLDKVLSAYNKHRDKPIREQAENIIHLFTLTNLGAPAAFKYFDTTIDRKRYTSTKEVLDATLIHQSITGLYETRIDLSQLGGDGGGGGEAAAKGSSGGWVQEISDSRPMLHIYLNGRRFLGLLNTGADKTCIAGRDWPANWPIHQTESSLQGLGMACGVARSSQPLRWQHEDKSGIIHPFVIPTLPFTLWGRDIMKDIKVRLMTDSPDDSQDLMIGAIESNLFADQISWKSDQPVWLNQWPLKQEKLQALQQLVTEQLQLGHLEESNSPWNTPVFVIKKKSGKWRLLQDLRAVNATMHDMGALQPGLPSPVAPPKGWEIIIIDLQDCFFNIKLHPEDCKRFAFSVPSPNFKRPYQRFQWKVLPQGMKNSPTLCQKFVDKAILTVRDKYQDSYIVHYMDDILLAHPSRSIVDEILTSMIQALNKHGLVVSTEKIQKYDNLKYLGTHIQGDSVSYQKLQIRTDKLRTLNDFQKLLGNINWIRPFLKLTTGELKPLFEILNPDSNPISTRKLTPEACKALQLMNERLSTARVKRLDLSQPWSLCILKTEYTPTACLWQDGVVEWIHLPHISPKVITPYDIFCTQLIIKGRHRSKELFSKDPDYIVVPYTKVQFDLLLQEKEDWPISLLGFLGEVHFHLPKDPLLTFTLQTAIIFPHMTSTTPLEKGIVIFTDGSANGRSVTYIQGREPIIKENTQNTAQQAEIVAVITAFEEVSQPFNLYTDSKYVTGLFPEIETATLSPRTKIYTELKHLQRLIHKRQEKFYIGHIRGHTGLPGPLAQGNAYADSLTRILTAGKRTADGSEFEKRTADGSEFESPKKKAKVE

SEQ ID NO: 3249 - protein, 2116 aa, synthetic construct
MPAAKRVKLDGGDKKYSIGLDIGTNSVGWAVITDEYKVPSKKFKVLGNTDRHSIKKNLIGALLFDSGETAEATRLKRTARRRYTRRKNRICYLQEIFSNEMAKVDDSFFHRLEESFLVEEDKKHERHPIFGNIVDEVAYHEKYPTIYHLRKKLVDSTDKADLRLIYLALAHMIKFRGHFLIEGDLNPDNSDVDKLFIQLVQTYNQLFEENPINASGVDAKAILSARLSKSRRLENLIAQLPGEKKNGLFGNLIALSLGLTPNFKSNFDLAEDAKLQLSKDTYDDDLDNLLAQIGDQYADLFLAAKNLSDAILLSDILRVNTEITKAPLSASMIKRYDEHHQDLTLLKALVRQQLPEKYKEIFFDQSKNGYAGYIDGGASQEEFYKFIKPILEKMDGTEELLVKLNREDLLRKQRTFDNGSIPHQIHLGELHAILRRQEDFYPFLKDNREKIEKILTFRIPYYVGPLARGNSRFAWMTRKSEETITPWNFEEVVDKGASAQSFIERMTNFDKNLPNEKVLPKHSLLYEYFTVYNELTKVKYVTEGMRKPAFLSGEQKKAIVDLLFKTNRKVTVKQLKEDYFKKIECFDSVEISGVEDRFNASLGTYHDLLKIIKDKDFLDNEENEDILEDIVLTLTLFEDREMIEERLKTYAHLFDDKVMKQLKRRRYTGWGRLSRKLINGIRDKQSGKTILDFLKSDGFANRNFMQLIHDDSLTFKEDIQKAQVSGQGDSLHEHIANLAGSPAIKKGILQTVKVVDELVKVMGRHKPENIVIEMARENQTTQKGQKNSRERMKRIEEGIKELGSQILKEHPVENTQLQNEKLYLYYLQNGRDMYVDQELDINRLSDYDVDHIVPQSFLKDDSIDNKVLTRSDKARGKSDNVPSEEVVKKMKNYWRQLLNAKLITQRKFDNLTKAERGGLSELDKAGFIKRQLVETRQITKHVAQILDSRMNTKYDENDKLIREVKVITLKSKLVSDFRKDFQFYKVREINNYHHAHDAYLNAVVGTALIKKYPKLESEFVYGDYKVYDVRKMIAKSEQEIGKATAKYFFYSNIMNFFKTEITLANGEIRKRPLIETNGETGEIVWDKGRDFATVRKVLSMPQVNIVKKTEVQTGGFSKESILPKRNSDKLIARKKDWDPKKYGGFDSPTVAYSVLVVAKVEKGKSKKLKSVKELLGITIMERSSFEKNPIDFLEAKGYKEVKKDLIIKLPKYSLFELENGRKRMLASAGELQKGNELALPSKYVNFLYLASHYEKLKGSPEDNEQKQLFVEQHKHYLDEIIEQISEFSKRVILADANLDKVLSAYNKHRDKPIREQAENIIHLFTLTNLGAPAAFKYFDTTIDRKRYTSTKEVLDATLIHQSITGLYETRIDLSQLGGDGGEAAAKGGGGSSGGWVQEISDSRPMLHIYLNGRRFLGLLNTGADKTCIAGRDWPANWPIHQTESSLQGLGMACGVARSSQPLRWQHEDKSGIIHPFVIPTLPFTLWGRDIMKDIKVRLMTDSPDDSQDLMIGAIESNLFADQISWKSDQPVWLNQWPLKQEKLQALQQLVTEQLQLGHLEESNSPWNTPVFVIKKKSGKWRLLQDLRAVNATMHDMGALQPGLPSPVAPPKGWEIIIIDLQDCFFNIKLHPEDCKRFAFSVPSPNFKRPYQRFQWKVLPQGMKNSPTLCQKFVDKAILTVRDKYQDSYIVHYMDDILLAHPSRSIVDEILTSMIQALNKHGLVVSTEKIQKYDNLKYLGTHIQGDSVSYQKLQIRTDKLRTLNDFQKLLGNINWIRPFLKLTTGELKPLFEILNPDSNPISTRKLTPEACKALQLMNERLSTARVKRLDLSQPWSLCILKTEYTPTACLWQDGVVEWIHLPHISPKVITPYDIFCTQLIIKGRHRSKELFSKDPDYIVVPYTKVQFDLLLQEKEDWPISLLGFLGEVHFHLPKDPLLTFTLQTAIIFPHMTSTTPLEKGIVIFTDGSANGRSVTYIQGREPIIKENTQNTAQQAEIVAVITAFEEVSQPFNLYTDSKYVTGLFPEIETATLSPRTKIYTELKHLQRLIHKRQEKFYIGHIRGHTGLPGPLAQGNAYADSLTRILTAGKRTADGSEFEKRTADGSEFESPKKKAKVE

SEQ ID NO: 3250 - protein, 2116 aa, synthetic construct
MPAAKRVKLDGGDKKYSIGLDIGTNSVGWAVITDEYKVPSKKFKVLGNTDRHSIKKNLIGALLFDSGETAEATRLKRTARRRYTRRKNRICYLQEIFSNEMAKVDDSFFHRLEESFLVEEDKKHERHPIFGNIVDEVAYHEKYPTIYHLRKKLVDSTDKADLRLIYLALAHMIKFRGHFLIEGDLNPDNSDVDKLFIQLVQTYNQLFEENPINASGVDAKAILSARLSKSRRLENLIAQLPGEKKNGLFGNLIALSLGLTPNFKSNFDLAEDAKLQLSKDTYDDDLDNLLAQIGDQYADLFLAAKNLSDAILLSDILRVNTEITKAPLSASMIKRYDEHHQDLTLLKALVRQQLPEKYKEIFFDQSKNGYAGYIDGGASQEEFYKFIKPILEKMDGTEELLVKLNREDLLRKQRTFDNGSIPHQIHLGELHAILRRQEDFYPFLKDNREKIEKILTFRIPYYVGPLARGNSRFAWMTRKSEETITPWNFEEVVDKGASAQSFIERMTNFDKNLPNEKVLPKHSLLYEYFTVYNELTKVKYVTEGMRKPAFLSGEQKKAIVDLLFKTNRKVTVKQLKEDYFKKIECFDSVEISGVEDRFNASLGTYHDLLKIIKDKDFLDNEENEDILEDIVLTLTLFEDREMIEERLKTYAHLFDDKVMKQLKRRRYTGWGRLSRKLINGIRDKQSGKTILDFLKSDGFANRNFMQLIHDDSLTFKEDIQKAQVSGQGDSLHEHIANLAGSPAIKKGILQTVKVVDELVKVMGRHKPENIVIEMARENQTTQKGQKNSRERMKRIEEGIKELGSQILKEHPVENTQLQNEKLYLYYLQNGRDMYVDQELDINRLSDYDVDHIVPQSFLKDDSIDNKVLTRSDKARGKSDNVPSEEVVKKMKNYWRQLLNAKLITQRKFDNLTKAERGGLSELDKAGFIKRQLVETRQITKHVAQILDSRMNTKYDENDKLIREVKVITLKSKLVSDFRKDFQFYKVREINNYHHAHDAYLNAVVGTALIKKYPKLESEFVYGDYKVYDVRKMIAKSEQEIGKATAKYFFYSNIMNFFKTEITLANGEIRKRPLIETNGETGEIVWDKGRDFATVRKVLSMPQVNIVKKTEVQTGGFSKESILPKRNSDKLIARKKDWDPKKYGGFDSPTVAYSVLVVAKVEKGKSKKLKSVKELLGITIMERSSFEKNPIDFLEAKGYKEVKKDLIIKLPKYSLFELENGRKRMLASAGELQKGNELALPSKYVNFLYLASHYEKLKGSPEDNEQKQLFVEQHKHYLDEIIEQISEFSKRVILADANLDKVLSAYNKHRDKPIREQAENIIHLFTLTNLGAPAAFKYFDTTIDRKRYTSTKEVLDATLIHQSITGLYETRIDLSQLGGDGGEAAAKGSSGGSGGVQEISDSRPMLHIYLNGRRFLGLLDTGADKTCIAGRDWPANWPIHQTESSLQGLGMACGVARSSQPLRWQHEDKSGIIHPFVIPTLPFTLWGRDIMKDIKVRLMTDSPDDSQDLMIGAIESNLFADQISWKSDQPVWLNQWPLKQEKLQALQQLVTEQLQLGHLEESNSPWNTPVFVIKKKSGKWRLLQDLRAVNATMHDMGALQPGLPSPPAVPKGWEIIIIDLQDCFFNIKLHPEDCKRFAFSVPSPNFKRPYQRFQWKVLPQGMKNSPTLCQKFVDKAILTVRDKYQDSYIVHYMDDILLAHPSRSIVDEILTSMIQALNKHGLVVSTEKIQKYDNLKYLGTHIQGDSVSYQKLQIRTDKLRTLNDFQKLLGNINWIRPFLKLTTGELKPLFEILNPDSNPISTRKLTPEACKALQLMNERLSTARVKRLDLSQPWSLCILKTEYTPTACLWQDGVVEWIHLPHISPKVITPYDIFCTQLIIKGRHRSKELFSKDPDYIVVPYTKVQFDLLLQEKEDWPISLLGFLGEVHFHLPKDPLLTFTLQTAIIFPHMTSTTPLEKGIVIFTDGSANGRSVTYIQGREPIIKENTQNTAQQAEIVAVITAFEEVSQPFNLYTDSKYVTGLFPEIETATLSPRTKIYTELKHLQRLIHKRQEKFYIGHIRGHTGLPGPLAQGNAYADSLTRILTAAGKRTADGSEFEKRTADGSEFESPKKKAKVE

SEQ ID NO: 3251 - protein, 2116 aa, synthetic construct
MPAAKRVKLDGGDKKYSIGLDIGTNSVGWAVITDEYKVPSKKFKVLGNTDRHSIKKNLIGALLFDSGETAEATRLKRTARRRYTRRKNRICYLQEIFSNEMAKVDDSFFHRLEESFLVEEDKKHERHPIFGNIVDEVAYHEKYPTIYHLRKKLVDSTDKADLRLIYLALAHMIKFRGHFLIEGDLNPDNSDVDKLFIQLVQTYNQLFEENPINASGVDAKAILSARLSKSRRLENLIAQLPGEKKNGLFGNLIALSLGLTPNFKSNFDLAEDAKLQLSKDTYDDDLDNLLAQIGDQYADLFLAAKNLSDAILLSDILRVNTEITKAPLSASMIKRYDEHHQDLTLLKALVRQQLPEKYKEIFFDQSKNGYAGYIDGGASQEEFYKFIKPILEKMDGTEELLVKLNREDLLRKQRTFDNGSIPHQIHLGELHAILRRQEDFYPFLKDNREKIEKILTFRIPYYVGPLARGNSRFAWMTRKSEETITPWNFEEVVDKGASAQSFIERMTNFDKNLPNEKVLPKHSLLYEYFTVYNELTKVKYVTEGMRKPAFLSGEQKKAIVDLLFKTNRKVTVKQLKEDYFKKIECFDSVEISGVEDRFNASLGTYHDLLKIIKDKDFLDNEENEDILEDIVLTLTLFEDREMIEERLKTYAHLFDDKVMKQLKRRRYTGWGRLSRKLINGIRDKQSGKTILDFLKSDGFANRNFMQLIHDDSLTFKEDIQKAQVSGQGDSLHEHIANLAGSPAIKKGILQTVKVVDELVKVMGRHKPENIVIEMARENQTTQKGQKNSRERMKRIEEGIKELGSQILKEHPVENTQLQNEKLYLYYLQNGRDMYVDQELDINRLSDYDVDHIVPQSFLKDDSIDNKVLTRSDKARGKSDNVPSEEVVKKMKNYWRQLLNAKLITQRKFDNLTKAERGGLSELDKAGFIKRQLVETRQITKHVAQILDSRMNTKYDENDKLIREVKVITLKSKLVSDFRKDFQFYKVREINNYHHAHDAYLNAVVGTALIKKYPKLESEFVYGDYKVYDVRKMIAKSEQEIGKATAKYFFYSNIMNFFKTEITLANGEIRKRPLIETNGETGEIVWDKGRDFATVRKVLSMPQVNIVKKTEVQTGGFSKESILPKRNSDKLIARKKDWDPKKYGGFDSPTVAYSVLVVAKVEKGKSKKLKSVKELLGITIMERSSFEKNPIDFLEAKGYKEVKKDLIIKLPKYSLFELENGRKRMLASAGELQKGNELALPSKYVNFLYLASHYEKLKGSPEDNEQKQLFVEQHKHYLDEIIEQISEFSKRVILADANLDKVLSAYNKHRDKPIREQAENIIHLFTLTNLGAPAAFKYFDTTIDRKRYTSTKEVLDATLIHQSITGLYETRIDLSQLGGDGGPAPEAAAKGGSGGVQEISDSRPMLHIYLNGRRFLGLLDTGADKTCIAGRDWPANWPIHQTESSLQGLGMACGVARSSQPLRWQHEDKSGIIHPFVIPTLPFTLWGRDIMKDIKVRLMTDSPDDSQDLMIGAIESNLFADQISWKSDQPVWLNQWPLKQEKLQALQQLVTEQLQLGHLEESNSPWNTPVFVIKKKSGKWRLLQDLRAVNATMHDMGALQPGLPSPPAVPKGWEIIIIDLQDCFFNIKLHPEDCKRFAFSVPSPNFKRPYQRFQWKVLPQGMKNSPTLCQKFVDKAILTVRDKYQDSYIVHYMDDILLAHPSRSIVDEILTSMIQALNKHGLVVSTEKIQKYDNLKYLGTHIQGDSVSYQKLQIRTDKLRTLNDFQKLLGNINWIRPFLKLTTGELKPLFEILNPDSNPISTRKLTPEACKALQLMNERLSTARVKRLDLSQPWSLCILKTEYTPTACLWQDGVVEWIHLPHISPKVITPYDIFCTQLIIKGRHRSKELFSKDPDYIVVPYTKVQFDLLLQEKEDWPISLLGFLGEVHFHLPKDPLLTFTLQTAIIFPHMTSTTPLEKGIVIFTDGSANGRSVTYIQGREPIIKENTQNTAQQAEIVAVITAFEEVSQPFNLYTDSKYVTGLFPEIETATLSPRTKIYTELKHLQRLIHKRQEKFYIGHIRGHTGLPGPLAQGNAYADSLTRILTAAGKRTADGSEFEKRTADGSEFESPKKKAKVE

SEQ ID NO: 3252 - protein, 2116 aa, synthetic construct
MPAAKRVKLDGGDKKYSIGLDIGTNSVGWAVITDEYKVPSKKFKVLGNTDRHSIKKNLIGALLFDSGETAEATRLKRTARRRYTRRKNRICYLQEIFSNEMAKVDDSFFHRLEESFLVEEDKKHERHPIFGNIVDEVAYHEKYPTIYHLRKKLVDSTDKADLRLIYLALAHMIKFRGHFLIEGDLNPDNSDVDKLFIQLVQTYNQLFEENPINASGVDAKAILSARLSKSRRLENLIAQLPGEKKNGLFGNLIALSLGLTPNFKSNFDLAEDAKLQLSKDTYDDDLDNLLAQIGDQYADLFLAAKNLSDAILLSDILRVNTEITKAPLSASMIKRYDEHHQDLTLLKALVRQQLPEKYKEIFFDQSKNGYAGYIDGGASQEEFYKFIKPILEKMDGTEELLVKLNREDLLRKQRTFDNGSIPHQIHLGELHAILRRQEDFYPFLKDNREKIEKILTFRIPYYVGPLARGNSRFAWMTRKSEETITPWNFEEVVDKGASAQSFIERMTNFDKNLPNEKVLPKHSLLYEYFTVYNELTKVKYVTEGMRKPAFLSGEQKKAIVDLLFKTNRKVTVKQLKEDYFKKIECFDSVEISGVEDRFNASLGTYHDLLKIIKDKDFLDNEENEDILEDIVLTLTLFEDREMIEERLKTYAHLFDDKVMKQLKRRRYTGWGRLSRKLINGIRDKQSGKTILDFLKSDGFANRNFMQLIHDDSLTFKEDIQKAQVSGQGDSLHEHIANLAGSPAIKKGILQTVKVVDELVKVMGRHKPENIVIEMARENQTTQKGQKNSRERMKRIEEGIKELGSQILKEHPVENTQLQNEKLYLYYLQNGRDMYVDQELDINRLSDYDVDHIVPQSFLKDDSIDNKVLTRSDKARGKSDNVPSEEVVKKMKNYWRQLLNAKLITQRKFDNLTKAERGGLSELDKAGFIKRQLVETRQITKHVAQILDSRMNTKYDENDKLIREVKVITLKSKLVSDFRKDFQFYKVREINNYHHAHDAYLNAVVGTALIKKYPKLESEFVYGDYKVYDVRKMIAKSEQEIGKATAKYFFYSNIMNFFKTEITLANGEIRKRPLIETNGETGEIVWDKGRDFATVRKVLSMPQVNIVKKTEVQTGGFSKESILPKRNSDKLIARKKDWDPKKYGGFDSPTVAYSVLVVAKVEKGKSKKLKSVKELLGITIMERSSFEKNPIDFLEAKGYKEVKKDLIIKLPKYSLFELENGRKRMLASAGELQKGNELALPSKYVNFLYLASHYEKLKGSPEDNEQKQLFVEQHKHYLDEIIEQISEFSKRVILADANLDKVLSAYNKHRDKPIREQAENIIHLFTLTNLGAPAAFKYFDTTIDRKRYTSTKEVLDATLIHQSITGLYETRIDLSQLGGDGGGGGGSSEAAAKGGVQEISDSRPMLHIYLNGRRFLGLLDTGADKTCIAGRDWPANWPIHQTESSLQGLGMACGVARSSQPLRWQHEDKSGIIHPFVIPTLPFTLWGRDIMKDIKVRLMTDSPDDSQDLMIGAIESNLFADQISWKSDQPVWLNQWPLKQEKLQALQQLVTEQLQLGHLEESNSPWNTPVFVIKKKSGKWRLLQDLRAVNATMHDMGALQPGLPSPVAVPKGWEIIIIDLQDCFFNIKLHPEDCKRFAFSVPSPNFKRPYQRFQWKVLPQGMKNSPTLCQKFVDKAILTVRDKYQDSYIVHYMDDILLAHPSRSIVDEILTSMIQALNKHGLVVSTEKIQKYDNLKYLGTHIQGDSVSYQKLQIRTDKLRTLNDFQKLLGNINWIRPFLKLTTGELKPLFEILNPDSNPISTRKLTPEACKALQLMNERLSTARVKRLDLSQPWSLCILKTEYTPTACLWQDGVVEWIHLPHISPKVITPYDIFCTQLIIKGRHRSKELFSKDPDYIVVPYTKVQFDLLLQEKEDWPISLLGFLGEVHFHLPKDPLLTFTLQTAIIFPHMTSTTPLEKGIVIFTDGSANGRSVTYIQGREPIIKENTQNTAQQAEIVAVITAFEEVSQPFNLYTDSKYVTGLFPEIETATLSPRTKIYTELKHLQRLIHKRQEKFYIGHIRGHTGLPGPLAQGNAYADSLTRILTAAGKRTADGSEFEKRTADGSEFESPKKKAKVE

SEQ ID NO: 3253 - protein, 2114 aa, synthetic construct
MPAAKRVKLDGGDKKYSIGLDIGTNSVGWAVITDEYKVPSKKFKVLGNTDRHSIKKNLIGALLFDSGETAEATRLKRTARRRYTRRKNRICYLQEIFSNEMAKVDDSFFHRLEESFLVEEDKKHERHPIFGNIVDEVAYHEKYPTIYHLRKKLVDSTDKADLRLIYLALAHMIKFRGHFLIEGDLNPDNSDVDKLFIQLVQTYNQLFEENPINASGVDAKAILSARLSKSRRLENLIAQLPGEKKNGLFGNLIALSLGLTPNFKSNFDLAEDAKLQLSKDTYDDDLDNLLAQIGDQYADLFLAAKNLSDAILLSDILRVNTEITKAPLSASMIKRYDEHHQDLTLLKALVRQQLPEKYKEIFFDQSKNGYAGYIDGGASQEEFYKFIKPILEKMDGTEELLVKLNREDLLRKQRTFDNGSIPHQIHLGELHAILRRQEDFYPFLKDNREKIEKILTFRIPYYVGPLARGNSRFAWMTRKSEETITPWNFEEVVDKGASAQSFIERMTNFDKNLPNEKVLPKHSLLYEYFTVYNELTKVKYVTEGMRKPAFLSGEQKKAIVDLLFKTNRKVTVKQLKEDYFKKIECFDSVEISGVEDRFNASLGTYHDLLKIIKDKDFLDNEENEDILEDIVLTLTLFEDREMIEERLKTYAHLFDDKVMKQLKRRRYTGWGRLSRKLINGIRDKQSGKTILDFLKSDGFANRNFMQLIHDDSLTFKEDIQKAQVSGQGDSLHEHIANLAGSPAIKKGILQTVKVVDELVKVMGRHKPENIVIEMARENQTTQKGQKNSRERMKRIEEGIKELGSQILKEHPVENTQLQNEKLYLYYLQNGRDMYVDQELDINRLSDYDVDHIVPQSFLKDDSIDNKVLTRSDKARGKSDNVPSEEVVKKMKNYWRQLLNAKLITQRKFDNLTKAERGGLSELDKAGFIKRQLVETRQITKHVAQILDSRMNTKYDENDKLIREVKVITLKSKLVSDFRKDFQFYKVREINNYHHAHDAYLNAVVGTALIKKYPKLESEFVYGDYKVYDVRKMIAKSEQEIGKATAKYFFYSNIMNFFKTEITLANGEIRKRPLIETNGETGEIVWDKGRDFATVRKVLSMPQVNIVKKTEVQTGGFSKESILPKRNSDKLIARKKDWDPKKYGGFDSPTVAYSVLVVAKVEKGKSKKLKSVKELLGITIMERSSFEKNPIDFLEAKGYKEVKKDLIIKLPKYSLFELENGRKRMLASAGELQKGNELALPSKYVNFLYLASHYEKLKGSPEDNEQKQLFVEQHKHYLDEIIEQISEFSKRVILADANLDKVLSAYNKHRDKPIREQAENIIHLFTLTNLGAPAAFKYFDTTIDRKRYTSTKEVLDATLIHQSITGLYETRIDLSQLGGDGGGGGGGSGSSGGVQEISDSRPMLHIYLNGRRFLGLLDTGADKTCIAGRDWPANWPIHQTESSLQGLGMACGVARSSQPLRWQHEDKSGIIHPFVIPTLPFTLWGRDIMKDIKVRLMTDSPDDSQDLMIGAIESNLFADQISWKSDQPVWLNQWPLKQEKLQALQQLVTEQLQLGHLEESNSPWNTPVFVIKKKSGKWRLLQDLRAVNATMHDMGALQPGLPSPVAVPKGWEIIIIDLQDCFFNIKLHPEDCKRFAFSVPSPNFKRPYQRFQWKVLPQGMKNSPTLCQKFVDKAILTVRDKYQDSYIVHYMDDILLAHPSRSIVDEILTSMIQALNKHGLVVSTEKIQKYDNLKYLGTHIQGDSVSYQKLQIRTDKLRTLNDFQKLLGNINWIRPFLKLTTGELKPLFEILNPDSNPISTRKLTPEACKALQLMNERLSTARVKRLDLSQPWSLCILKTEYTPTACLWQDGVVEWIHLPHISPKVITPYDIFCTQLIIKGRHRSKELFSKDPDYIVVPYTKVQFDLLLQEKEDWPISLLGFLGEVHFHLPKDPLLTFTLQTAIIFPHMTSTTPLEKGIVIFTDGSANGRSVTYIQGREPIIKENTQNTAQQAEIVAVITAFEEVSQPFNLYTDSKYVTGLFPEIETATLSPRTKIYTELKHLQRLIHKRQEKFYIGHIRGHTGLPGPLAQGNAYADSLTRILTAAGKRTADGSEFEKRTADGSEFESPKKKAKVE

SEQ ID NO: 3254 - protein, 2125 aa, synthetic construct
MPAAKRVKLDGGDKKYSIGLDIGTNSVGWAVITDEYKVPSKKFKVLGNTDRHSIKKNLIGALLFDSGETAEATRLKRTARRRYTRRKNRICYLQEIFSNEMAKVDDSFFHRLEESFLVEEDKKHERHPIFGNIVDEVAYHEKYPTIYHLRKKLVDSTDKADLRLIYLALAHMIKFRGHFLIEGDLNPDNSDVDKLFIQLVQTYNQLFEENPINASGVDAKAILSARLSKSRRLENLIAQLPGEKKNGLFGNLIALSLGLTPNFKSNFDLAEDAKLQLSKDTYDDDLDNLLAQIGDQYADLFLAAKNLSDAILLSDILRVNTEITKAPLSASMIKRYDEHHQDLTLLKALVRQQLPEKYKEIFFDQSKNGYAGYIDGGASQEEFYKFIKPILEKMDGTEELLVKLNREDLLRKQRTFDNGSIPHQIHLGELHAILRRQEDFYPFLKDNREKIEKILTFRIPYYVGPLARGNSRFAWMTRKSEETITPWNFEEVVDKGASAQSFIERMTNFDKNLPNEKVLPKHSLLYEYFTVYNELTKVKYVTEGMRKPAFLSGEQKKAIVDLLFKTNRKVTVKQLKEDYFKKIECFDSVEISGVEDRFNASLGTYHDLLKIIKDKDFLDNEENEDILEDIVLTLTLFEDREMIEERLKTYAHLFDDKVMKQLKRRRYTGWGRLSRKLINGIRDKQSGKTILDFLKSDGFANRNFMQLIHDDSLTFKEDIQKAQVSGQGDSLHEHIANLAGSPAIKKGILQTVKVVDELVKVMGRHKPENIVIEMARENQTTQKGQKNSRERMKRIEEGIKELGSQILKEHPVENTQLQNEKLYLYYLQNGRDMYVDQELDINRLSDYDVDHIVPQSFLKDDSIDNKVLTRSDKARGKSDNVPSEEVVKKMKNYWRQLLNAKLITQRKFDNLTKAERGGLSELDKAGFIKRQLVETRQITKHVAQILDSRMNTKYDENDKLIREVKVITLKSKLVSDFRKDFQFYKVREINNYHHAHDAYLNAVVGTALIKKYPKLESEFVYGDYKVYDVRKMIAKSEQEIGKATAKYFFYSNIMNFFKTEITLANGEIRKRPLIETNGETGEIVWDKGRDFATVRKVLSMPQVNIVKKTEVQTGGFSKESILPKRNSDKLIARKKDWDPKKYGGFDSPTVAYSVLVVAKVEKGKSKKLKSVKELLGITIMERSSFEKNPIDFLEAKGYKEVKKDLIIKLPKYSLFELENGRKRMLASAGELQKGNELALPSKYVNFLYLASHYEKLKGSPEDNEQKQLFVEQHKHYLDEIIEQISEFSKRVILADANLDKVLSAYNKHRDKPIREQAENIIHLFTLTNLGAPAAFKYFDTTIDRKRYTSTKEVLDATLIHQSITGLYETRIDLSQLGGDGGGGGGSGGGGSGGGGSGGGGSGGVQEISDSRPMLHIYLNGRRFLGLLDTGADKTCIAGRDWPANWPIHQTESSLQGLGMACGVARSSQPLRWQHEDKSGIIHPFVIPTLPFTLWGRDIMKDIKVRLMTDSPDDSQDLMIGAIESNLFADQISWKSDQPVWLNQWPLKQEKLQALQQLVTEQLQLGHLEESNSPWNTPVFVIKKKSGKWRLLQDLRAVNATMHDMGALQPGLPSPVAVPKGWEIIIIDLQDCFFNIKLHPEDCKRFAFSVPSPNFKRPYQRFQWKVLPQGMKNSPTLCQKFVDKAILTVRDKYQDSYIVHYMDDILLAHPSRSIVDEILTSMIQALNKHGLVVSTEKIQKYDNLKYLGTHIQGDSVSYQKLQIRTDKLRTLNDFQKLLGNINWIRPFLKLTTGELKPLFEILNPDSNPISTRKLTPEACKALQLMNERLSTARVKRLDLSQPWSLCILKTEYTPTACLWQDGVVEWIHLPHISPKVITPYDIFCTQLIIKGRHRSKELFSKDPDYIVVPYTKVQFDLLLQEKEDWPISLLGFLGEVHFHLPKDPLLTFTLQTAIIFPHMTSTTPLEKGIVIFTDGSANGRSVTYIQGREPIIKENTQNTAQQAEIVAVITAFEEVSQPFNLYTDSKYVTGLFPEIETATLSPRTKIYTELKHLQRLIHKRQEKFYIGHIRGHTGLPGPLAQGNAYADSLTRILTAAGKRTADGSEFEKRTADGSEFESPKKKAKVE

SEQ ID NO: 3255 - protein, 2116 aa, synthetic construct
MPAAKRVKLDGGDKKYSIGLDIGTNSVGWAVITDEYKVPSKKFKVLGNTDRHSIKKNLIGALLFDSGETAEATRLKRTARRRYTRRKNRICYLQEIFSNEMAKVDDSFFHRLEESFLVEEDKKHERHPIFGNIVDEVAYHEKYPTIYHLRKKLVDSTDKADLRLIYLALAHMIKFRGHFLIEGDLNPDNSDVDKLFIQLVQTYNQLFEENPINASGVDAKAILSARLSKSRRLENLIAQLPGEKKNGLFGNLIALSLGLTPNFKSNFDLAEDAKLQLSKDTYDDDLDNLLAQIGDQYADLFLAAKNLSDAILLSDILRVNTEITKAPLSASMIKRYDEHHQDLTLLKALVRQQLPEKYKEIFFDQSKNGYAGYIDGGASQEEFYKFIKPILEKMDGTEELLVKLNREDLLRKQRTFDNGSIPHQIHLGELHAILRRQEDFYPFLKDNREKIEKILTFRIPYYVGPLARGNSRFAWMTRKSEETITPWNFEEVVDKGASAQSFIERMTNFDKNLPNEKVLPKHSLLYEYFTVYNELTKVKYVTEGMRKPAFLSGEQKKAIVDLLFKTNRKVTVKQLKEDYFKKIECFDSVEISGVEDRFNASLGTYHDLLKIIKDKDFLDNEENEDILEDIVLTLTLFEDREMIEERLKTYAHLFDDKVMKQLKRRRYTGWGRLSRKLINGIRDKQSGKTILDFLKSDGFANRNFMQLIHDDSLTFKEDIQKAQVSGQGDSLHEHIANLAGSPAIKKGILQTVKVVDELVKVMGRHKPENIVIEMARENQTTQKGQKNSRERMKRIEEGIKELGSQILKEHPVENTQLQNEKLYLYYLQNGRDMYVDQELDINRLSDYDVDHIVPQSFLKDDSIDNKVLTRSDKARGKSDNVPSEEVVKKMKNYWRQLLNAKLITQRKFDNLTKAERGGLSELDKAGFIKRQLVETRQITKHVAQILDSRMNTKYDENDKLIREVKVITLKSKLVSDFRKDFQFYKVREINNYHHAHDAYLNAVVGTALIKKYPKLESEFVYGDYKVYDVRKMIAKSEQEIGKATAKYFFYSNIMNFFKTEITLANGEIRKRPLIETNGETGEIVWDKGRDFATVRKVLSMPQVNIVKKTEVQTGGFSKESILPKRNSDKLIARKKDWDPKKYGGFDSPTVAYSVLVVAKVEKGKSKKLKSVKELLGITIMERSSFEKNPIDFLEAKGYKEVKKDLIIKLPKYSLFELENGRKRMLASAGELQKGNELALPSKYVNFLYLASHYEKLKGSPEDNEQKQLFVEQHKHYLDEIIEQISEFSKRVILADANLDKVLSAYNKHRDKPIREQAENIIHLFTLTNLGAPAAFKYFDTTIDRKRYTSTKEVLDATLIHQSITGLYETRIDLSQLGGDGGPAPEAAAKGGGGGVQEISDSRPMLHIYLNGRRFLGLLDTGADKTCIAGRDWPANWPIHQTESSLQGLGMACGVARSSQPLRWQHEDKSGIIHPFVIPTLPFTLWGRDIMKDIKVRLMTDSPDDSQDLMIGAIESNLFADQISWKSDQPVWLNQWPLKQEKLQALQQLVTEQLQLGHLEESNSPWNTPVFVIKKKSGKWRLLQDLRAVNATMHDMGALQPGLPSPVAVPKGWEIIIIDLQDCFFNIKLHPEDCKRFAFSVPSPNFKRPYQRFQWKVLPQGMKNSPTLCQKFVDKAILTVRDKYQDSYIVHYMDDILLAHPSRSIVDEILTSMIQALNKHGLVVSTEKIQKYDNLKYLGTHIQGDSVSYQKLQIRTDKLRTLNDFQKLLGNINWIRPFLKLTTGELKPLFEILNPDSNPISTRKLTPEACKALQLMNERLSTARVKRLDLSQPWSLCILKTEYTPTACLWQDGVVEWIHLPHISPKVITPYDIFCTQLIIKGRHRSKELFSKDPDYIVVPYTKVQFDLLLQEKEDWPISLLGFLGEVHFHLPKDPLLTFTLQTAIIFPHMTSTTPLEKGIVIFTDGSANGRSVTYIQGREPIIKENTQNTAQQAEIVAVITAFEEVSQPFNLYTDSKYVTGLFPEIETATLSPRTKIYTELKHLQRLIHKRQEKFYIGHIRGHTGLPGPLAQGNAYADSLTRILTAAGKRTADGSEFEKRTADGSEFESPKKKAKVE

SEQ ID NO: 3256 - protein, 2112 aa, synthetic construct
MPAAKRVKLDGGDKKYSIGLDIGTNSVGWAVITDEYKVPSKKFKVLGNTDRHSIKKNLIGALLFDSGETAEATRLKRTARRRYTRRKNRICYLQEIFSNEMAKVDDSFFHRLEESFLVEEDKKHERHPIFGNIVDEVAYHEKYPTIYHLRKKLVDSTDKADLRLIYLALAHMIKFRGHFLIEGDLNPDNSDVDKLFIQLVQTYNQLFEENPINASGVDAKAILSARLSKSRRLENLIAQLPGEKKNGLFGNLIALSLGLTPNFKSNFDLAEDAKLQLSKDTYDDDLDNLLAQIGDQYADLFLAAKNLSDAILLSDILRVNTEITKAPLSASMIKRYDEHHQDLTLLKALVRQQLPEKYKEIFFDQSKNGYAGYIDGGASQEEFYKFIKPILEKMDGTEELLVKLNREDLLRKQRTFDNGSIPHQIHLGELHAILRRQEDFYPFLKDNREKIEKILTFRIPYYVGPLARGNSRFAWMTRKSEETITPWNFEEVVDKGASAQSFIERMTNFDKNLPNEKVLPKHSLLYEYFTVYNELTKVKYVTEGMRKPAFLSGEQKKAIVDLLFKTNRKVTVKQLKEDYFKKIECFDSVEISGVEDRFNASLGTYHDLLKIIKDKDFLDNEENEDILEDIVLTLTLFEDREMIEERLKTYAHLFDDKVMKQLKRRRYTGWGRLSRKLINGIRDKQSGKTILDFLKSDGFANRNFMQLIHDDSLTFKEDIQKAQVSGQGDSLHEHIANLAGSPAIKKGILQTVKVVDELVKVMGRHKPENIVIEMARENQTTQKGQKNSRERMKRIEEGIKELGSQILKEHPVENTQLQNEKLYLYYLQNGRDMYVDQELDINRLSDYDVDHIVPQSFLKDDSIDNKVLTRSDKARGKSDNVPSEEVVKKMKNYWRQLLNAKLITQRKFDNLTKAERGGLSELDKAGFIKRQLVETRQITKHVAQILDSRMNTKYDENDKLIREVKVITLKSKLVSDFRKDFQFYKVREINNYHHAHDAYLNAVVGTALIKKYPKLESEFVYGDYKVYDVRKMIAKSEQEIGKATAKYFFYSNIMNFFKTEITLANGEIRKRPLIETNGETGEIVWDKGRDFATVRKVLSMPQVNIVKKTEVQTGGFSKESILPKRNSDKLIARKKDWDPKKYGGFDSPTVAYSVLVVAKVEKGKSKKLKSVKELLGITIMERSSFEKNPIDFLEAKGYKEVKKDLIIKLPKYSLFELENGRKRMLASAGELQKGNELALPSKYVNFLYLASHYEKLKGSPEDNEQKQLFVEQHKHYLDEIIEQISEFSKRVILADANLDKVLSAYNKHRDKPIREQAENIIHLFTLTNLGAPAAFKYFDTTIDRKRYTSTKEVLDATLIHQSITGLYETRIDLSQLGGDGGPAPAPAPGGVQEISDSRPMLHIYLNGRRFLGLLDTGADKTCIAGRDWPANWPIHQTESSLQGLGMACGVARSSQPLRWQHEDKSGIIHPFVIPTLPFTLWGRDIMKDIKVRLMTDSPDDSQDLMIGAIESNLFADQISWKSDQPVWLNQWPLKQEKLQALQQLVTEQLQLGHLEESNSPWNTPVFVIKKKSGKWRLLQDLRAVNATMHDMGALQPGLPSPVAVPKGWEIIIIDLQDCFFNIKLHPEDCKRFAFSVPSPNFKRPYQRFQWKVLPQGMKNSPTLCQKFVDKAILTVRDKYQDSYIVHYMDDILLAHPSRSIVDEILTSMIQALNKHGLVVSTEKIQKYDNLKYLGTHIQGDSVSYQKLQIRTDKLRTLNDFQKLLGNINWIRPFLKLTTGELKPLFEILNPDSNPISTRKLTPEACKALQLMNERLSTARVKRLDLSQPWSLCILKTEYTPTACLWQDGVVEWIHLPHISPKVITPYDIFCTQLIIKGRHRSKELFSKDPDYIVVPYTKVQFDLLLQEKEDWPISLLGFLGEVHFHLPKDPLLTFTLQTAIIFPHMTSTTPLEKGIVIFTDGSANGRSVTYIQGREPIIKENTQNTAQQAEIVAVITAFEEVSQPFNLYTDSKYVTGLFPEIETATLSPRTKIYTELKHLQRLIHKRQEKFYIGHIRGHTGLPGPLAQGNAYADSLTRILTAAGKRTADGSEFEKRTADGSEFESPKKKAKVE

SEQ ID NO: 3257 - protein, 2116 aa, synthetic construct
MPAAKRVKLDGGDKKYSIGLDIGTNSVGWAVITDEYKVPSKKFKVLGNTDRHSIKKNLIGALLFDSGETAEATRLKRTARRRYTRRKNRICYLQEIFSNEMAKVDDSFFHRLEESFLVEEDKKHERHPIFGNIVDEVAYHEKYPTIYHLRKKLVDSTDKADLRLIYLALAHMIKFRGHFLIEGDLNPDNSDVDKLFIQLVQTYNQLFEENPINASGVDAKAILSARLSKSRRLENLIAQLPGEKKNGLFGNLIALSLGLTPNFKSNFDLAEDAKLQLSKDTYDDDLDNLLAQIGDQYADLFLAAKNLSDAILLSDILRVNTEITKAPLSASMIKRYDEHHQDLTLLKALVRQQLPEKYKEIFFDQSKNGYAGYIDGGASQEEFYKFIKPILEKMDGTEELLVKLNREDLLRKQRTFDNGSIPHQIHLGELHAILRRQEDFYPFLKDNREKIEKILTFRIPYYVGPLARGNSRFAWMTRKSEETITPWNFEEVVDKGASAQSFIERMTNFDKNLPNEKVLPKHSLLYEYFTVYNELTKVKYVTEGMRKPAFLSGEQKKAIVDLLFKTNRKVTVKQLKEDYFKKIECFDSVEISGVEDRFNASLGTYHDLLKIIKDKDFLDNEENEDILEDIVLTLTLFEDREMIEERLKTYAHLFDDKVMKQLKRRRYTGWGRLSRKLINGIRDKQSGKTILDFLKSDGFANRNFMQLIHDDSLTFKEDIQKAQVSGQGDSLHEHIANLAGSPAIKKGILQTVKVVDELVKVMGRHKPENIVIEMARENQTTQKGQKNSRERMKRIEEGIKELGSQILKEHPVENTQLQNEKLYLYYLQNGRDMYVDQELDINRLSDYDVDHIVPQSFLKDDSIDNKVLTRSDKARGKSDNVPSEEVVKKMKNYWRQLLNAKLITQRKFDNLTKAERGGLSELDKAGFIKRQLVETRQITKHVAQILDSRMNTKYDENDKLIREVKVITLKSKLVSDFRKDFQFYKVREINNYHHAHDAYLNAVVGTALIKKYPKLESEFVYGDYKVYDVRKMIAKSEQEIGKATAKYFFYSNIMNFFKTEITLANGEIRKRPLIETNGETGEIVWDKGRDFATVRKVLSMPQVNIVKKTEVQTGGFSKESILPKRNSDKLIARKKDWDPKKYGGFDSPTVAYSVLVVAKVEKGKSKKLKSVKELLGITIMERSSFEKNPIDFLEAKGYKEVKKDLIIKLPKYSLFELENGRKRMLASAGELQKGNELALPSKYVNFLYLASHYEKLKGSPEDNEQKQLFVEQHKHYLDEIIEQISEFSKRVILADANLDKVLSAYNKHRDKPIREQAENIIHLFTLTNLGAPAAFKYFDTTIDRKRYTSTKEVLDATLIHQSITGLYETRIDLSQLGGDGGEAAAKPAPGGGGGVQEISDSRPMLHIYLNGRRFLGLLDTGADKTCIAGRDWPANWPIHQTESSLQGLGMACGVARSSQPLRWQHEDKSGIIHPFVIPTLPFTLWGRDIMKDIKVRLMTDSPDDSQDLMIGAIESNLFADQISWKSDQPVWLNQWPLKQEKLQALQQLVTEQLQLGHLEESNSPWNTPVFVIKKKSGKWRLLQDLRAVNATMHDMGALQPGLPSPVAVPKGWEIIIIDLQDCFFNIKLHPEDCKRFAFSVPSPNFKRPYQRFQWKVLPQGMKNSPTLCQKFVDKAILTVRDKYQDSYIVHYMDDILLAHPSRSIVDEILTSMIQALNKHGLVVSTEKIQKYDNLKYLGTHIQGDSVSYQKLQIRTDKLRTLNDFQKLLGNINWIRPFLKLTTGELKPLFEILNPDSNPISTRKLTPEACKALQLMNERLSTARVKRLDLSQPWSLCILKTEYTPTACLWQDGVVEWIHLPHISPKVITPYDIFCTQLIIKGRHRSKELFSKDPDYIVVPYTKVQFDLLLQEKEDWPISLLGFLGEVHFHLPKDPLLTFTLQTAIIFPHMTSTTPLEKGIVIFTDGSANGRSVTYIQGREPIIKENTQNTAQQAEIVAVITAFEEVSQPFNLYTDSKYVTGLFPEIETATLSPRTKIYTELKHLQRLIHKRQEKFYIGHIRGHTGLPGPLAQGNAYADSLTRILTAAGKRTADGSEFEKRTADGSEFESPKKKAKVE

SEQ ID NO: 3258 - protein, 2116 aa, synthetic construct
MPAAKRVKLDGGDKKYSIGLDIGTNSVGWAVITDEYKVPSKKFKVLGNTDRHSIKKNLIGALLFDSGETAEATRLKRTARRRYTRRKNRICYLQEIFSNEMAKVDDSFFHRLEESFLVEEDKKHERHPIFGNIVDEVAYHEKYPTIYHLRKKLVDSTDKADLRLIYLALAHMIKFRGHFLIEGDLNPDNSDVDKLFIQLVQTYNQLFEENPINASGVDAKAILSARLSKSRRLENLIAQLPGEKKNGLFGNLIALSLGLTPNFKSNFDLAEDAKLQLSKDTYDDDLDNLLAQIGDQYADLFLAAKNLSDAILLSDILRVNTEITKAPLSASMIKRYDEHHQDLTLLKALVRQQLPEKYKEIFFDQSKNGYAGYIDGGASQEEFYKFIKPILEKMDGTEELLVKLNREDLLRKQRTFDNGSIPHQIHLGELHAILRRQEDFYPFLKDNREKIEKILTFRIPYYVGPLARGNSRFAWMTRKSEETITPWNFEEVVDKGASAQSFIERMTNFDKNLPNEKVLPKHSLLYEYFTVYNELTKVKYVTEGMRKPAFLSGEQKKAIVDLLFKTNRKVTVKQLKEDYFKKIECFDSVEISGVEDRFNASLGTYHDLLKIIKDKDFLDNEENEDILEDIVLTLTLFEDREMIEERLKTYAHLFDDKVMKQLKRRRYTGWGRLSRKLINGIRDKQSGKTILDFLKSDGFANRNFMQLIHDDSLTFKEDIQKAQVSGQGDSLHEHIANLAGSPAIKKGILQTVKVVDELVKVMGRHKPENIVIEMARENQTTQKGQKNSRERMKRIEEGIKELGSQILKEHPVENTQLQNEKLYLYYLQNGRDMYVDQELDINRLSDYDVDHIVPQSFLKDDSIDNKVLTRSDKARGKSDNVPSEEVVKKMKNYWRQLLNAKLITQRKFDNLTKAERGGLSELDKAGFIKRQLVETRQITKHVAQILDSRMNTKYDENDKLIREVKVITLKSKLVSDFRKDFQFYKVREINNYHHAHDAYLNAVVGTALIKKYPKLESEFVYGDYKVYDVRKMIAKSEQEIGKATAKYFFYSNIMNFFKTEITLANGEIRKRPLIETNGETGEIVWDKGRDFATVRKVLSMPQVNIVKKTEVQTGGFSKESILPKRNSDKLIARKKDWDPKKYGGFDSPTVAYSVLVVAKVEKGKSKKLKSVKELLGITIMERSSFEKNPIDFLEAKGYKEVKKDLIIKLPKYSLFELENGRKRMLASAGELQKGNELALPSKYVNFLYLASHYEKLKGSPEDNEQKQLFVEQHKHYLDEIIEQISEFSKRVILADANLDKVLSAYNKHRDKPIREQAENIIHLFTLTNLGAPAAFKYFDTTIDRKRYTSTKEVLDATLIHQSITGLYETRIDLSQLGGDGGPAPGGSEAAAKGGVQEISDSRPMLHIYLNGRRFLGLLDTGADKTCIAGRDWPANWPIHQTESSLQGLGMACGVARSSQPLRWQHEDKSGIIHPFVIPTLPFTLWGRDIMKDIKVRLMTDSPDDSQDLMIGAIESNLFADQISWKSDQPVWLNQWPLKQEKLQALQQLVTEQLQLGHLEESNSPWNTPVFVIKKKSGKWRLLQDLRAVNATMHDMGALQPGLPSPVAVPKGWEIIIIDLQDCFFNIKLHPEDCKRFAFSVPSPNFKRPYQRFQWKVLPQGMKNSPTLCQKFVDKAILTVRDKYQDSYIVHYMDDILLAHPSRSIVDEILTSMIQALNKHGLVVSTEKIQKYDNLKYLGTHIQGDSVSYQKLQIRTDKLRTLNDFQKLLGNINWIRPFLKLTTGELKPLFEILNPDSNPISTRKLTPEACKALQLMNERLSTARVKRLDLSQPWSLCILKTEYTPTACLWQDGVVEWIHLPHISPKVITPYDIFCTQLIIKGRHRSKELFSKDPDYIVVPYTKVQFDLLLQEKEDWPISLLGFLGEVHFHLPKDPLLTFTLQTAIIFPHMTSTTPLEKGIVIFTDGSANGRSVTYIQGREPIIKENTQNTAQQAEIVAVITAFEEVSQPFNLYTDSKYVTGLFPEIETATLSPRTKIYTELKHLQRLIHKRQEKFYIGHIRGHTGLPGPLAQGNAYADSLTRILTAAGKRTADGSEFEKRTADGSEFESPKKKAKVE

SEQ ID NO: 3259 - protein, 2123 aa, synthetic construct
MPAAKRVKLDGGDKKYSIGLDIGTNSVGWAVITDEYKVPSKKFKVLGNTDRHSIKKNLIGALLFDSGETAEATRLKRTARRRYTRRKNRICYLQEIFSNEMAKVDDSFFHRLEESFLVEEDKKHERHPIFGNIVDEVAYHEKYPTIYHLRKKLVDSTDKADLRLIYLALAHMIKFRGHFLIEGDLNPDNSDVDKLFIQLVQTYNQLFEENPINASGVDAKAILSARLSKSRRLENLIAQLPGEKKNGLFGNLIALSLGLTPNFKSNFDLAEDAKLQLSKDTYDDDLDNLLAQIGDQYADLFLAAKNLSDAILLSDILRVNTEITKAPLSASMIKRYDEHHQDLTLLKALVRQQLPEKYKEIFFDQSKNGYAGYIDGGASQEEFYKFIKPILEKMDGTEELLVKLNREDLLRKQRTFDNGSIPHQIHLGELHAILRRQEDFYPFLKDNREKIEKILTFRIPYYVGPLARGNSRFAWMTRKSEETITPWNFEEVVDKGASAQSFIERMTNFDKNLPNEKVLPKHSLLYEYFTVYNELTKVKYVTEGMRKPAFLSGEQKKAIVDLLFKTNRKVTVKQLKEDYFKKIECFDSVEISGVEDRFNASLGTYHDLLKIIKDKDFLDNEENEDILEDIVLTLTLFEDREMIEERLKTYAHLFDDKVMKQLKRRRYTGWGRLSRKLINGIRDKQSGKTILDFLKSDGFANRNFMQLIHDDSLTFKEDIQKAQVSGQGDSLHEHIANLAGSPAIKKGILQTVKVVDELVKVMGRHKPENIVIEMARENQTTQKGQKNSRERMKRIEEGIKELGSQILKEHPVENTQLQNEKLYLYYLQNGRDMYVDQELDINRLSDYDVDHIVPQSFLKDDSIDNKVLTRSDKARGKSDNVPSEEVVKKMKNYWRQLLNAKLITQRKFDNLTKAERGGLSELDKAGFIKRQLVETRQITKHVAQILDSRMNTKYDENDKLIREVKVITLKSKLVSDFRKDFQFYKVREINNYHHAHDAYLNAVVGTALIKKYPKLESEFVYGDYKVYDVRKMIAKSEQEIGKATAKYFFYSNIMNFFKTEITLANGEIRKRPLIETNGETGEIVWDKGRDFATVRKVLSMPQVNIVKKTEVQTGGFSKESILPKRNSDKLIARKKDWDPKKYGGFDSPTVAYSVLVVAKVEKGKSKKLKSVKELLGITIMERSSFEKNPIDFLEAKGYKEVKKDLIIKLPKYSLFELENGRKRMLASAGELQKGNELALPSKYVNFLYLASHYEKLKGSPEDNEQKQLFVEQHKHYLDEIIEQISEFSKRVILADANLDKVLSAYNKHRDKPIREQAENIIHLFTLTNLGAPAAFKYFDTTIDRKRYTSTKEVLDATLIHQSITGLYETRIDLSQLGGDGGGSSGSSGSSGSSGSSGSSGGVQEISDSRPMLHIYLNGRRFLGLLDTGADKTCIAGRDWPANWPIHQTESSLQGLGMACGVARSSQPLRWQHEDKSGIIHPFVIPTLPFTLWGRDIMKDIKVRLMTDSPDDSQDLMIGAIESNLFADQISWKSDQPVWLNQWPLKQEKLQALQQLVTEQLQLGHLEESNSPWNTPVFVIKKKSGKWRLLQDLRAVNATMHDMGALQPGLPSPVAVPKGWEIIIIDLQDCFFNIKLHPEDCKRFAFSVPSPNFKRPYQRFQWKVLPQGMKNSPTLCQKFVDKAILTVRDKYQDSYIVHYMDDILLAHPSRSIVDEILTSMIQALNKHGLVVSTEKIQKYDNLKYLGTHIQGDSVSYQKLQIRTDKLRTLNDFQKLLGNINWIRPFLKLTTGELKPLFEILNPDSNPISTRKLTPEACKALQLMNERLSTARVKRLDLSQPWSLCILKTEYTPTACLWQDGVVEWIHLPHISPKVITPYDIFCTQLIIKGRHRSKELFSKDPDYIVVPYTKVQFDLLLQEKEDWPISLLGFLGEVHFHLPKDPLLTFTLQTAIIFPHMTSTTPLEKGIVIFTDGSANGRSVTYIQGREPIIKENTQNTAQQAEIVAVITAFEEVSQPFNLYTDSKYVTGLFPEIETATLSPRTKIYTELKHLQRLIHKRQEKFYIGHIRGHTGLPGPLAQGNAYADSLTRILTAAGKRTADGSEFEKRTADGSEFESPKKKAKVE

SEQ ID NO: 3260 - protein, 2125 aa, synthetic construct; identical to SEQ ID NO: 3157

SEQ ID NO: 3261 - protein, 2116 aa, synthetic construct
MPAAKRVKLDGGDKKYSIGLDIGTNSVGWAVITDEYKVPSKKFKVLGNTDRHSIKKNLIGALLFDSGETAEATRLKRTARRRYTRRKNRICYLQEIFSNEMAKVDDSFFHRLEESFLVEEDKKHERHPIFGNIVDEVAYHEKYPTIYHLRKKLVDSTDKADLRLIYLALAHMIKFRGHFLIEGDLNPDNSDVDKLFIQLVQTYNQLFEENPINASGVDAKAILSARLSKSRRLENLIAQLPGEKKNGLFGNLIALSLGLTPNFKSNFDLAEDAKLQLSKDTYDDDLDNLLAQIGDQYADLFLAAKNLSDAILLSDILRVNTEITKAPLSASMIKRYDEHHQDLTLLKALVRQQLPEKYKEIFFDQSKNGYAGYIDGGASQEEFYKFIKPILEKMDGTEELLVKLNREDLLRKQRTFDNGSIPHQIHLGELHAILRRQEDFYPFLKDNREKIEKILTFRIPYYVGPLARGNSRFAWMTRKSEETITPWNFEEVVDKGASAQSFIERMTNFDKNLPNEKVLPKHSLLYEYFTVYNELTKVKYVTEGMRKPAFLSGEQKKAIVDLLFKTNRKVTVKQLKEDYFKKIECFDSVEISGVEDRFNASLGTYHDLLKIIKDKDFLDNEENEDILEDIVLTLTLFEDREMIEERLKTYAHLFDDKVMKQLKRRRYTGWGRLSRKLINGIRDKQSGKTILDFLKSDGFANRNFMQLIHDDSLTFKEDIQKAQVSGQGDSLHEHIANLAGSPAIKKGILQTVKVVDELVKVMGRHKPENIVIEMARENQTTQKGQKNSRERMKRIEEGIKELGSQILKEHPVENTQLQNEKLYLYYLQNGRDMYVDQELDINRLSDYDVDHIVPQSFLKDDSIDNKVLTRSDKARGKSDNVPSEEVVKKMKNYWRQLLNAKLITQRKFDNLTKAERGGLSELDKAGFIKRQLVETRQITKHVAQILDSRMNTKYDENDKLIREVKVITLKSKLVSDFRKDFQFYKVREINNYHHAHDAYLNAVVGTALIKKYPKLESEFVYGDYKVYDVRKMIAKSEQEIGKATAKYFFYSNIMNFFKTEITLANGEIRKRPLIETNGETGEIVWDKGRDFATVRKVLSMPQVNIVKKTEVQTGGFSKESILPKRNSDKLIARKKDWDPKKYGGFDSPTVAYSVLVVAKVEKGKSKKLKSVKELLGITIMERSSFEKNPIDFLEAKGYKEVKKDLIIKLPKYSLFELENGRKRMLASAGELQKGNELALPSKYVNFLYLASHYEKLKGSPEDNEQKQLFVEQHKHYLDEIIEQISEFSKRVILADANLDKVLSAYNKHRDKPIREQAENIIHLFTLTNLGAPAAFKYFDTTIDRKRYTSTKEVLDATLIHQSITGLYETRIDLSQLGGDGGGGSGSSEAAAKGGVQEISDSRPMLHIYLNGRRFLGLLDTGADKTCIAGRDWPANWPIHQTESSLQGLGMACGVARSSQPLRWQHEDKSGIIHPFVIPTLPFTLWGRDIMKDIKVRLMTDSPDDSQDLMIGAIESNLFADQISWKSDQPVWLNQWPLKQEKLQALQQLVTEQLQLGHLEESNSPWNTPVFVIKKKSGKWRLLQDLRAVNATMHDMGALQPGLPSPVAVPKGWEIIIIDLQDCFFNIKLHPEDCKRFAFSVPSPNFKRPYQRFQWKVLPQGMKNSPTLCQKFVDKAILTVRDKYQDSYIVHYMDDILLAHPSRSIVDEILTSMIQALNKHGLVVSTEKIQKYDNLKYLGTHIQGDSVSYQKLQIRTDKLRTLNDFQKLLGNINWIRPFLKLTTGELKPLFEILNGDSNPISTRKLTPEACKALQLMNERLSTARVKRLDLSQPWSLCILKTEYTPTACLWQDGVVEWIHLPHISPKVITPYDIFCTQLIIKGRHRSKELFSKDPDYIVVPYTKVQFDLLLQEKEDWPISLLGFLGEVHFHLPKDPLLTFTLQTAIIFPHMTSTTPLEKGIVIFTDGSANGRSVTYIQGREPIIKENTQNTAQQAEIVAVITAFEEVSQPFNLYTDSKYVTGLFPEIETATLSPRTKIYTELKHLQRLIHKRQEKFYIGHIRGHTGLPGPLAQGNAYADSLTRILTAAGKRTADGSEFEKRTADGSEFESPKKKAKVE

SEQ ID NO: 3262 - protein, 2114 aa, synthetic construct
MPAAKRVKLDGGDKKYSIGLDIGTNSVGWAVITDEYKVPSKKFKVLGNTDRHSIKKNLIGALLFDSGETAEATRLKRTARRRYTRRKNRICYLQEIFSNEMAKVDDSFFHRLEESFLVEEDKKHERHPIFGNIVDEVAYHEKYPTIYHLRKKLVDSTDKADLRLIYLALAHMIKFRGHFLIEGDLNPDNSDVDKLFIQLVQTYNQLFEENPINASGVDAKAILSARLSKSRRLENLIAQLPGEKKNGLFGNLIALSLGLTPNFKSNFDLAEDAKLQLSKDTYDDDLDNLLAQIGDQYADLFLAAKNLSDAILLSDILRVNTEITKAPLSASMIKRYDEHHQDLTLLKALVRQQLPEKYKEIFFDQSKNGYAGYIDGGASQEEFYKFIKPILEKMDGTEELLVKLNREDLLRKQRTFDNGSIPHQIHLGELHAILRRQEDFYPFLKDNREKIEKILTFRIPYYVGPLARGNSRFAWMTRKSEETITPWNFEEVVDKGASAQSFIERMTNFDKNLPNEKVLPKHSLLYEYFTVYNELTKVKYVTEGMRKPAFLSGEQKKAIVDLLFKTNRKVTVKQLKEDYFKKIECFDSVEISGVEDRFNASLGTYHDLLKIIKDKDFLDNEENEDILEDIVLTLTLFEDREMIEERLKTYAHLFDDKVMKQLKRRRYTGWGRLSRKLINGIRDKQSGKTILDFLKSDGFANRNFMQLIHDDSLTFKEDIQKAQVSGQGDSLHEHIANLAGSPAIKKGILQTVKVVDELVKVMGRHKPENIVIEMARENQTTQKGQKNSRERMKRIEEGIKELGSQILKEHPVENTQLQNEKLYLYYLQNGRDMYVDQELDINRLSDYDVDHIVPQSFLKDDSIDNKVLTRSDKARGKSDNVPSEEVVKKMKNYWRQLLNAKLITQRKFDNLTKAERGGLSELDKAGFIKRQLVETRQITKHVAQILDSRMNTKYDENDKLIREVKVITLKSKLVSDFRKDFQFYKVREINNYHHAHDAYLNAVVGTALIKKYPKLESEFVYGDYKVYDVRKMIAKSEQEIGKATAKYFFYSNIMNFFKTEITLANGEIRKRPLIETNGETGEIVWDKGRDFATVRKVLSMPQVNIVKKTEVQTGGFSKESILPKRNSDKLIARKKDWDPKKYGGFDSPTVAYSVLVVAKVEKGKSKKLKSVKELLGITIMERSSFEKNPIDFLEAKGYKEVKKDLIIKLPKYSLFELENGRKRMLASAGELQKGNELALPSKYVNFLYLASHYEKLKGSPEDNEQKQLFVEQHKHYLDEIIEQISEFSKRVILADANLDKVLSAYNKHRDKPIREQAENIIHLFTLTNLGAPAAFKYFDTTIDRKRYTSTKEVLDATLIHQSITGLYETRIDLSQLGGDGGPAPAPAPAPGGVQEISDSRPMLHIYLNGRRFLGLLDTGADKTCIAGRDWPANWPIHQTESSLQGLGMACGVARSSQPLRWQHEDKSGIIHPFVIPTLPFTLWGRDIMKDIKVRLMTDSPDDSQDLMIGAIESNLFADQISWKSDQPVWLNQWPLKQEKLQALQQLVTEQLQLGHLEESNSPWNTPVFVIKKKSGKWRLLQDLRAVNATMHDMGALQPGLPSPVAVPKGWEIIIIDLQDCFFNIKLHPEDCKRFAFSVPSPNFKRPYQRFQWKVLPQGMKNSPTLCQKFVDKAILTVRDKYQDSYIVHYMDDILLAHPSRSIVDEILTSMIQALNKHGLVVSTEKIQKYDNLKYLGTHIQGDSVSYQKLQIRTDKLRTLNDFQKLLGNINWIRPFLKLTTGELKPLFEILNGDSNPISTRKLTPEACKALQLMNERLSTARVKRLDLSQPWSLCILKTEYTPTACLWQDGVVEWIHLPHISPKVITPYDIFCTQLIIKGRHRSKELFSKDPDYIVVPYTKVQFDLLLQEKEDWPISLLGFLGEVHFHLPKDPLLTFTLQTAIIFPHMTSTTPLEKGIVIFTDGSANGRSVTYIQGREPIIKENTQNTAQQAEIVAVITAFEEVSQPFNLYTDSKYVTGLFPEIETATLSPRTKIYTELKHLQRLIHKRQEKFYIGHIRGHTGLPGPLAQGNAYADSLTRILTAAGKRTADGSEFEKRTADGSEFESPKKKAKVE

SEQ ID NO: 3263 - protein, 2116 aa, synthetic construct; identical to SEQ ID NO: 3146

SEQ ID NO: 3264 - protein, 2114 aa, synthetic construct
MPAAKRVKLDGGDKKYSIGLDIGTNSVGWAVITDEYKVPSKKFKVLGNTDRHSIKKNLIGALLFDSGETAEATRLKRTARRRYTRRKNRICYLQEIFSNEMAKVDDSFFHRLEESFLVEEDKKHERHPIFGNIVDEVAYHEKYPTIYHLRKKLVDSTDKADLRLIYLALAHMIKFRGHFLIEGDLNPDNSDVDKLFIQLVQTYNQLFEENPINASGVDAKAILSARLSKSRRLENLIAQLPGEKKNGLFGNLIALSLGLTPNFKSNFDLAEDAKLQLSKDTYDDDLDNLLAQIGDQYADLFLAAKNLSDAILLSDILRVNTEITKAPLSASMIKRYDEHHQDLTLLKALVRQQLPEKYKEIFFDQSKNGYAGYIDGGASQEEFYKFIKPILEKMDGTEELLVKLNREDLLRKQRTFDNGSIPHQIHLGELHAILRRQEDFYPFLKDNREKIEKILTFRIPYYVGPLARGNSRFAWMTRKSEETITPWNFEEVVDKGASAQSFIERMTNFDKNLPNEKVLPKHSLLYEYFTVYNELTKVKYVTEGMRKPAFLSGEQKKAIVDLLFKTNRKVTVKQLKEDYFKKIECFDSVEISGVEDRFNASLGTYHDLLKIIKDKDFLDNEENEDILEDIVLTLTLFEDREMIEERLKTYAHLFDDKVMKQLKRRRYTGWGRLSRKLINGIRDKQSGKTILDFLKSDGFANRNFMQLIHDDSLTFKEDIQKAQVSGQGDSLHEHIANLAGSPAIKKGILQTVKVVDELVKVMGRHKPENIVIEMARENQTTQKGQKNSRERMKRIEEGIKELGSQILKEHPVENTQLQNEKLYLYYLQNGRDMYVDQELDINRLSDYDVDHIVPQSFLKDDSIDNKVLTRSDKARGKSDNVPSEEVVKKMKNYWRQLLNAKLITQRKFDNLTKAERGGLSELDKAGFIKRQLVETRQITKHVAQILDSRMNTKYDENDKLIREVKVITLKSKLVSDFRKDFQFYKVREINNYHHAHDAYLNAVVGTALIKKYPKLESEFVYGDYKVYDVRKMIAKSEQEIGKATAKYFFYSNIMNFFKTEITLANGEIRKRPLIETNGETGEIVWDKGRDFATVRKVLSMPQVNIVKKTEVQTGGFSKESILPKRNSDKLIARKKDWDPKKYGGFDSPTVAYSVLVVAKVEKGKSKKLKSVKELLGITIMERSSFEKNPIDFLEAKGYKEVKKDLIIKLPKYSLFELENGRKRMLASAGELQKGNELALPSKYVNFLYLASHYEKLKGSPEDNEQKQLFVEQHKHYLDEIIEQISEFSKRVILADANLDKVLSAYNKHRDKPIREQAENIIHLFTLTNLGAPAAFKYFDTTIDRKRYTSTKEVLDATLIHQSITGLYETRIDLSQLGGDGGGSSPAPGGGGGVQEISDSRPMLHIYLNGRRFLGLLDTGADKTCIAGRDWPANWPIHQTESSLQGLGMACGVARSSQPLRWQHEDKSGIIHPFVIPTLPFTLWGRDIMKDIKVRLMTDSPDDSQDLMIGAIESNLFADQISWKSDQPVWLNQWPLKQEKLQALQQLVTEQLQLGHLEESNSPWNTPVFVIKKKSGKWRLLQDLRAVNATMHDMGALQPGLPSPVAVPKGWEIIIIDLQDCFFNIKLHPEDCKRFAFSVPSPNFKRPYQRFQWKVLPQGMKNSPTLCQKFVDKAILTVRDKYQDSYIVHYMDDILLAHPSRSIVDEILTSMIQALNKHGLVVSTEKIQKYDNLKYLGTHIQGDSVSYQKLQIRTDKLRTLNDFQKLLGNINWIRPFLKLTTGELKPLFEILNGDSNPISTRKLTPEACKALQLMNERLSTARVKRLDLSQPWSLCILKTEYTPTACLWQDGVVEWIHLPHISPKVITPYDIFCTQLIIKGRHRSKELFSKDPDYIVVPYTKVQFDLLLQEKEDWPISLLGFLGEVHFHLPKDPLLTFTLQTAIIFPHMTSTTPLEKGIVIFTDGSANGRSVTYIQGREPIIKENTQNTAQQAEIVAVITAFEEVSQPFNLYTDSKYVTGLFPEIETATLSPRTKIYTELKHLQRLIHKRQEKFYIGHIRGHTGLPGPLAQGNAYADSLTRILTAAGKRTADGSEFEKRTADGSEFESPKKKAKVE

SEQ ID NO: 3265 - protein, 2116 aa, synthetic construct
MPAAKRVKLDGGDKKYSIGLDIGTNSVGWAVITDEYKVPSKKFKVLGNTDRHSIKKNLIGALLFDSGETAEATRLKRTARRRYTRRKNRICYLQEIFSNEMAKVDDSFFHRLEESFLVEEDKKHERHPIFGNIVDEVAYHEKYPTIYHLRKKLVDSTDKADLRLIYLALAHMIKFRGHFLIEGDLNPDNSDVDKLFIQLVQTYNQLFEENPINASGVDAKAILSARLSKSRRLENLIAQLPGEKKNGLFGNLIALSLGLTPNFKSNFDLAEDAKLQLSKDTYDDDLDNLLAQIGDQYADLFLAAKNLSDAILLSDILRVNTEITKAPLSASMIKRYDEHHQDLTLLKALVRQQLPEKYKEIFFDQSKNGYAGYIDGGASQEEFYKFIKPILEKMDGTEELLVKLNREDLLRKQRTFDNGSIPHQIHLGELHAILRRQEDFYPFLKDNREKIEKILTFRIPYYVGPLARGNSRFAWMTRKSEETITPWNFEEVVDKGASAQSFIERMTNFDKNLPNEKVLPKHSLLYEYFTVYNELTKVKYVTEGMRKPAFLSGEQKKAIVDLLFKTNRKVTVKQLKEDYFKKIECFDSVEISGVEDRFNASLGTYHDLLKIIKDKDFLDNEENEDILEDIVLTLTLFEDREMIEERLKTYAHLFDDKVMKQLKRRRYTGWGRLSRKLINGIRDKQSGKTILDFLKSDGFANRNFMQLIHDDSLTFKEDIQKAQVSGQGDSLHEHIANLAGSPAIKKGILQTVKVVDELVKVMGRHKPENIVIEMARENQTTQKGQKNSRERMKRIEEGIKELGSQILKEHPVENTQLQNEKLYLYYLQNGRDMYVDQELDINRLSDYDVDHIVPQSFLKDDSIDNKVLTRSDKARGKSDNVPSEEVVKKMKNYWRQLLNAKLITQRKFDNLTKAERGGLSELDKAGFIKRQLVETRQITKHVAQILDSRMNTKYDENDKLIREVKVITLKSKLVSDFRKDFQFYKVREINNYHHAHDAYLNAVVGTALIKKYPKLESEFVYGDYKVYDVRKMIAKSEQEIGKATAKYFFYSNIMNFFKTEITLANGEIRKRPLIETNGETGEIVWDKGRDFATVRKVLSMPQVNIVKKTEVQTGGFSKESILPKRNSDKLIARKKDWDPKKYGGFDSPTVAYSVLVVAKVEKGKSKKLKSVKELLGITIMERSSFEKNPIDFLEAKGYKEVKKDLIIKLPKYSLFELENGRKRMLASAGELQKGNELALPSKYVNFLYLASHYEKLKGSPEDNEQKQLFVEQHKHYLDEIIEQISEFSKRVILADANLDKVLSAYNKHRDKPIREQAENIIHLFTLTNLGAPAAFKYFDTTIDRKRYTSTKEVLDATLIHQSITGLYETRIDLSQLGGDGGGSSEAAAKPAPGGVQEISDSRPMLHIYLNGRRFLGLLDTGADKTCIAGRDWPANWPIHQTESSLQGLGMACGVARSSQPLRWQHEDKSGIIHPFVIPTLPFTLWGRDIMKDIKVRLMTDSPDDSQDLMIGAIESNLFADQISWKSDQPVWLNQWPLKQEKLQALQQLVTEQLQLGHLEESNSPWNTPVFVIKKKSGKWRLLQDLRAVNATMHDMGALQPGLPSPVAVPKGWEIIIIDLQDCFFNIKLHPEDCKRFAFSVPSPNFKRPYQRFQWKVLPQGMKNSPTLCQKFVDKAILTVRDKYQDSYIVHYMDDILLAHPSRSIVDEILTSMIQALNKHGLVVSTEKIQKYDNLKYLGTHIQGDSVSYQKLQIRTDKLRTLNDFQKLLGNINWIRPFLKLTTGELKPLFEILNGDSNPISTRKLTPEACKALQLMNERLSTARVKRLDLSQPWSLCILKTEYTPTACLWQDGVVEWIHLPHISPKVITPYDIFCTQLIIKGRHRSKELFSKDPDYIVVPYTKVQFDLLLQEKEDWPISLLGFLGEVHFHLPKDPLLTFTLQTAIIFPHMTSTTPLEKGIVIFTDGSANGRSVTYIQGREPIIKENTQNTAQQAEIVAVITAFEEVSQPFNLYTDSKYVTGLFPEIETATLSPRTKIYTELKHLQRLIHKRQEKFYIGHIRGHTGLPGPLAQGNAYADSLTRILTAAGKRTADGSEFEKRTADGSEFESPKKKAKVE

SEQ ID NO: 3266 - protein, 2120 aa, synthetic construct
MPAAKRVKLDGGDKKYSIGLDIGTNSVGWAVITDEYKVPSKKFKVLGNTDRHSIKKNLIGALLFDSGETAEATRLKRTARRRYTRRKNRICYLQEIFSNEMAKVDDSFFHRLEESFLVEEDKKHERHPIFGNIVDEVAYHEKYPTIYHLRKKLVDSTDKADLRLIYLALAHMIKFRGHFLIEGDLNPDNSDVDKLFIQLVQTYNQLFEENPINASGVDAKAILSARLSKSRRLENLIAQLPGEKKNGLFGNLIALSLGLTPNFKSNFDLAEDAKLQLSKDTYDDDLDNLLAQIGDQYADLFLAAKNLSDAILLSDILRVNTEITKAPLSASMIKRYDEHHQDLTLLKALVRQQLPEKYKEIFFDQSKNGYAGYIDGGASQEEFYKFIKPILEKMDGTEELLVKLNREDLLRKQRTFDNGSIPHQIHLGELHAILRRQEDFYPFLKDNREKIEKILTFRIPYYVGPLARGNSRFAWMTRKSEETITPWNFEEVVDKGASAQSFIERMTNFDKNLPNEKVLPKHSLLYEYFTVYNELTKVKYVTEGMRKPAFLSGEQKKAIVDLLFKTNRKVTVKQLKEDYFKKIECFDSVEISGVEDRFNASLGTYHDLLKIIKDKDFLDNEENEDILEDIVLTLTLFEDREMIEERLKTYAHLFDDKVMKQLKRRRYTGWGRLSRKLINGIRDKQSGKTILDFLKSDGFANRNFMQLIHDDSLTFKEDIQKAQVSGQGDSLHEHIANLAGSPAIKKGILQTVKVVDELVKVMGRHKPENIVIEMARENQTTQKGQKNSRERMKRIEEGIKELGSQILKEHPVENTQLQNEKLYLYYLQNGRDMYVDQELDINRLSDYDVDHIVPQSFLKDDSIDNKVLTRSDKARGKSDNVPSEEVVKKMKNYWRQLLNAKLITQRKFDNLTKAERGGLSELDKAGFIKRQLVETRQITKHVAQILDSRMNTKYDENDKLIREVKVITLKSKLVSDFRKDFQFYKVREINNYHHAHDAYLNAVVGTALIKKYPKLESEFVYGDYKVYDVRKMIAKSEQEIGKATAKYFFYSNIMNFFKTEITLANGEIRKRPLIETNGETGEIVWDKGRDFATVRKVLSMPQVNIVKKTEVQTGGFSKESILPKRNSDKLIARKKDWDPKKYGGFDSPTVAYSVLVVAKVEKGKSKKLKSVKELLGITIMERSSFEKNPIDFLEAKGYKEVKKDLIIKLPKYSLFELENGRKRMLASAGELQKGNELALPSKYVNFLYLASHYEKLKGSPEDNEQKQLFVEQHKHYLDEIIEQISEFSKRVILADANLDKVLSAYNKHRDKPIREQAENIIHLFTLTNLGAPAAFKYFDTTIDRKRYTSTKEVLDATLIHQSITGLYETRIDLSQLGGDGGGGSGGSGGSGGSGGSGGWVQEISDSRPMLHIYLNGRRFLGLLNTGADKTCIAGRDWPANWPIHQTESSLQGLGMACGVARSSQPLRWQHEDKSGIIHPFVIPTLPFTLWGRDIMKDIKVRLMTDSPDDSQDLMIGAIESNLFADQISWKSDQPVWLNQWPLKQEKLQALQQLVTEQLQLGHLEESNSPWNTPVFVIKKKSGKWRLLQDLRAVNATMHDMGALQPGLPSPVAVPKGWEIIIIDLQDCFFNIKLHPEDCKRFAFSVPSPNFKRPYQRFQWKVLPQGMKNSPTLCQKFVDKAILTVRDKYQDSYIVHYMDDILLAHPSRSIVDEILTSMIQALNKHGLVVSTEKIQKYDNLKYLGTHIQGDSVSYQKLQIRTDKLRTLNDFQKLLGNINWIRPFLKLTTGELKPLFEILNGDSNPISTRKLTPEACKALQLMNERLSTARVKRLDLSQPWSLCILKTEYTPTACLWQDGVVEWIHLPHISPKVITPYDIFCTQLIIKGRHRSKELFSKDPDYIVVPYTKVQFDLLLQEKEDWPISLLGFLGEVHFHLPKDPLLTFTLQTAIIFPHMTSTTPLEKGIVIFTDGSANGRSVTYIQGREPIIKENTQNTAQQAEIVAVITAFEEVSQPFNLYTDSKYVTGLFPEIETATLSPRTKIYTELKHLQRLIHKRQEKFYIGHIRGHTGLPGPLAQGNAYADSLTRILTAGKRTADGSEFEKRTADGSEFESPKKKAKVE

SEQ ID NO: 3267 - protein, 2151 aa, synthetic construct
MPAAKRVKLDGGDKKYSIGLDIGTNSVGWAVITDEYKVPSKKFKVLGNTDRHSIKKNLIGALLFDSGETAEATRLKRTARRRYTRRKNRICYLQEIFSNEMAKVDDSFFHRLEESFLVEEDKKHERHPIFGNIVDEVAYHEKYPTIYHLRKKLVDSTDKADLRLIYLALAHMIKFRGHFLIEGDLNPDNSDVDKLFIQLVQTYNQLFEENPINASGVDAKAILSARLSKSRRLENLIAQLPGEKKNGLFGNLIALSLGLTPNFKSNFDLAEDAKLQLSKDTYDDDLDNLLAQIGDQYADLFLAAKNLSDAILLSDILRVNTEITKAPLSASMIKRYDEHHQDLTLLKALVRQQLPEKYKEIFFDQSKNGYAGYIDGGASQEEFYKFIKPILEKMDGTEELLVKLNREDLLRKQRTFDNGSIPHQIHLGELHAILRRQEDFYPFLKDNREKIEKILTFRIPYYVGPLARGNSRFAWMTRKSEETITPWNFEEVVDKGASAQSFIERMTNFDKNLPNEKVLPKHSLLYEYFTVYNELTKVKYVTEGMRKPAFLSGEQKKAIVDLLFKTNRKVTVKQLKEDYFKKIECFDSVEISGVEDRFNASLGTYHDLLKIIKDKDFLDNEENEDILEDIVLTLTLFEDREMIEERLKTYAHLFDDKVMKQLKRRRYTGWGRLSRKLINGIRDKQSGKTILDFLKSDGFANRNFMQLIHDDSLTFKEDIQKAQVSGQGDSLHEHIANLAGSPAIKKGILQTVKVVDELVKVMGRHKPENIVIEMARENQTTQKGQKNSRERMKRIEEGIKELGSQILKEHPVENTQLQNEKLYLYYLQNGRDMYVDQELDINRLSDYDVDHIVPQSFLKDDSIDNKVLTRSDKARGKSDNVPSEEVVKKMKNYWRQLLNAKLITQRKFDNLTKAERGGLSELDKAGFIKRQLVETRQITKHVAQILDSRMNTKYDENDKLIREVKVITLKSKLVSDFRKDFQFYKVREINNYHHAHDAYLNAVVGTALIKKYPKLESEFVYGDYKVYDVRKMIAKSEQEIGKATAKYFFYSNIMNFFKTEITLANGEIRKRPLIETNGETGEIVWDKGRDFATVRKVLSMPQVNIVKKTEVQTGGFSKESILPKRNSDKLIARKKDWDPKKYGGFDSPTVAYSVLVVAKVEKGKSKKLKSVKELLGITIMERSSFEKNPIDFLEAKGYKEVKKDLIIKLPKYSLFELENGRKRMLASAGELQKGNELALPSKYVNFLYLASHYEKLKGSPEDNEQKQLFVEQHKHYLDEIIEQISEFSKRVILADANLDKVLSAYNKHRDKPIREQAENIIHLFTLTNLGAPAAFKYFDTTIDRKRYTSTKEVLDATLIHQSITGLYETRIDLSQLGGDGGAEAAAKEAAAKEAAAKEAAAKALEAEAAAKEAAAKEAAAKEAAAKAGGWVQEISDSRPMLHIYLNGRRFLGLLNTGADKTCIAGRDWPANWPIHQTESSLQGLGMACGVARSSQPLRWQHEDKSGIIHPFVIPTLPFTLWGRDIMKDIKVRLMTDSPDDSQDLMIGAIESNLFADQISWKSDQPVWLNQWPLKQEKLQALQQLVTEQLQLGHLEESNSPWNTPVFVIKKKSGKWRLLQDLRAVNATMHDMGALQPGLPSPVAVPKGWEIIIIDLQDCFFNIKLHPEDCKRFAFSVPSPNFKRPYQRFQWKVLPQGMKNSPTLCQKFVDKAILTVRDKYQDSYIVHYMDDILLAHPSRSIVDEILTSMIQALNKHGLVVSTEKIQKYDNLKYLGTHIQGDSVSYQKLQIRTDKLRTLNDFQKLLGNINWIRPFLKLTTGELKPLFEILNGDSNPISTRKLTPEACKALQLMNERLSTARVKRLDLSQPWSLCILKTEYTPTACLWQDGVVEWIHLPHISPKVITPYDIFCTQLIIKGRHRSKELFSKDPDYIVVPYTKVQFDLLLQEKEDWPISLLGFLGEVHFHLPKDPLLTFTLQTAIIFPHMTSTTPLEKGIVIFTDGSANGRSVTYIQGREPIIKENTQNTAQQAEIVAVITAFEEVSQPFNLYTDSKYVTGLFPEIETATLSPRTKIYTELKHLQRLIHKRQEKFYIGHIRGHTGLPGPLAQGNAYADSLTRILTAGKRTADGSEFEKRTADGSEFESPKKKAKVE

SEQ ID NO: 3268 - protein, 2135 aa, synthetic construct; identical to SEQ ID NO: 3172

SEQ ID NO: 3269 - protein, 2114 aa, synthetic construct
MPAAKRVKLDGGDKKYSIGLDIGTNSVGWAVITDEYKVPSKKFKVLGNTDRHSIKKNLIGALLFDSGETAEATRLKRTARRRYTRRKNRICYLQEIFSNEMAKVDDSFFHRLEESFLVEEDKKHERHPIFGNIVDEVAYHEKYPTIYHLRKKLVDSTDKADLRLIYLALAHMIKFRGHFLIEGDLNPDNSDVDKLFIQLVQTYNQLFEENPINASGVDAKAILSARLSKSRRLENLIAQLPGEKKNGLFGNLIALSLGLTPNFKSNFDLAEDAKLQLSKDTYDDDLDNLLAQIGDQYADLFLAAKNLSDAILLSDILRVNTEITKAPLSASMIKRYDEHHQDLTLLKALVRQQLPEKYKEIFFDQSKNGYAGYIDGGASQEEFYKFIKPILEKMDGTEELLVKLNREDLLRKQRTFDNGSIPHQIHLGELHAILRRQEDFYPFLKDNREKIEKILTFRIPYYVGPLARGNSRFAWMTRKSEETITPWNFEEVVDKGASAQSFIERMTNFDKNLPNEKVLPKHSLLYEYFTVYNELTKVKYVTEGMRKPAFLSGEQKKAIVDLLFKTNRKVTVKQLKEDYFKKIECFDSVEISGVEDRFNASLGTYHDLLKIIKDKDFLDNEENEDILEDIVLTLTLFEDREMIEERLKTYAHLFDDKVMKQLKRRRYTGWGRLSRKLINGIRDKQSGKTILDFLKSDGFANRNFMQLIHDDSLTFKEDIQKAQVSGQGDSLHEHIANLAGSPAIKKGILQTVKVVDELVKVMGRHKPENIVIEMARENQTTQKGQKNSRERMKRIEEGIKELGSQILKEHPVENTQLQNEKLYLYYLQNGRDMYVDQELDINRLSDYDVDHIVPQSFLKDDSIDNKVLTRSDKARGKSDNVPSEEVVKKMKNYWRQLLNAKLITQRKFDNLTKAERGGLSELDKAGFIKRQLVETRQITKHVAQILDSRMNTKYDENDKLIREVKVITLKSKLVSDFRKDFQFYKVREINNYHHAHDAYLNAVVGTALIKKYPKLESEFVYGDYKVYDVRKMIAKSEQEIGKATAKYFFYSNIMNFFKTEITLANGEIRKRPLIETNGETGEIVWDKGRDFATVRKVLSMPQVNIVKKTEVQTGGFSKESILPKRNSDKLIARKKDWDPKKYGGFDSPTVAYSVLVVAKVEKGKSKKLKSVKELLGITIMERSSFEKNPIDFLEAKGYKEVKKDLIIKLPKYSLFELENGRKRMLASAGELQKGNELALPSKYVNFLYLASHYEKLKGSPEDNEQKQLFVEQHKHYLDEIIEQISEFSKRVILADANLDKVLSAYNKHRDKPIREQAENIIHLFTLTNLGAPAAFKYFDTTIDRKRYTSTKEVLDATLIHQSITGLYETRIDLSQLGGDGGGGSGGGGSSGGWVQEISDSRPMLHIYLNGRRFLGLLNTGADKTCIAGRDWPANWPIHQTESSLQGLGMACGVARSSQPLRWQHEDKSGIIHPFVIPTLPFTLWGRDIMKDIKVRLMTDSPDDSQDLMIGAIESNLFADQISWKSDQPVWLNQWPLKQEKLQALQQLVTEQLQLGHLEESNSPWNTPVFVIKKKSGKWRLLQDLRAVNATMHDMGALQPGLPSPVAVPKGWEIIIIDLQDCFFNIKLHPEDCKRFAFSVPSPNFKRPYQRFQWKVLPQGMKNSPTLCQKFVDKAILTVRDKYQDSYIVHYMDDILLAHPSRSIVDEILTSMIQALNKHGLVVSTEKIQKYDNLKYLGTHIQGDSVSYQKLQIRTDKLRTLNDFQKLLGNINWIRPFLKLTTGELKPLFEILNGDSNPISTRKLTPEACKALQLMNERLSTARVKRLDLSQPWSLCILKTEYTPTACLWQDGVVEWIHLPHISPKVITPYDIFCTQLIIKGRHRSKELFSKDPDYIVVPYTKVQFDLLLQEKEDWPISLLGFLGEVHFHLPKDPLLTFTLQTAIIFPHMTSTTPLEKGIVIFTDGSANGRSVTYIQGREPIIKENTQNTAQQAEIVAVITAFEEVSQPFNLYTDSKYVTGLFPEIETATLSPRTKIYTELKHLQRLIHKRQEKFYIGHIRGHTGLPGPLAQGNAYADSLTRILTAGKRTADGSEFEKRTADGSEFESPKKKAKVE

SEQ ID NO: 3270 - protein, 2116 aa, synthetic construct; identical to SEQ ID NO: 3181

SEQ ID NO: 3271 - protein, 2116 aa, synthetic construct
MPAAKRVKLDGGDKKYSIGLDIGTNSVGWAVITDEYKVPSKKFKVLGNTDRHSIKKNLIGALLFDSGETAEATRLKRTARRRYTRRKNRICYLQEIFSNEMAKVDDSFFHRLEESFLVEEDKKHERHPIFGNIVDEVAYHEKYPTIYHLRKKLVDSTDKADLRLIYLALAHMIKFRGHFLIEGDLNPDNSDVDKLFIQLVQTYNQLFEENPINASGVDAKAILSARLSKSRRLENLIAQLPGEKKNGLFGNLIALSLGLTPNFKSNFDLAEDAKLQLSKDTYDDDLDNLLAQIGDQYADLFLAAKNLSDAILLSDILRVNTEITKAPLSASMIKRYDEHHQDLTLLKALVRQQLPEKYKEIFFDQSKNGYAGYIDGGASQEEFYKFIKPILEKMDGTEELLVKLNREDLLRKQRTFDNGSIPHQIHLGELHAILRRQEDFYPFLKDNREKIEKILTFRIPYYVGPLARGNSRFAWMTRKSEETITPWNFEEVVDKGASAQSFIERMTNFDKNLPNEKVLPKHSLLYEYFTVYNELTKVKYVTEGMRKPAFLSGEQKKAIVDLLFKTNRKVTVKQLKEDYFKKIECFDSVEISGVEDRFNASLGTYHDLLKIIKDKDFLDNEENEDILEDIVLTLTLFEDREMIEERLKTYAHLFDDKVMKQLKRRRYTGWGRLSRKLINGIRDKQSGKTILDFLKSDGFANRNFMQLIHDDSLTFKEDIQKAQVSGQGDSLHEHIANLAGSPAIKKGILQTVKVVDELVKVMGRHKPENIVIEMARENQTTQKGQKNSRERMKRIEEGIKELGSQILKEHPVENTQLQNEKLYLYYLQNGRDMYVDQELDINRLSDYDVDHIVPQSFLKDDSIDNKVLTRSDKARGKSDNVPSEEVVKKMKNYWRQLLNAKLITQRKFDNLTKAERGGLSELDKAGFIKRQLVETRQITKHVAQILDSRMNTKYDENDKLIREVKVITLKSKLVSDFRKDFQFYKVREINNYHHAHDAYLNAVVGTALIKKYPKLESEFVYGDYKVYDVRKMIAKSEQEIGKATAKYFFYSNIMNFFKTEITLANGEIRKRPLIETNGETGEIVWDKGRDFATVRKVLSMPQVNIVKKTEVQTGGFSKESILPKRNSDKLIARKKDWDPKKYGGFDSPTVAYSVLVVAKVEKGKSKKLKSVKELLGITIMERSSFEKNPIDFLEAKGYKEVKKDLIIKLPKYSLFELENGRKRMLASAGELQKGNELALPSKYVNFLYLASHYEKLKGSPEDNEQKQLFVEQHKHYLDEIIEQISEFSKRVILADANLDKVLSAYNKHRDKPIREQAENIIHLFTLTNLGAPAAFKYFDTTIDRKRYTSTKEVLDATLIHQSITGLYETRIDLSQLGGDGGEAAAKGSSGGGGGWVQEISDSRPMLHIYLNGRRFLGLLNTGADKTCIAGRDWPANWPIHQTESSLQGLGMACGVARSSQPLRWQHEDKSGIIHPFVIPTLPFTLWGRDIMKDIKVRLMTDSPDDSQDLMIGAIESNLFADQISWKSDQPVWLNQWPLKQEKLQALQQLVTEQLQLGHLEESNSPWNTPVFVIKKKSGKWRLLQDLRAVNATMHDMGALQPGLPSPVAVPKGWEIIIIDLQDCFFNIKLHPEDCKRFAFSVPSPNFKRPYQRFQWKVLPQGMKNSPTLCQKFVDKAILTVRDKYQDSYIVHYMDDILLAHPSRSIVDEILTSMIQALNKHGLVVSTEKIQKYDNLKYLGTHIQGDSVSYQKLQIRTDKLRTLNDFQKLLGNINWIRPFLKLTTGELKPLFEILNGDSNPISTRKLTPEACKALQLMNERLSTARVKRLDLSQPWSLCILKTEYTPTACLWQDGVVEWIHLPHISPKVITPYDIFCTQLIIKGRHRSKELFSKDPDYIVVPYTKVQFDLLLQEKEDWPISLLGFLGEVHFHLPKDPLLTFTLQTAIIFPHMTSTTPLEKGIVIFTDGSANGRSVTYIQGREPIIKENTQNTAQQAEIVAVITAFEEVSQPFNLYTDSKYVTGLFPEIETATLSPRTKIYTELKHLQRLIHKRQEKFYIGHIRGHTGLPGPLAQGNAYADSLTRILTAGKRTADGSEFEKRTADGSEFESPKKKAKVE

SEQ ID NO: 3272 - protein, 2114 aa, synthetic construct
MPAAKRVKLDGGDKKYSIGLDIGTNSVGWAVITDEYKVPSKKFKVLGNTDRHSIKKNLIGALLFDSGETAEATRLKRTARRRYTRRKNRICYLQEIFSNEMAKVDDSFFHRLEESFLVEEDKKHERHPIFGNIVDEVAYHEKYPTIYHLRKKLVDSTDKADLRLIYLALAHMIKFRGHFLIEGDLNPDNSDVDKLFIQLVQTYNQLFEENPINASGVDAKAILSARLSKSRRLENLIAQLPGEKKNGLFGNLIALSLGLTPNFKSNFDLAEDAKLQLSKDTYDDDLDNLLAQIGDQYADLFLAAKNLSDAILLSDILRVNTEITKAPLSASMIKRYDEHHQDLTLLKALVRQQLPEKYKEIFFDQSKNGYAGYIDGGASQEEFYKFIKPILEKMDGTEELLVKLNREDLLRKQRTFDNGSIPHQIHLGELHAILRRQEDFYPFLKDNREKIEKILTFRIPYYVGPLARGNSRFAWMTRKSEETITPWNFEEVVDKGASAQSFIERMTNFDKNLPNEKVLPKHSLLYEYFTVYNELTKVKYVTEGMRKPAFLSGEQKKAIVDLLFKTNRKVTVKQLKEDYFKKIECFDSVEISGVEDRFNASLGTYHDLLKIIKDKDFLDNEENEDILEDIVLTLTLFEDREMIEERLKTYAHLFDDKVMKQLKRRRYTGWGRLSRKLINGIRDKQSGKTILDFLKSDGFANRNFMQLIHDDSLTFKEDIQKAQVSGQGDSLHEHIANLAGSPAIKKGILQTVKVVDELVKVMGRHKPENIVIEMARENQTTQKGQKNSRERMKRIEEGIKELGSQILKEHPVENTQLQNEKLYLYYLQNGRDMYVDQELDINRLSDYDVDHIVPQSFLKDDSIDNKVLTRSDKARGKSDNVPSEEVVKKMKNYWRQLLNAKLITQRKFDNLTKAERGGLSELDKAGFIKRQLVETRQITKHVAQILDSRMNTKYDENDKLIREVKVITLKSKLVSDFRKDFQFYKVREINNYHHAHDAYLNAVVGTALIKKYPKLESEFVYGDYKVYDVRKMIAKSEQEIGKATAKYFFYSNIMNFFKTEITLANGEIRKRPLIETNGETGEIVWDKGRDFATVRKVLSMPQVNIVKKTEVQTGGFSKESILPKRNSDKLIARKKDWDPKKYGGFDSPTVAYSVLVVAKVEKGKSKKLKSVKELLGITIMERSSFEKNPIDFLEAKGYKEVKKDLIIKLPKYSLFELENGRKRMLASAGELQKGNELALPSKYVNFLYLASHYEKLKGSPEDNEQKQLFVEQHKHYLDEIIEQISEFSKRVILADANLDKVLSAYNKHRDKPIREQAENIIHLFTLTNLGAPAAFKYFDTTIDRKRYTSTKEVLDATLIHQSITGLYETRIDLSQLGGDGGGGGGGSGSSGGWVQEISDSRPMLHIYLNGRRFLGLLNTGADKTCIAGRDWPANWPIHQTESSLQGLGMACGVARSSQPLRWQHEDKSGIIHPFVIPTLPFTLWGRDIMKDIKVRLMTDSPDDSQDLMIGAIESNLFADQISWKSDQPVWLNQWPLKQEKLQALQQLVTEQLQLGHLEESNSPWNTPVFVIKKKSGKWRLLQDLRAVNATMHDMGALQPGLPSPVAVPKGWEIIIIDLQDCFFNIKLHPEDCKRFAFSVPSPNFKRPYQRFQWKVLPQGMKNSPTLCQKFVDKAILTVRDKYQDSYIVHYMDDILLAHPSRSIVDEILTSMIQALNKHGLVVSTEKIQKYDNLKYLGTHIQGDSVSYQKLQIRTDKLRTLNDFQKLLGNINWIRPFLKLTTGELKPLFEILNGDSNPISTRKLTPEACKALQLMNERLSTARVKRLDLSQPWSLCILKTEYTPTACLWQDGVVEWIHLPHISPKVITPYDIFCTQLIIKGRHRSKELFSKDPDYIVVPYTKVQFDLLLQEKEDWPISLLGFLGEVHFHLPKDPLLTFTLQTAIIFPHMTSTTPLEKGIVIFTDGSANGRSVTYIQGREPIIKENTQNTAQQAEIVAVITAFEEVSQPFNLYTDSKYVTGLFPEIETATLSPRTKIYTELKHLQRLIHKRQEKFYIGHIRGHTGLPGPLAQGNAYADSLTRILTAGKRTADGSEFEKRTADGSEFESPKKKAKVE

SEQ ID NO: 3273 - protein, 2116 aa, synthetic construct
MPAAKRVKLDGGDKKYSIGLDIGTNSVGWAVITDEYKVPSKKFKVLGNTDRHSIKKNLIGALLFDSGETAEATRLKRTARRRYTRRKNRICYLQEIFSNEMAKVDDSFFHRLEESFLVEEDKKHERHPIFGNIVDEVAYHEKYPTIYHLRKKLVDSTDKADLRLIYLALAHMIKFRGHFLIEGDLNPDNSDVDKLFIQLVQTYNQLFEENPINASGVDAKAILSARLSKSRRLENLIAQLPGEKKNGLFGNLIALSLGLTPNFKSNFDLAEDAKLQLSKDTYDDDLDNLLAQIGDQYADLFLAAKNLSDAILLSDILRVNTEITKAPLSASMIKRYDEHHQDLTLLKALVRQQLPEKYKEIFFDQSKNGYAGYIDGGASQEEFYKFIKPILEKMDGTEELLVKLNREDLLRKQRTFDNGSIPHQIHLGELHAILRRQEDFYPFLKDNREKIEKILTFRIPYYVGPLARGNSRFAWMTRKSEETITPWNFEEVVDKGASAQSFIERMTNFDKNLPNEKVLPKHSLLYEYFTVYNELTKVKYVTEGMRKPAFLSGEQKKAIVDLLFKTNRKVTVKQLKEDYFKKIECFDSVEISGVEDRFNASLGTYHDLLKIIKDKDFLDNEENEDILEDIVLTLTLFEDREMIEERLKTYAHLFDDKVMKQLKRRRYTGWGRLSRKLINGIRDKQSGKTILDFLKSDGFANRNFMQLIHDDSLTFKEDIQKAQVSGQGDSLHEHIANLAGSPAIKKGILQTVKVVDELVKVMGRHKPENIVIEMARENQTTQKGQKNSRERMKRIEEGIKELGSQILKEHPVENTQLQNEKLYLYYLQNGRDMYVDQELDINRLSDYDVDHIVPQSFLKDDSIDNKVLTRSDKARGKSDNVPSEEVVKKMKNYWRQLLNAKLITQRKFDNLTKAERGGLSELDKAGFIKRQLVETRQITKHVAQILDSRMNTKYDENDKLIREVKVITLKSKLVSDFRKDFQFYKVREINNYHHAHDAYLNAVVGTALIKKYPKLESEFVYGDYKVYDVRKMIAKSEQEIGKATAKYFFYSNIMNFFKTEITLANGEIRKRPLIETNGETGEIVWDKGRDFATVRKVLSMPQVNIVKKTEVQTGGFSKESILPKRNSDKLIARKKDWDPKKYGGFDSPTVAYSVLVVAKVEKGKSKKLKSVKELLGITIMERSSFEKNPIDFLEAKGYKEVKKDLIIKLPKYSLFELENGRKRMLASAGELQKGNELALPSKYVNFLYLASHYEKLKGSPEDNEQKQLFVEQHKHYLDEIIEQISEFSKRVILADANLDKVLSAYNKHRDKPIREQAENIIHLFTLTNLGAPAAFKYFDTTIDRKRYTSTKEVLDATLIHQSITGLYETRIDLSQLGGDGGEAAAKGGGPAPGGWVQEISDSRPMLHIYLNGRRFLGLLNTGADKTCIAGRDWPANWPIHQTESSLQGLGMACGVARSSQPLRWQHEDKSGIIHPFVIPTLPFTLWGRDIMKDIKVRLMTDSPDDSQDLMIGAIESNLFADQISWKSDQPVWLNQWPLKQEKLQALQQLVTEQLQLGHLEESNSPWNTPVFVIKKKSGKWRLLQDLRAVNATMHDMGALQPGLPSPVAVPKGWEIIIIDLQDCFFNIKLHPEDCKRFAFSVPSPNFKRPYQRFQWKVLPQGMKNSPTLCQKFVDKAILTVRDKYQDSYIVHYMDDILLAHPSRSIVDEILTSMIQALNKHGLVVSTEKIQKYDNLKYLGTHIQGDSVSYQKLQIRTDKLRTLNDFQKLLGNINWIRPFLKLTTGELKPLFEILNGDSNPISTRKLTPEACKALQLMNERLSTARVKRLDLSQPWSLCILKTEYTPTACLWQDGVVEWIHLPHISPKVITPYDIFCTQLIIKGRHRSKELFSKDPDYIVVPYTKVQFDLLLQEKEDWPISLLGFLGEVHFHLPKDPLLTFTLQTAIIFPHMTSTTPLEKGIVIFTDGSANGRSVTYIQGREPIIKENTQNTAQQAEIVAVITAFEEVSQPFNLYTDSKYVTGLFPEIETATLSPRTKIYTELKHLQRLIHKRQEKFYIGHIRGHTGLPGPLAQGNAYADSLTRILTAGKRTADGSEFEKRTADGSEFESPKKKAKVE

SEQ ID NO: 3274 - protein, 2116 aa, synthetic construct
MPAAKRVKLDGGDKKYSIGLDIGTNSVGWAVITDEYKVPSKKFKVLGNTDRHSIKKNLIGALLFDSGETAEATRLKRTARRRYTRRKNRICYLQEIFSNEMAKVDDSFFHRLEESFLVEEDKKHERHPIFGNIVDEVAYHEKYPTIYHLRKKLVDSTDKADLRLIYLALAHMIKFRGHFLIEGDLNPDNSDVDKLFIQLVQTYNQLFEENPINASGVDAKAILSARLSKSRRLENLIAQLPGEKKNGLFGNLIALSLGLTPNFKSNFDLAEDAKLQLSKDTYDDDLDNLLAQIGDQYADLFLAAKNLSDAILLSDILRVNTEITKAPLSASMIKRYDEHHQDLTLLKALVRQQLPEKYKEIFFDQSKNGYAGYIDGGASQEEFYKFIKPILEKMDGTEELLVKLNREDLLRKQRTFDNGSIPHQIHLGELHAILRRQEDFYPFLKDNREKIEKILTFRIPYYVGPLARGNSRFAWMTRKSEETITPWNFEEVVDKGASAQSFIERMTNFDKNLPNEKVLPKHSLLYEYFTVYNELTKVKYVTEGMRKPAFLSGEQKKAIVDLLFKTNRKVTVKQLKEDYFKKIECFDSVEISGVEDRFNASLGTYHDLLKIIKDKDFLDNEENEDILEDIVLTLTLFEDREMIEERLKTYAHLFDDKVMKQLKRRRYTGWGRLSRKLINGIRDKQSGKTILDFLKSDGFANRNFMQLIHDDSLTFKEDIQKAQVSGQGDSLHEHIANLAGSPAIKKGILQTVKVVDELVKVMGRHKPENIVIEMARENQTTQKGQKNSRERMKRIEEGIKELGSQILKEHPVENTQLQNEKLYLYYLQNGRDMYVDQELDINRLSDYDVDHIVPQSFLKDDSIDNKVLTRSDKARGKSDNVPSEEVVKKMKNYWRQLLNAKLITQRKFDNLTKAERGGLSELDKAGFIKRQLVETRQITKHVAQILDSRMNTKYDENDKLIREVKVITLKSKLVSDFRKDFQFYKVREINNYHHAHDAYLNAVVGTALIKKYPKLESEFVYGDYKVYDVRKMIAKSEQEIGKATAKYFFYSNIMNFFKTEITLANGEIRKRPLIETNGETGEIVWDKGRDFATVRKVLSMPQVNIVKKTEVQTGGFSKESILPKRNSDKLIARKKDWDPKKYGGFDSPTVAYSVLVVAKVEKGKSKKLKSVKELLGITIMERSSFEKNPIDFLEAKGYKEVKKDLIIKLPKYSLFELENGRKRMLASAGELQKGNELALPSKYVNFLYLASHYEKLKGSPEDNEQKQLFVEQHKHYLDEIIEQISEFSKRVILADANLDKVLSAYNKHRDKPIREQAENIIHLFTLTNLGAPAAFKYFDTTIDRKRYTSTKEVLDATLIHQSITGLYETRIDLSQLGGDGGPAPEAAAKGGGGGWVQEISDSRPMLHIYLNGRRFLGLLNTGADKTCIAGRDWPANWPIHQTESSLQGLGMACGVARSSQPLRWQHEDKSGIIHPFVIPTLPFTLWGRDIMKDIKVRLMTDSPDDSQDLMIGAIESNLFADQISWKSDQPVWLNQWPLKQEKLQALQQLVTEQLQLGHLEESNSPWNTPVFVIKKKSGKWRLLQDLRAVNATMHDMGALQPGLPSPVAVPKGWEIIIIDLQDCFFNIKLHPEDCKRFAFSVPSPNFKRPYQRFQWKVLPQGMKNSPTLCQKFVDKAILTVRDKYQDSYIVHYMDDILLAHPSRSIVDEILTSMIQALNKHGLVVSTEKIQKYDNLKYLGTHIQGDSVSYQKLQIRTDKLRTLNDFQKLLGNINWIRPFLKLTTGELKPLFEILNGDSNPISTRKLTPEACKALQLMNERLSTARVKRLDLSQPWSLCILKTEYTPTACLWQDGVVEWIHLPHISPKVITPYDIFCTQLIIKGRHRSKELFSKDPDYIVVPYTKVQFDLLLQEKEDWPISLLGFLGEVHFHLPKDPLLTFTLQTAIIFPHMTSTTPLEKGIVIFTDGSANGRSVTYIQGREPIIKENTQNTAQQAEIVAVITAFEEVSQPFNLYTDSKYVTGLFPEIETATLSPRTKIYTELKHLQRLIHKRQEKFYIGHIRGHTGLPGPLAQGNAYADSLTRILTAGKRTADGSEFEKRTADGSEFESPKKKAKVE

SEQ ID NO: 3275 - protein, 2114 aa, synthetic construct
MPAAKRVKLDGGDKKYSIGLDIGTNSVGWAVITDEYKVPSKKFKVLGNTDRHSIKKNLIGALLFDSGETAEATRLKRTARRRYTRRKNRICYLQEIFSNEMAKVDDSFFHRLEESFLVEEDKKHERHPIFGNIVDEVAYHEKYPTIYHLRKKLVDSTDKADLRLIYLALAHMIKFRGHFLIEGDLNPDNSDVDKLFIQLVQTYNQLFEENPINASGVDAKAILSARLSKSRRLENLIAQLPGEKKNGLFGNLIALSLGLTPNFKSNFDLAEDAKLQLSKDTYDDDLDNLLAQIGDQYADLFLAAKNLSDAILLSDILRVNTEITKAPLSASMIKRYDEHHQDLTLLKALVRQQLPEKYKEIFFDQSKNGYAGYIDGGASQEEFYKFIKPILEKMDGTEELLVKLNREDLLRKQRTFDNGSIPHQIHLGELHAILRRQEDFYPFLKDNREKIEKILTFRIPYYVGPLARGNSRFAWMTRKSEETITPWNFEEVVDKGASAQSFIERMTNFDKNLPNEKVLPKHSLLYEYFTVYNELTKVKYVTEGMRKPAFLSGEQKKAIVDLLFKTNRKVTVKQLKEDYFKKIECFDSVEISGVEDRFNASLGTYHDLLKIIKDKDFLDNEENEDILEDIVLTLTLFEDREMIEERLKTYAHLFDDKVMKQLKRRRYTGWGRLSRKLINGIRDKQSGKTILDFLKSDGFANRNFMQLIHDDSLTFKEDIQKAQVSGQGDSLHEHIANLAGSPAIKKGILQTVKVVDELVKVMGRHKPENIVIEMARENQTTQKGQKNSRERMKRIEEGIKELGSQILKEHPVENTQLQNEKLYLYYLQNGRDMYVDQELDINRLSDYDVDHIVPQSFLKDDSIDNKVLTRSDKARGKSDNVPSEEVVKKMKNYWRQLLNAKLITQRKFDNLTKAERGGLSELDKAGFIKRQLVETRQITKHVAQILDSRMNTKYDENDKLIREVKVITLKSKLVSDFRKDFQFYKVREINNYHHAHDAYLNAVVGTALIKKYPKLESEFVYGDYKVYDVRKMIAKSEQEIGKATAKYFFYSNIMNFFKTEITLANGEIRKRPLIETNGETGEIVWDKGRDFATVRKVLSMPQVNIVKKTEVQTGGFSKESILPKRNSDKLIARKKDWDPKKYGGFDSPTVAYSVLVVAKVEKGKSKKLKSVKELLGITIMERSSFEKNPIDFLEAKGYKEVKKDLIIKLPKYSLFELENGRKRMLASAGELQKGNELALPSKYVNFLYLASHYEKLKGSPEDNEQKQLFVEQHKHYLDEIIEQISEFSKRVILADANLDKVLSAYNKHRDKPIREQAENIIHLFTLTNLGAPAAFKYFDTTIDRKRYTSTKEVLDATLIHQSITGLYETRIDLSQLGGDGGGGGPAPGGSGGWVQEISDSRPMLHIYLNGRRFLGLLNTGADKTCIAGRDWPANWPIHQTESSLQGLGMACGVARSSQPLRWQHEDKSGIIHPFVIPTLPFTLWGRDIMKDIKVRLMTDSPDDSQDLMIGAIESNLFADQISWKSDQPVWLNQWPLKQEKLQALQQLVTEQLQLGHLEESNSPWNTPVFVIKKKSGKWRLLQDLRAVNATMHDMGALQPGLPSPVAVPKGWEIIIIDLQDCFFNIKLHPEDCKRFAFSVPSPNFKRPYQRFQWKVLPQGMKNSPTLCQKFVDKAILTVRDKYQDSYIVHYMDDILLAHPSRSIVDEILTSMIQALNKHGLVVSTEKIQKYDNLKYLGTHIQGDSVSYQKLQIRTDKLRTLNDFQKLLGNINWIRPFLKLTTGELKPLFEILNGDSNPISTRKLTPEACKALQLMNERLSTARVKRLDLSQPWSLCILKTEYTPTACLWQDGVVEWIHLPHISPKVITPYDIFCTQLIIKGRHRSKELFSKDPDYIVVPYTKVQFDLLLQEKEDWPISLLGFLGEVHFHLPKDPLLTFTLQTAIIFPHMTSTTPLEKGIVIFTDGSANGRSVTYIQGREPIIKENTQNTAQQAEIVAVITAFEEVSQPFNLYTDSKYVTGLFPEIETATLSPRTKIYTELKHLQRLIHKRQEKFYIGHIRGHTGLPGPLAQGNAYADSLTRILTAGKRTADGSEFEKRTADGSEFESPKKKAKVE

SEQ ID NO: 3276 - protein, 2114 aa, synthetic construct
MPAAKRVKLDGGDKKYSIGLDIGTNSVGWAVITDEYKVPSKKFKVLGNTDRHSIKKNLIGALLFDSGETAEATRLKRTARRRYTRRKNRICYLQEIFSNEMAKVDDSFFHRLEESFLVEEDKKHERHPIFGNIVDEVAYHEKYPTIYHLRKKLVDSTDKADLRLIYLALAHMIKFRGHFLIEGDLNPDNSDVDKLFIQLVQTYNQLFEENPINASGVDAKAILSARLSKSRRLENLIAQLPGEKKNGLFGNLIALSLGLTPNFKSNFDLAEDAKLQLSKDTYDDDLDNLLAQIGDQYADLFLAAKNLSDAILLSDILRVNTEITKAPLSASMIKRYDEHHQDLTLLKALVRQQLPEKYKEIFFDQSKNGYAGYIDGGASQEEFYKFIKPILEKMDGTEELLVKLNREDLLRKQRTFDNGSIPHQIHLGELHAILRRQEDFYPFLKDNREKIEKILTFRIPYYVGPLARGNSRFAWMTRKSEETITPWNFEEVVDKGASAQSFIERMTNFDKNLPNEKVLPKHSLLYEYFTVYNELTKVKYVTEGMRKPAFLSGEQKKAIVDLLFKTNRKVTVKQLKEDYFKKIECFDSVEISGVEDRFNASLGTYHDLLKIIKDKDFLDNEENEDILEDIVLTLTLFEDREMIEERLKTYAHLFDDKVMKQLKRRRYTGWGRLSRKLINGIRDKQSGKTILDFLKSDGFANRNFMQLIHDDSLTFKEDIQKAQVSGQGDSLHEHIANLAGSPAIKKGILQTVKVVDELVKVMGRHKPENIVIEMARENQTTQKGQKNSRERMKRIEEGIKELGSQILKEHPVENTQLQNEKLYLYYLQNGRDMYVDQELDINRLSDYDVDHIVPQSFLKDDSIDNKVLTRSDKARGKSDNVPSEEVVKKMKNYWRQLLNAKLITQRKFDNLTKAERGGLSELDKAGFIKRQLVETRQITKHVAQILDSRMNTKYDENDKLIREVKVITLKSKLVSDFRKDFQFYKVREINNYHHAHDAYLNAVVGTALIKKYPKLESEFVYGDYKVYDVRKMIAKSEQEIGKATAKYFFYSNIMNFFKTEITLANGEIRKRPLIETNGETGEIVWDKGRDFATVRKVLSMPQVNIVKKTEVQTGGFSKESILPKRNSDKLIARKKDWDPKKYGGFDSPTVAYSVLVVAKVEKGKSKKLKSVKELLGITIMERSSFEKNPIDFLEAKGYKEVKKDLIIKLPKYSLFELENGRKRMLASAGELQKGNELALPSKYVNFLYLASHYEKLKGSPEDNEQKQLFVEQHKHYLDEIIEQISEFSKRVILADANLDKVLSAYNKHRDKPIREQAENIIHLFTLTNLGAPAAFKYFDTTIDRKRYTSTKEVLDATLIHQSITGLYETRIDLSQLGGDGGGGSGGGPAPGGWVQEISDSRPMLHIYLNGRRFLGLLNTGADKTCIAGRDWPANWPIHQTESSLQGLGMACGVARSSQPLRWQHEDKSGIIHPFVIPTLPFTLWGRDIMKDIKVRLMTDSPDDSQDLMIGAIESNLFADQISWKSDQPVWLNQWPLKQEKLQALQQLVTEQLQLGHLEESNSPWNTPVFVIKKKSGKWRLLQDLRAVNATMHDMGALQPGLPSPVAVPKGWEIIIIDLQDCFFNIKLHPEDCKRFAFSVPSPNFKRPYQRFQWKVLPQGMKNSPTLCQKFVDKAILTVRDKYQDSYIVHYMDDILLAHPSRSIVDEILTSMIQALNKHGLVVSTEKIQKYDNLKYLGTHIQGDSVSYQKLQIRTDKLRTLNDFQKLLGNINWIRPFLKLTTGELKPLFEILNGDSNPISTRKLTPEACKALQLMNERLSTARVKRLDLSQPWSLCILKTEYTPTACLWQDGVVEWIHLPHISPKVITPYDIFCTQLIIKGRHRSKELFSKDPDYIVVPYTKVQFDLLLQEKEDWPISLLGFLGEVHFHLPKDPLLTFTLQTAIIFPHMTSTTPLEKGIVIFTDGSANGRSVTYIQGREPIIKENTQNTAQQAEIVAVITAFEEVSQPFNLYTDSKYVTGLFPEIETATLSPRTKIYTELKHLQRLIHKRQEKFYIGHIRGHTGLPGPLAQGNAYADSLTRILTAGKRTADGSEFEKRTADGSEFESPKKKAKVE

SEQ ID NO: 3277 - protein, 2135 aa, synthetic construct; identical to SEQ ID NO: 3173

SEQ ID NO: 3278 - protein, 2110 aa, synthetic construct
MPAAKRVKLDGGDKKYSIGLDIGTNSVGWAVITDEYKVPSKKFKVLGNTDRHSIKKNLIGALLFDSGETAEATRLKRTARRRYTRRKNRICYLQEIFSNEMAKVDDSFFHRLEESFLVEEDKKHERHPIFGNIVDEVAYHEKYPTIYHLRKKLVDSTDKADLRLIYLALAHMIKFRGHFLIEGDLNPDNSDVDKLFIQLVQTYNQLFEENPINASGVDAKAILSARLSKSRRLENLIAQLPGEKKNGLFGNLIALSLGLTPNFKSNFDLAEDAKLQLSKDTYDDDLDNLLAQIGDQYADLFLAAKNLSDAILLSDILRVNTEITKAPLSASMIKRYDEHHQDLTLLKALVRQQLPEKYKEIFFDQSKNGYAGYIDGGASQEEFYKFIKPILEKMDGTEELLVKLNREDLLRKQRTFDNGSIPHQIHLGELHAILRRQEDFYPFLKDNREKIEKILTFRIPYYVGPLARGNSRFAWMTRKSEETITPWNFEEVVDKGASAQSFIERMTNFDKNLPNEKVLPKHSLLYEYFTVYNELTKVKYVTEGMRKPAFLSGEQKKAIVDLLFKTNRKVTVKQLKEDYFKKIECFDSVEISGVEDRFNASLGTYHDLLKIIKDKDFLDNEENEDILEDIVLTLTLFEDREMIEERLKTYAHLFDDKVMKQLKRRRYTGWGRLSRKLINGIRDKQSGKTILDFLKSDGFANRNFMQLIHDDSLTFKEDIQKAQVSGQGDSLHEHIANLAGSPAIKKGILQTVKVVDELVKVMGRHKPENIVIEMARENQTTQKGQKNSRERMKRIEEGIKELGSQILKEHPVENTQLQNEKLYLYYLQNGRDMYVDQELDINRLSDYDVDHIVPQSFLKDDSIDNKVLTRSDKARGKSDNVPSEEVVKKMKNYWRQLLNAKLITQRKFDNLTKAERGGLSELDKAGFIKRQLVETRQITKHVAQILDSRMNTKYDENDKLIREVKVITLKSKLVSDFRKDFQFYKVREINNYHHAHDAYLNAVVGTALIKKYPKLESEFVYGDYKVYDVRKMIAKSEQEIGKATAKYFFYSNIMNFFKTEITLANGEIRKRPLIETNGETGEIVWDKGRDFATVRKVLSMPQVNIVKKTEVQTGGFSKESILPKRNSDKLIARKKDWDPKKYGGFDSPTVAYSVLVVAKVEKGKSKKLKSVKELLGITIMERSSFEKNPIDFLEAKGYKEVKKDLIIKLPKYSLFELENGRKRMLASAGELQKGNELALPSKYVNFLYLASHYEKLKGSPEDNEQKQLFVEQHKHYLDEIIEQISEFSKRVILADANLDKVLSAYNKHRDKPIREQAENIIHLFTLTNLGAPAAFKYFDTTIDRKRYTSTKEVLDATLIHQSITGLYETRIDLSQLGGDGGEAAAKGGWVQEISDSRPMLHIYLNGRRFLGLLNTGADKTCIAGRDWPANWPIHQTESSLQGLGMACGVARSSQPLRWQHEDKSGIIHPFVIPTLPFTLWGRDIMKDIKVRLMTDSPDDSQDLMIGAIESNLFADQISWKSDQPVWLNQWPLKQEKLQALQQLVTEQLQLGHLEESNSPWNTPVFVIKKKSGKWRLLQDLRAVNATMHDMGALQPGLPSPVAVPKGWEIIIIDLQDCFFNIKLHPEDCKRFAFSVPSPNFKRPYQRFQWKVLPQGMKNSPTLCQKFVDKAILTVRDKYQDSYIVHYMDDILLAHPSRSIVDEILTSMIQALNKHGLVVSTEKIQKYDNLKYLGTHIQGDSVSYQKLQIRTDKLRTLNDFQKLLGNINWIRPFLKLTTGELKPLFEILNGDSNPISTRKLTPEACKALQLMNERLSTARVKRLDLSQPWSLCILKTEYTPTACLWQDGVVEWIHLPHISPKVITPYDIFCTQLIIKGRHRSKELFSKDPDYIVVPYTKVQFDLLLQEKEDWPISLLGFLGEVHFHLPKDPLLTFTLQTAIIFPHMTSTTPLEKGIVIFTDGSANGRSVTYIQGREPIIKENTQNTAQQAEIVAVITAFEEVSQPFNLYTDSKYVTGLFPEIETATLSPRTKIYTELKHLQRLIHKRQEKFYIGHIRGHTGLPGPLAQGNAYADSLTRILTAGKRTADGSEFEKRTADGSEFESPKKKAKVE

SEQ ID NO: 3279 - protein, 2116 aa, synthetic construct
MPAAKRVKLDGGDKKYSIGLDIGTNSVGWAVITDEYKVPSKKFKVLGNTDRHSIKKNLIGALLFDSGETAEATRLKRTARRRYTRRKNRICYLQEIFSNEMAKVDDSFFHRLEESFLVEEDKKHERHPIFGNIVDEVAYHEKYPTIYHLRKKLVDSTDKADLRLIYLALAHMIKFRGHFLIEGDLNPDNSDVDKLFIQLVQTYNQLFEENPINASGVDAKAILSARLSKSRRLENLIAQLPGEKKNGLFGNLIALSLGLTPNFKSNFDLAEDAKLQLSKDTYDDDLDNLLAQIGDQYADLFLAAKNLSDAILLSDILRVNTEITKAPLSASMIKRYDEHHQDLTLLKALVRQQLPEKYKEIFFDQSKNGYAGYIDGGASQEEFYKFIKPILEKMDGTEELLVKLNREDLLRKQRTFDNGSIPHQIHLGELHAILRRQEDFYPFLKDNREKIEKILTFRIPYYVGPLARGNSRFAWMTRKSEETITPWNFEEVVDKGASAQSFIERMTNFDKNLPNEKVLPKHSLLYEYFTVYNELTKVKYVTEGMRKPAFLSGEQKKAIVDLLFKTNRKVTVKQLKEDYFKKIECFDSVEISGVEDRFNASLGTYHDLLKIIKDKDFLDNEENEDILEDIVLTLTLFEDREMIEERLKTYAHLFDDKVMKQLKRRRYTGWGRLSRKLINGIRDKQSGKTILDFLKSDGFANRNFMQLIHDDSLTFKEDIQKAQVSGQGDSLHEHIANLAGSPAIKKGILQTVKVVDELVKVMGRHKPENIVIEMARENQTTQKGQKNSRERMKRIEEGIKELGSQILKEHPVENTQLQNEKLYLYYLQNGRDMYVDQELDINRLSDYDVDHIVPQSFLKDDSIDNKVLTRSDKARGKSDNVPSEEVVKKMKNYWRQLLNAKLITQRKFDNLTKAERGGLSELDKAGFIKRQLVETRQITKHVAQILDSRMNTKYDENDKLIREVKVITLKSKLVSDFRKDFQFYKVREINNYHHAHDAYLNAVVGTALIKKYPKLESEFVYGDYKVYDVRKMIAKSEQEIGKATAKYFFYSNIMNFFKTEITLANGEIRKRPLIETNGETGEIVWDKGRDFATVRKVLSMPQVNIVKKTEVQTGGFSKESILPKRNSDKLIARKKDWDPKKYGGFDSPTVAYSVLVVAKVEKGKSKKLKSVKELLGITIMERSSFEKNPIDFLEAKGYKEVKKDLIIKLPKYSLFELENGRKRMLASAGELQKGNELALPSKYVNFLYLASHYEKLKGSPEDNEQKQLFVEQHKHYLDEIIEQISEFSKRVILADANLDKVLSAYNKHRDKPIREQAENIIHLFTLTNLGAPAAFKYFDTTIDRKRYTSTKEVLDATLIHQSITGLYETRIDLSQLGGDGGGGGGGSEAAAKGGWVQEISDSRPMLHIYLNGRRFLGLLNTGADKTCIAGRDWPANWPIHQTESSLQGLGMACGVARSSQPLRWQHEDKSGIIHPFVIPTLPFTLWGRDIMKDIKVRLMTDSPDDSQDLMIGAIESNLFADQISWKSDQPVWLNQWPLKQEKLQALQQLVTEQLQLGHLEESNSPWNTPVFVIKKKSGKWRLLQDLRAVNATMHDMGALQPGLPSPVAVPKGWEIIIIDLQDCFFNIKLHPEDCKRFAFSVPSPNFKRPYQRFQWKVLPQGMKNSPTLCQKFVDKAILTVRDKYQDSYIVHYMDDILLAHPSRSIVDEILTSMIQALNKHGLVVSTEKIQKYDNLKYLGTHIQGDSVSYQKLQIRTDKLRTLNDFQKLLGNINWIRPFLKLTTGELKPLFEILNGDSNPISTRKLTPEACKALQLMNERLSTARVKRLDLSQPWSLCILKTEYTPTACLWQDGVVEWIHLPHISPKVITPYDIFCTQLIIKGRHRSKELFSKDPDYIVVPYTKVQFDLLLQEKEDWPISLLGFLGEVHFHLPKDPLLTFTLQTAIIFPHMTSTTPLEKGIVIFTDGSANGRSVTYIQGREPIIKENTQNTAQQAEIVAVITAFEEVSQPFNLYTDSKYVTGLFPEIETATLSPRTKIYTELKHLQRLIHKRQEKFYIGHIRGHTGLPGPLAQGNAYADSLTRILTAGKRTADGSEFEKRTADGSEFESPKKKAKVE

SEQ ID NO: 3280 - protein, 2125 aa, synthetic construct; identical to SEQ ID NO: 3193

SEQ ID NO: 3281 - protein, 2120 aa, synthetic construct
MPAAKRVKLDGGDKKYSIGLDIGTNSVGWAVITDEYKVPSKKFKVLGNTDRHSIKKNLIGALLFDSGETAEATRLKRTARRRYTRRKNRICYLQEIFSNEMAKVDDSFFHRLEESFLVEEDKKHERHPIFGNIVDEVAYHEKYPTIYHLRKKLVDSTDKADLRLIYLALAHMIKFRGHFLIEGDLNPDNSDVDKLFIQLVQTYNQLFEENPINASGVDAKAILSARLSKSRRLENLIAQLPGEKKNGLFGNLIALSLGLTPNFKSNFDLAEDAKLQLSKDTYDDDLDNLLAQIGDQYADLFLAAKNLSDAILLSDILRVNTEITKAPLSASMIKRYDEHHQDLTLLKALVRQQLPEKYKEIFFDQSKNGYAGYIDGGASQEEFYKFIKPILEKMDGTEELLVKLNREDLLRKQRTFDNGSIPHQIHLGELHAILRRQEDFYPFLKDNREKIEKILTFRIPYYVGPLARGNSRFAWMTRKSEETITPWNFEEVVDKGASAQSFIERMTNFDKNLPNEKVLPKHSLLYEYFTVYNELTKVKYVTEGMRKPAFLSGEQKKAIVDLLFKTNRKVTVKQLKEDYFKKIECFDSVEISGVEDRFNASLGTYHDLLKIIKDKDFLDNEENEDILEDIVLTLTLFEDREMIEERLKTYAHLFDDKVMKQLKRRRYTGWGRLSRKLINGIRDKQSGKTILDFLKSDGFANRNFMQLIHDDSLTFKEDIQKAQVSGQGDSLHEHIANLAGSPAIKKGILQTVKVVDELVKVMGRHKPENIVIEMARENQTTQKGQKNSRERMKRIEEGIKELGSQILKEHPVENTQLQNEKLYLYYLQNGRDMYVDQELDINRLSDYDVDHIVPQSFLKDDSIDNKVLTRSDKARGKSDNVPSEEVVKKMKNYWRQLLNAKLITQRKFDNLTKAERGGLSELDKAGFIKRQLVETRQITKHVAQILDSRMNTKYDENDKLIREVKVITLKSKLVSDFRKDFQFYKVREINNYHHAHDAYLNAVVGTALIKKYPKLESEFVYGDYKVYDVRKMIAKSEQEIGKATAKYFFYSNIMNFFKTEITLANGEIRKRPLIETNGETGEIVWDKGRDFATVRKVLSMPQVNIVKKTEVQTGGFSKESILPKRNSDKLIARKKDWDPKKYGGFDSPTVAYSVLVVAKVEKGKSKKLKSVKELLGITIMERSSFEKNPIDFLEAKGYKEVKKDLIIKLPKYSLFELENGRKRMLASAGELQKGNELALPSKYVNFLYLASHYEKLKGSPEDNEQKQLFVEQHKHYLDEIIEQISEFSKRVILADANLDKVLSAYNKHRDKPIREQAENIIHLFTLTNLGAPAAFKYFDTTIDRKRYTSTKEVLDATLIHQSITGLYETRIDLSQLGGDGGGSSGSSGSSGSSGSSGGWVQEISDSRPMLHIYLNGRRFLGLLNTGADKTCIAGRDWPANWPIHQTESSLQGLGMACGVARSSQPLRWQHEDKSGIIHPFVIPTLPFTLWGRDIMKDIKVRLMTDSPDDSQDLMIGAIESNLFADQISWKSDQPVWLNQWPLKQEKLQALQQLVTEQLQLGHLEESNSPWNTPVFVIKKKSGKWRLLQDLRAVNATMHDMGALQPGLPSPVAVPKGWEIIIIDLQDCFFNIKLHPEDCKRFAFSVPSPNFKRPYQRFQWKVLPQGMKNSPTLCQKFVDKAILTVRDKYQDSYIVHYMDDILLAHPSRSIVDEILTSMIQALNKHGLVVSTEKIQKYDNLKYLGTHIQGDSVSYQKLQIRTDKLRTLNDFQKLLGNINWIRPFLKLTTGELKPLFEILNGDSNPISTRKLTPEACKALQLMNERLSTARVKRLDLSQPWSLCILKTEYTPTACLWQDGVVEWIHLPHISPKVITPYDIFCTQLIIKGRHRSKELFSKDPDYIVVPYTKVQFDLLLQEKEDWPISLLGFLGEVHFHLPKDPLLTFTLQTAIIFPHMTSTTPLEKGIVIFTDGSANGRSVTYIQGREPIIKENTQNTAQQAEIVAVITAFEEVSQPFNLYTDSKYVTGLFPEIETATLSPRTKIYTELKHLQRLIHKRQEKFYIGHIRGHTGLPGPLAQGNAYADSLTRILTAGKRTADGSEFEKRTADGSEFESPKKKAKVE

SEQ ID NO: 3282 - protein, 2123 aa, synthetic construct
MPAAKRVKLDGGDKKYSIGLDIGTNSVGWAVITDEYKVPSKKFKVLGNTDRHSIKKNLIGALLFDSGETAEATRLKRTARRRYTRRKNRICYLQEIFSNEMAKVDDSFFHRLEESFLVEEDKKHERHPIFGNIVDEVAYHEKYPTIYHLRKKLVDSTDKADLRLIYLALAHMIKFRGHFLIEGDLNPDNSDVDKLFIQLVQTYNQLFEENPINASGVDAKAILSARLSKSRRLENLIAQLPGEKKNGLFGNLIALSLGLTPNFKSNFDLAEDAKLQLSKDTYDDDLDNLLAQIGDQYADLFLAAKNLSDAILLSDILRVNTEITKAPLSASMIKRYDEHHQDLTLLKALVRQQLPEKYKEIFFDQSKNGYAGYIDGGASQEEFYKFIKPILEKMDGTEELLVKLNREDLLRKQRTFDNGSIPHQIHLGELHAILRRQEDFYPFLKDNREKIEKILTFRIPYYVGPLARGNSRFAWMTRKSEETITPWNFEEVVDKGASAQSFIERMTNFDKNLPNEKVLPKHSLLYEYFTVYNELTKVKYVTEGMRKPAFLSGEQKKAIVDLLFKTNRKVTVKQLKEDYFKKIECFDSVEISGVEDRFNASLGTYHDLLKIIKDKDFLDNEENEDILEDIVLTLTLFEDREMIEERLKTYAHLFDDKVMKQLKRRRYTGWGRLSRKLINGIRDKQSGKTILDFLKSDGFANRNFMQLIHDDSLTFKEDIQKAQVSGQGDSLHEHIANLAGSPAIKKGILQTVKVVDELVKVMGRHKPENIVIEMARENQTTQKGQKNSRERMKRIEEGIKELGSQILKEHPVENTQLQNEKLYLYYLQNGRDMYVDQELDINRLSDYDVDHIVPQSFLKDDSIDNKVLTRSDKARGKSDNVPSEEVVKKMKNYWRQLLNAKLITQRKFDNLTKAERGGLSELDKAGFIKRQLVETRQITKHVAQILDSRMNTKYDENDKLIREVKVITLKSKLVSDFRKDFQFYKVREINNYHHAHDAYLNAVVGTALIKKYPKLESEFVYGDYKVYDVRKMIAKSEQEIGKATAKYFFYSNIMNFFKTEITLANGEIRKRPLIETNGETGEIVWDKGRDFATVRKVLSMPQVNIVKKTEVQTGGFSKESILPKRNSDKLIARKKDWDPKKYGGFDSPTVAYSVLVVAKVEKGKSKKLKSVKELLGITIMERSSFEKNPIDFLEAKGYKEVKKDLIIKLPKYSLFELENGRKRMLASAGELQKGNELALPSKYVNFLYLASHYEKLKGSPEDNEQKQLFVEQHKHYLDEIIEQISEFSKRVILADANLDKVLSAYNKHRDKPIREQAENIIHLFTLTNLGAPAAFKYFDTTIDRKRYTSTKEVLDATLIHQSITGLYETRIDLSQLGGDGGGSSGSSGSSGSSGSSGSSGGWVQEISDSRPMLHIYLNGRRFLGLLNTGADKTCIAGRDWPANWPIHQTESSLQGLGMACGVARSSQPLRWQHEDKSGIIHPFVIPTLPFTLWGRDIMKDIKVRLMTDSPDDSQDLMIGAIESNLFADQISWKSDQPVWLNQWPLKQEKLQALQQLVTEQLQLGHLEESNSPWNTPVFVIKKKSGKWRLLQDLRAVNATMHDMGALQPGLPSPVAVPKGWEIIIIDLQDCFFNIKLHPEDCKRFAFSVPSPNFKRPYQRFQWKVLPQGMKNSPTLCQKFVDKAILTVRDKYQDSYIVHYMDDILLAHPSRSIVDEILTSMIQALNKHGLVVSTEKIQKYDNLKYLGTHIQGDSVSYQKLQIRTDKLRTLNDFQKLLGNINWIRPFLKLTTGELKPLFEILNGDSNPISTRKLTPEACKALQLMNERLSTARVKRLDLSQPWSLCILKTEYTPTACLWQDGVVEWIHLPHISPKVITPYDIFCTQLIIKGRHRSKELFSKDPDYIVVPYTKVQFDLLLQEKEDWPISLLGFLGEVHFHLPKDPLLTFTLQTAIIFPHMTSTTPLEKGIVIFTDGSANGRSVTYIQGREPIIKENTQNTAQQAEIVAVITAFEEVSQPFNLYTDSKYVTGLFPEIETATLSPRTKIYTELKHLQRLIHKRQEKFYIGHIRGHTGLPGPLAQGNAYADSLTRILTAGKRTADGSEFEKRTADGSEFESPKKKAKVE

SEQ ID NO: 3283 - protein, 2116 aa, synthetic construct
MPAAKRVKLDGGDKKYSIGLDIGTNSVGWAVITDEYKVPSKKFKVLGNTDRHSIKKNLIGALLFDSGETAEATRLKRTARRRYTRRKNRICYLQEIFSNEMAKVDDSFFHRLEESFLVEEDKKHERHPIFGNIVDEVAYHEKYPTIYHLRKKLVDSTDKADLRLIYLALAHMIKFRGHFLIEGDLNPDNSDVDKLFIQLVQTYNQLFEENPINASGVDAKAILSARLSKSRRLENLIAQLPGEKKNGLFGNLIALSLGLTPNFKSNFDLAEDAKLQLSKDTYDDDLDNLLAQIGDQYADLFLAAKNLSDAILLSDILRVNTEITKAPLSASMIKRYDEHHQDLTLLKALVRQQLPEKYKEIFFDQSKNGYAGYIDGGASQEEFYKFIKPILEKMDGTEELLVKLNREDLLRKQRTFDNGSIPHQIHLGELHAILRRQEDFYPFLKDNREKIEKILTFRIPYYVGPLARGNSRFAWMTRKSEETITPWNFEEVVDKGASAQSFIERMTNFDKNLPNEKVLPKHSLLYEYFTVYNELTKVKYVTEGMRKPAFLSGEQKKAIVDLLFKTNRKVTVKQLKEDYFKKIECFDSVEISGVEDRFNASLGTYHDLLKIIKDKDFLDNEENEDILEDIVLTLTLFEDREMIEERLKTYAHLFDDKVMKQLKRRRYTGWGRLSRKLINGIRDKQSGKTILDFLKSDGFANRNFMQLIHDDSLTFKEDIQKAQVSGQGDSLHEHIANLAGSPAIKKGILQTVKVVDELVKVMGRHKPENIVIEMARENQTTQKGQKNSRERMKRIEEGIKELGSQILKEHPVENTQLQNEKLYLYYLQNGRDMYVDQELDINRLSDYDVDHIVPQSFLKDDSIDNKVLTRSDKARGKSDNVPSEEVVKKMKNYWRQLLNAKLITQRKFDNLTKAERGGLSELDKAGFIKRQLVETRQITKHVAQILDSRMNTKYDENDKLIREVKVITLKSKLVSDFRKDFQFYKVREINNYHHAHDAYLNAVVGTALIKKYPKLESEFVYGDYKVYDVRKMIAKSEQEIGKATAKYFFYSNIMNFFKTEITLANGEIRKRPLIETNGETGEIVWDKGRDFATVRKVLSMPQVNIVKKTEVQTGGFSKESILPKRNSDKLIARKKDWDPKKYGGFDSPTVAYSVLVVAKVEKGKSKKLKSVKELLGITIMERSSFEKNPIDFLEAKGYKEVKKDLIIKLPKYSLFELENGRKRMLASAGELQKGNELALPSKYVNFLYLASHYEKLKGSPEDNEQKQLFVEQHKHYLDEIIEQISEFSKRVILADANLDKVLSAYNKHRDKPIREQAENIIHLFTLTNLGAPAAFKYFDTTIDRKRYTSTKEVLDATLIHQSITGLYETRIDLSQLGGDGGEAAAKGGGGSSGGWVQEISDSRPMLHIYLNGRRFLGLLNTGADKTCIAGRDWPANWPIHQTESSLQGLGMACGVARSSQPLRWQHEDKSGIIHPFVIPTLPFTLWGRDIMKDIKVRLMTDSPDDSQDLMIGAIESNLFADQISWKSDQPVWLNQWPLKQEKLQALQQLVTEQLQLGHLEESNSPWNTPVFVIKKKSGKWRLLQDLRAVNATMHDMGALQPGLPSPVAVPKGWEIIIIDLQDCFFNIKLHPEDCKRFAFSVPSPNFKRPYQRFQWKVLPQGMKNSPTLCQKFVDKAILTVRDKYQDSYIVHYMDDILLAHPSRSIVDEILTSMIQALNKHGLVVSTEKIQKYDNLKYLGTHIQGDSVSYQKLQIRTDKLRTLNDFQKLLGNINWIRPFLKLTTGELKPLFEILNGDSNPISTRKLTPEACKALQLMNERLSTARVKRLDLSQPWSLCILKTEYTPTACLWQDGVVEWIHLPHISPKVITPYDIFCTQLIIKGRHRSKELFSKDPDYIVVPYTKVQFDLLLQEKEDWPISLLGFLGEVHFHLPKDPLLTFTLQTAIIFPHMTSTTPLEKGIVIFTDGSANGRSVTYIQGREPIIKENTQNTAQQAEIVAVITAFEEVSQPFNLYTDSKYVTGLFPEIETATLSPRTKIYTELKHLQRLIHKRQEKFYIGHIRGHTGLPGPLAQGNAYADSLTRILTAGKRTADGSEFEKRTADGSEFESPKKKAKVE

SEQ ID NO: 3284 - protein, 2116 aa, synthetic construct
MPAAKRVKLDGGDKKYSIGLDIGTNSVGWAVITDEYKVPSKKFKVLGNTDRHSIKKNLIGALLFDSGETAEATRLKRTARRRYTRRKNRICYLQEIFSNEMAKVDDSFFHRLEESFLVEEDKKHERHPIFGNIVDEVAYHEKYPTIYHLRKKLVDSTDKADLRLIYLALAHMIKFRGHFLIEGDLNPDNSDVDKLFIQLVQTYNQLFEENPINASGVDAKAILSARLSKSRRLENLIAQLPGEKKNGLFGNLIALSLGLTPNFKSNFDLAEDAKLQLSKDTYDDDLDNLLAQIGDQYADLFLAAKNLSDAILLSDILRVNTEITKAPLSASMIKRYDEHHQDLTLLKALVRQQLPEKYKEIFFDQSKNGYAGYIDGGASQEEFYKFIKPILEKMDGTEELLVKLNREDLLRKQRTFDNGSIPHQIHLGELHAILRRQEDFYPFLKDNREKIEKILTFRIPYYVGPLARGNSRFAWMTRKSEETITPWNFEEVVDKGASAQSFIERMTNFDKNLPNEKVLPKHSLLYEYFTVYNELTKVKYVTEGMRKPAFLSGEQKKAIVDLLFKTNRKVTVKQLKEDYFKKIECFDSVEISGVEDRFNASLGTYHDLLKIIKDKDFLDNEENEDILEDIVLTLTLFEDREMIEERLKTYAHLFDDKVMKQLKRRRYTGWGRLSRKLINGIRDKQSGKTILDFLKSDGFANRNFMQLIHDDSLTFKEDIQKAQVSGQGDSLHEHIANLAGSPAIKKGILQTVKVVDELVKVMGRHKPENIVIEMARENQTTQKGQKNSRERMKRIEEGIKELGSQILKEHPVENTQLQNEKLYLYYLQNGRDMYVDQELDINRLSDYDVDHIVPQSFLKDDSIDNKVLTRSDKARGKSDNVPSEEVVKKMKNYWRQLLNAKLITQRKFDNLTKAERGGLSELDKAGFIKRQLVETRQITKHVAQILDSRMNTKYDENDKLIREVKVITLKSKLVSDFRKDFQFYKVREINNYHHAHDAYLNAVVGTALIKKYPKLESEFVYGDYKVYDVRKMIAKSEQEIGKATAKYFFYSNIMNFFKTEITLANGEIRKRPLIETNGETGEIVWDKGRDFATVRKVLSMPQVNIVKKTEVQTGGFSKESILPKRNSDKLIARKKDWDPKKYGGFDSPTVAYSVLVVAKVEKGKSKKLKSVKELLGITIMERSSFEKNPIDFLEAKGYKEVKKDLIIKLPKYSLFELENGRKRMLASAGELQKGNELALPSKYVNFLYLASHYEKLKGSPEDNEQKQLFVEQHKHYLDEIIEQISEFSKRVILADANLDKVLSAYNKHRDKPIREQAENIIHLFTLTNLGAPAAFKYFDTTIDRKRYTSTKEVLDATLIHQSITGLYETRIDLSQLGGDGGEAAAKGGGGGSGGWVQEISDSRPMLHIYLNGRRFLGLLNTGADKTCIAGRDWPANWPIHQTESSLQGLGMACGVARSSQPLRWQHEDKSGIIHPFVIPTLPFTLWGRDIMKDIKVRLMTDSPDDSQDLMIGAIESNLFADQISWKSDQPVWLNQWPLKQEKLQALQQLVTEQLQLGHLEESNSPWNTPVFVIKKKSGKWRLLQDLRAVNATMHDMGALQPGLPSPVAVPKGWEIIIIDLQDCFFNIKLHPEDCKRFAFSVPSPNFKRPYQRFQWKVLPQGMKNSPTLCQKFVDKAILTVRDKYQDSYIVHYMDDILLAHPSRSIVDEILTSMIQALNKHGLVVSTEKIQKYDNLKYLGTHIQGDSVSYQKLQIRTDKLRTLNDFQKLLGNINWIRPFLKLTTGELKPLFEILNGDSNPISTRKLTPEACKALQLMNERLSTARVKRLDLSQPWSLCILKTEYTPTACLWQDGVVEWIHLPHISPKVITPYDIFCTQLIIKGRHRSKELFSKDPDYIVVPYTKVQFDLLLQEKEDWPISLLGFLGEVHFHLPKDPLLTFTLQTAIIFPHMTSTTPLEKGIVIFTDGSANGRSVTYIQGREPIIKENTQNTAQQAEIVAVITAFEEVSQPFNLYTDSKYVTGLFPEIETATLSPRTKIYTELKHLQRLIHKRQEKFYIGHIRGHTGLPGPLAQGNAYADSLTRILTAGKRTADGSEFEKRTADGSEFESPKKKAKVE

SEQ ID NO: 3285 - protein, 2116 aa, synthetic construct
MPAAKRVKLDGGDKKYSIGLDIGTNSVGWAVITDEYKVPSKKFKVLGNTDRHSIKKNLIGALLFDSGETAEATRLKRTARRRYTRRKNRICYLQEIFSNEMAKVDDSFFHRLEESFLVEEDKKHERHPIFGNIVDEVAYHEKYPTIYHLRKKLVDSTDKADLRLIYLALAHMIKFRGHFLIEGDLNPDNSDVDKLFIQLVQTYNQLFEENPINASGVDAKAILSARLSKSRRLENLIAQLPGEKKNGLFGNLIALSLGLTPNFKSNFDLAEDAKLQLSKDTYDDDLDNLLAQIGDQYADLFLAAKNLSDAILLSDILRVNTEITKAPLSASMIKRYDEHHQDLTLLKALVRQQLPEKYKEIFFDQSKNGYAGYIDGGASQEEFYKFIKPILEKMDGTEELLVKLNREDLLRKQRTFDNGSIPHQIHLGELHAILRRQEDFYPFLKDNREKIEKILTFRIPYYVGPLARGNSRFAWMTRKSEETITPWNFEEVVDKGASAQSFIERMTNFDKNLPNEKVLPKHSLLYEYFTVYNELTKVKYVTEGMRKPAFLSGEQKKAIVDLLFKTNRKVTVKQLKEDYFKKIECFDSVEISGVEDRFNASLGTYHDLLKIIKDKDFLDNEENEDILEDIVLTLTLFEDREMIEERLKTYAHLFDDKVMKQLKRRRYTGWGRLSRKLINGIRDKQSGKTILDFLKSDGFANRNFMQLIHDDSLTFKEDIQKAQVSGQGDSLHEHIANLAGSPAIKKGILQTVKVVDELVKVMGRHKPENIVIEMARENQTTQKGQKNSRERMKRIEEGIKELGSQILKEHPVENTQLQNEKLYLYYLQNGRDMYVDQELDINRLSDYDVDHIVPQSFLKDDSIDNKVLTRSDKARGKSDNVPSEEVVKKMKNYWRQLLNAKLITQRKFDNLTKAERGGLSELDKAGFIKRQLVETRQITKHVAQILDSRMNTKYDENDKLIREVKVITLKSKLVSDFRKDFQFYKVREINNYHHAHDAYLNAVVGTALIKKYPKLESEFVYGDYKVYDVRKMIAKSEQEIGKATAKYFFYSNIMNFFKTEITLANGEIRKRPLIETNGETGEIVWDKGRDFATVRKVLSMPQVNIVKKTEVQTGGFSKESILPKRNSDKLIARKKDWDPKKYGGFDSPTVAYSVLVVAKVEKGKSKKLKSVKELLGITIMERSSFEKNPIDFLEAKGYKEVKKDLIIKLPKYSLFELENGRKRMLASAGELQKGNELALPSKYVNFLYLASHYEKLKGSPEDNEQKQLFVEQHKHYLDEIIEQISEFSKRVILADANLDKVLSAYNKHRDKPIREQAENIIHLFTLTNLGAPAAFKYFDTTIDRKRYTSTKEVLDATLIHQSITGLYETRIDLSQLGGDGGGGGGSSEAAAKGGWVQEISDSRPMLHIYLNGRRFLGLLNTGADKTCIAGRDWPANWPIHQTESSLQGLGMACGVARSSQPLRWQHEDKSGIIHPFVIPTLPFTLWGRDIMKDIKVRLMTDSPDDSQDLMIGAIESNLFADQISWKSDQPVWLNQWPLKQEKLQALQQLVTEQLQLGHLEESNSPWNTPVFVIKKKSGKWRLLQDLRAVNATMHDMGALQPGLPSPVAVPKGWEIIIIDLQDCFFNIKLHPEDCKRFAFSVPSPNFKRPYQRFQWKVLPQGMKNSPTLCQKFVDKAILTVRDKYQDSYIVHYMDDILLAHPSRSIVDEILTSMIQALNKHGLVVSTEKIQKYDNLKYLGTHIQGDSVSYQKLQIRTDKLRTLNDFQKLLGNINWIRPFLKLTTGELKPLFEILNGDSNPISTRKLTPEACKALQLMNERLSTARVKRLDLSQPWSLCILKTEYTPTACLWQDGVVEWIHLPHISPKVITPYDIFCTQLIIKGRHRSKELFSKDPDYIVVPYTKVQFDLLLQEKEDWPISLLGFLGEVHFHLPKDPLLTFTLQTAIIFPHMTSTTPLEKGIVIFTDGSANGRSVTYIQGREPIIKENTQNTAQQAEIVAVITAFEEVSQPFNLYTDSKYVTGLFPEIETATLSPRTKIYTELKHLQRLIHKRQEKFYIGHIRGHTGLPGPLAQGNAYADSLTRILTAGKRTADGSEFEKRTADGSEFESPKKKAKVE

SEQ ID NO: 3286 - protein, 2116 aa, synthetic construct
MPAAKRVKLDGGDKKYSIGLDIGTNSVGWAVITDEYKVPSKKFKVLGNTDRHSIKKNLIGALLFDSGETAEATRLKRTARRRYTRRKNRICYLQEIFSNEMAKVDDSFFHRLEESFLVEEDKKHERHPIFGNIVDEVAYHEKYPTIYHLRKKLVDSTDKADLRLIYLALAHMIKFRGHFLIEGDLNPDNSDVDKLFIQLVQTYNQLFEENPINASGVDAKAILSARLSKSRRLENLIAQLPGEKKNGLFGNLIALSLGLTPNFKSNFDLAEDAKLQLSKDTYDDDLDNLLAQIGDQYADLFLAAKNLSDAILLSDILRVNTEITKAPLSASMIKRYDEHHQDLTLLKALVRQQLPEKYKEIFFDQSKNGYAGYIDGGASQEEFYKFIKPILEKMDGTEELLVKLNREDLLRKQRTFDNGSIPHQIHLGELHAILRRQEDFYPFLKDNREKIEKILTFRIPYYVGPLARGNSRFAWMTRKSEETITPWNFEEVVDKGASAQSFIERMTNFDKNLPNEKVLPKHSLLYEYFTVYNELTKVKYVTEGMRKPAFLSGEQKKAIVDLLFKTNRKVTVKQLKEDYFKKIECFDSVEISGVEDRFNASLGTYHDLLKIIKDKDFLDNEENEDILEDIVLTLTLFEDREMIEERLKTYAHLFDDKVMKQLKRRRYTGWGRLSRKLINGIRDKQSGKTILDFLKSDGFANRNFMQLIHDDSLTFKEDIQKAQVSGQGDSLHEHIANLAGSPAIKKGILQTVKVVDELVKVMGRHKPENIVIEMARENQTTQKGQKNSRERMKRIEEGIKELGSQILKEHPVENTQLQNEKLYLYYLQNGRDMYVDQELDINRLSDYDVDHIVPQSFLKDDSIDNKVLTRSDKARGKSDNVPSEEVVKKMKNYWRQLLNAKLITQRKFDNLTKAERGGLSELDKAGFIKRQLVETRQITKHVAQILDSRMNTKYDENDKLIREVKVITLKSKLVSDFRKDFQFYKVREINNYHHAHDAYLNAVVGTALIKKYPKLESEFVYGDYKVYDVRKMIAKSEQEIGKATAKYFFYSNIMNFFKTEITLANGEIRKRPLIETNGETGEIVWDKGRDFATVRKVLSMPQVNIVKKTEVQTGGFSKESILPKRNSDKLIARKKDWDPKKYGGFDSPTVAYSVLVVAKVEKGKSKKLKSVKELLGITIMERSSFEKNPIDFLEAKGYKEVKKDLIIKLPKYSLFELENGRKRMLASAGELQKGNELALPSKYVNFLYLASHYEKLKGSPEDNEQKQLFVEQHKHYLDEIIEQISEFSKRVILADANLDKVLSAYNKHRDKPIREQAENIIHLFTLTNLGAPAAFKYFDTTIDRKRYTSTKEVLDATLIHQSITGLYETRIDLSQLGGDGGGGSGGGEAAAKGGWVQEISDSRPMLHIYLNGRRFLGLLNTGADKTCIAGRDWPANWPIHQTESSLQGLGMACGVARSSQPLRWQHEDKSGIIHPFVIPTLPFTLWGRDIMKDIKVRLMTDSPDDSQDLMIGAIESNLFADQISWKSDQPVWLNQWPLKQEKLQALQQLVTEQLQLGHLEESNSPWNTPVFVIKKKSGKWRLLQDLRAVNATMHDMGALQPGLPSPVAVPKGWEIIIIDLQDCFFNIKLHPEDCKRFAFSVPSPNFKRPYQRFQWKVLPQGMKNSPTLCQKFVDKAILTVRDKYQDSYIVHYMDDILLAHPSRSIVDEILTSMIQALNKHGLVVSTEKIQKYDNLKYLGTHIQGDSVSYQKLQIRTDKLRTLNDFQKLLGNINWIRPFLKLTTGELKPLFEILNGDSNPISTRKLTPEACKALQLMNERLSTARVKRLDLSQPWSLCILKTEYTPTACLWQDGVVEWIHLPHISPKVITPYDIFCTQLIIKGRHRSKELFSKDPDYIVVPYTKVQFDLLLQEKEDWPISLLGFLGEVHFHLPKDPLLTFTLQTAIIFPHMTSTTPLEKGIVIFTDGSANGRSVTYIQGREPIIKENTQNTAQQAEIVAVITAFEEVSQPFNLYTDSKYVTGLFPEIETATLSPRTKIYTELKHLQRLIHKRQEKFYIGHIRGHTGLPGPLAQGNAYADSLTRILTAGKRTADGSEFEKRTADGSEFESPKKKAKVE

SEQ ID NO: 3287 - protein, 2114 aa, synthetic construct; identical to SEQ ID NO: 3179

SEQ ID NO: 3288 - protein, 2116 aa, synthetic construct
MPAAKRVKLDGGDKKYSIGLDIGTNSVGWAVITDEYKVPSKKFKVLGNTDRHSIKKNLIGALLFDSGETAEATRLKRTARRRYTRRKNRICYLQEIFSNEMAKVDDSFFHRLEESFLVEEDKKHERHPIFGNIVDEVAYHEKYPTIYHLRKKLVDSTDKADLRLIYLALAHMIKFRGHFLIEGDLNPDNSDVDKLFIQLVQTYNQLFEENPINASGVDAKAILSARLSKSRRLENLIAQLPGEKKNGLFGNLIALSLGLTPNFKSNFDLAEDAKLQLSKDTYDDDLDNLLAQIGDQYADLFLAAKNLSDAILLSDILRVNTEITKAPLSASMIKRYDEHHQDLTLLKALVRQQLPEKYKEIFFDQSKNGYAGYIDGGASQEEFYKFIKPILEKMDGTEELLVKLNREDLLRKQRTFDNGSIPHQIHLGELHAILRRQEDFYPFLKDNREKIEKILTFRIPYYVGPLARGNSRFAWMTRKSEETITPWNFEEVVDKGASAQSFIERMTNFDKNLPNEKVLPKHSLLYEYFTVYNELTKVKYVTEGMRKPAFLSGEQKKAIVDLLFKTNRKVTVKQLKEDYFKKIECFDSVEISGVEDRFNASLGTYHDLLKIIKDKDFLDNEENEDILEDIVLTLTLFEDREMIEERLKTYAHLFDDKVMKQLKRRRYTGWGRLSRKLINGIRDKQSGKTILDFLKSDGFANRNFMQLIHDDSLTFKEDIQKAQVSGQGDSLHEHIANLAGSPAIKKGILQTVKVVDELVKVMGRHKPENIVIEMARENQTTQKGQKNSRERMKRIEEGIKELGSQILKEHPVENTQLQNEKLYLYYLQNGRDMYVDQELDINRLSDYDVDHIVPQSFLKDDSIDNKVLTRSDKARGKSDNVPSEEVVKKMKNYWRQLLNAKLITQRKFDNLTKAERGGLSELDKAGFIKRQLVETRQITKHVAQILDSRMNTKYDENDKLIREVKVITLKSKLVSDFRKDFQFYKVREINNYHHAHDAYLNAVVGTALIKKYPKLESEFVYGDYKVYDVRKMIAKSEQEIGKATAKYFFYSNIMNFFKTEITLANGEIRKRPLIETNGETGEIVWDKGRDFATVRKVLSMPQVNIVKKTEVQTGGFSKESILPKRNSDKLIARKKDWDPKKYGGFDSPTVAYSVLVVAKVEKGKSKKLKSVKELLGITIMERSSFEKNPIDFLEAKGYKEVKKDLIIKLPKYSLFELENGRKRMLASAGELQKGNELALPSKYVNFLYLASHYEKLKGSPEDNEQKQLFVEQHKHYLDEIIEQISEFSKRVILADANLDKVLSAYNKHRDKPIREQAENIIHLFTLTNLGAPAAFKYFDTTIDRKRYTSTKEVLDATLIHQSITGLYETRIDLSQLGGDGGPAPEAAAKGGSGGWVQEISDSRPMLHIYLNGRRFLGLLNTGADKTCIAGRDWPANWPIHQTESSLQGLGMACGVARSSQPLRWQHEDKSGIIHPFVIPTLPFTLWGRDIMKDIKVRLMTDSPDDSQDLMIGAIESNLFADQISWKSDQPVWLNQWPLKQEKLQALQQLVTEQLQLGHLEESNSPWNTPVFVIKKKSGKWRLLQDLRAVNATMHDMGALQPGLPSPVAVPKGWEIIIIDLQDCFFNIKLHPEDCKRFAFSVPSPNFKRPYQRFQWKVLPQGMKNSPTLCQKFVDKAILTVRDKYQDSYIVHYMDDILLAHPSRSIVDEILTSMIQALNKHGLVVSTEKIQKYDNLKYLGTHIQGDSVSYQKLQIRTDKLRTLNDFQKLLGNINWIRPFLKLTTGELKPLFEILNGDSNPISTRKLTPEACKALQLMNERLSTARVKRLDLSQPWSLCILKTEYTPTACLWQDGVVEWIHLPHISPKVITPYDIFCTQLIIKGRHRSKELFSKDPDYIVVPYTKVQFDLLLQEKEDWPISLLGFLGEVHFHLPKDPLLTFTLQTAIIFPHMTSTTPLEKGIVIFTDGSANGRSVTYIQGREPIIKENTQNTAQQAEIVAVITAFEEVSQPFNLYTDSKYVTGLFPEIETATLSPRTKIYTELKHLQRLIHKRQEKFYIGHIRGHTGLPGPLAQGNAYADSLTRILTAGKRTADGSEFEKRTADGSEFESPKKKAKVE

SEQ ID NO: 3289 - protein, 2116 aa, synthetic construct; identical to SEQ ID NO: 3178

SEQ ID NO: 3290 - protein, 2116 aa, synthetic construct
MPAAKRVKLDGGDKKYSIGLDIGTNSVGWAVITDEYKVPSKKFKVLGNTDRHSIKKNLIGALLFDSGETAEATRLKRTARRRYTRRKNRICYLQEIFSNEMAKVDDSFFHRLEESFLVEEDKKHERHPIFGNIVDEVAYHEKYPTIYHLRKKLVDSTDKADLRLIYLALAHMIKFRGHFLIEGDLNPDNSDVDKLFIQLVQTYNQLFEENPINASGVDAKAILSARLSKSRRLENLIAQLPGEKKNGLFGNLIALSLGLTPNFKSNFDLAEDAKLQLSKDTYDDDLDNLLAQIGDQYADLFLAAKNLSDAILLSDILRVNTEITKAPLSASMIKRYDEHHQDLTLLKALVRQQLPEKYKEIFFDQSKNGYAGYIDGGASQEEFYKFIKPILEKMDGTEELLVKLNREDLLRKQRTFDNGSIPHQIHLGELHAILRRQEDFYPFLKDNREKIEKILTFRIPYYVGPLARGNSRFAWMTRKSEETITPWNFEEVVDKGASAQSFIERMTNFDKNLPNEKVLPKHSLLYEYFTVYNELTKVKYVTEGMRKPAFLSGEQKKAIVDLLFKTNRKVTVKQLKEDYFKKIECFDSVEISGVEDRFNASLGTYHDLLKIIKDKDFLDNEENEDILEDIVLTLTLFEDREMIEERLKTYAHLFDDKVMKQLKRRRYTGWGRLSRKLINGIRDKQSGKTILDFLKSDGFANRNFMQLIHDDSLTFKEDIQKAQVSGQGDSLHEHIANLAGSPAIKKGILQTVKVVDELVKVMGRHKPENIVIEMARENQTTQKGQKNSRERMKRIEEGIKELGSQILKEHPVENTQLQNEKLYLYYLQNGRDMYVDQELDINRLSDYDVDHIVPQSFLKDDSIDNKVLTRSDKARGKSDNVPSEEVVKKMKNYWRQLLNAKLITQRKFDNLTKAERGGLSELDKAGFIKRQLVETRQITKHVAQILDSRMNTKYDENDKLIREVKVITLKSKLVSDFRKDFQFYKVREINNYHHAHDAYLNAVVGTALIKKYPKLESEFVYGDYKVYDVRKMIAKSEQEIGKATAKYFFYSNIMNFFKTEITLANGEIRKRPLIETNGETGEIVWDKGRDFATVRKVLSMPQVNIVKKTEVQTGGFSKESILPKRNSDKLIARKKDWDPKKYGGFDSPTVAYSVLVVAKVEKGKSKKLKSVKELLGITIMERSSFEKNPIDFLEAKGYKEVKKDLIIKLPKYSLFELENGRKRMLASAGELQKGNELALPSKYVNFLYLASHYEKLKGSPEDNEQKQLFVEQHKHYLDEIIEQISEFSKRVILADANLDKVLSAYNKHRDKPIREQAENIIHLFTLTNLGAPAAFKYFDTTIDRKRYTSTKEVLDATLIHQSITGLYETRIDLSQLGGDGGPAPGGSEAAAKGGWVQEISDSRPMLHIYLNGRRFLGLLNTGADKTCIAGRDWPANWPIHQTESSLQGLGMACGVARSSQPLRWQHEDKSGIIHPFVIPTLPFTLWGRDIMKDIKVRLMTDSPDDSQDLMIGAIESNLFADQISWKSDQPVWLNQWPLKQEKLQALQQLVTEQLQLGHLEESNSPWNTPVFVIKKKSGKWRLLQDLRAVNATMHDMGALQPGLPSPVAVPKGWEIIIIDLQDCFFNIKLHPEDCKRFAFSVPSPNFKRPYQRFQWKVLPQGMKNSPTLCQKFVDKAILTVRDKYQDSYIVHYMDDILLAHPSRSIVDEILTSMIQALNKHGLVVSTEKIQKYDNLKYLGTHIQGDSVSYQKLQIRTDKLRTLNDFQKLLGNINWIRPFLKLTTGELKPLFEILNGDSNPISTRKLTPEACKALQLMNERLSTARVKRLDLSQPWSLCILKTEYTPTACLWQDGVVEWIHLPHISPKVITPYDIFCTQLIIKGRHRSKELFSKDPDYIVVPYTKVQFDLLLQEKEDWPISLLGFLGEVHFHLPKDPLLTFTLQTAIIFPHMTSTTPLEKGIVIFTDGSANGRSVTYIQGREPIIKENTQNTAQQAEIVAVITAFEEVSQPFNLYTDSKYVTGLFPEIETATLSPRTKIYTELKHLQRLIHKRQEKFYIGHIRGHTGLPGPLAQGNAYADSLTRILTAGKRTADGSEFEKRTADGSEFESPKKKAKVE

SEQ ID NO: 3291 - protein, 2116 aa, synthetic construct
MPAAKRVKLDGGDKKYSIGLDIGTNSVGWAVITDEYKVPSKKFKVLGNTDRHSIKKNLIGALLFDSGETAEATRLKRTARRRYTRRKNRICYLQEIFSNEMAKVDDSFFHRLEESFLVEEDKKHERHPIFGNIVDEVAYHEKYPTIYHLRKKLVDSTDKADLRLIYLALAHMIKFRGHFLIEGDLNPDNSDVDKLFIQLVQTYNQLFEENPINASGVDAKAILSARLSKSRRLENLIAQLPGEKKNGLFGNLIALSLGLTPNFKSNFDLAEDAKLQLSKDTYDDDLDNLLAQIGDQYADLFLAAKNLSDAILLSDILRVNTEITKAPLSASMIKRYDEHHQDLTLLKALVRQQLPEKYKEIFFDQSKNGYAGYIDGGASQEEFYKFIKPILEKMDGTEELLVKLNREDLLRKQRTFDNGSIPHQIHLGELHAILRRQEDFYPFLKDNREKIEKILTFRIPYYVGPLARGNSRFAWMTRKSEETITPWNFEEVVDKGASAQSFIERMTNFDKNLPNEKVLPKHSLLYEYFTVYNELTKVKYVTEGMRKPAFLSGEQKKAIVDLLFKTNRKVTVKQLKEDYFKKIECFDSVEISGVEDRFNASLGTYHDLLKIIKDKDFLDNEENEDILEDIVLTLTLFEDREMIEERLKTYAHLFDDKVMKQLKRRRYTGWGRLSRKLINGIRDKQSGKTILDFLKSDGFANRNFMQLIHDDSLTFKEDIQKAQVSGQGDSLHEHIANLAGSPAIKKGILQTVKVVDELVKVMGRHKPENIVIEMARENQTTQKGQKNSRERMKRIEEGIKELGSQILKEHPVENTQLQNEKLYLYYLQNGRDMYVDQELDINRLSDYDVDHIVPQSFLKDDSIDNKVLTRSDKARGKSDNVPSEEVVKKMKNYWRQLLNAKLITQRKFDNLTKAERGGLSELDKAGFIKRQLVETRQITKHVAQILDSRMNTKYDENDKLIREVKVITLKSKLVSDFRKDFQFYKVREINNYHHAHDAYLNAVVGTALIKKYPKLESEFVYGDYKVYDVRKMIAKSEQEIGKATAKYFFYSNIMNFFKTEITLANGEIRKRPLIETNGETGEIVWDKGRDFATVRKVLSMPQVNIVKKTEVQTGGFSKESILPKRNSDKLIARKKDWDPKKYGGFDSPTVAYSVLVVAKVEKGKSKKLKSVKELLGITIMERSSFEKNPIDFLEAKGYKEVKKDLIIKLPKYSLFELENGRKRMLASAGELQKGNELALPSKYVNFLYLASHYEKLKGSPEDNEQKQLFVEQHKHYLDEIIEQISEFSKRVILADANLDKVLSAYNKHRDKPIREQAENIIHLFTLTNLGAPAAFKYFDTTIDRKRYTSTKEVLDATLIHQSITGLYETRIDLSQLGGDGGGGSEAAAKGGGGGWVQEISDSRPMLHIYLNGRRFLGLLNTGADKTCIAGRDWPANWPIHQTESSLQGLGMACGVARSSQPLRWQHEDKSGIIHPFVIPTLPFTLWGRDIMKDIKVRLMTDSPDDSQDLMIGAIESNLFADQISWKSDQPVWLNQWPLKQEKLQALQQLVTEQLQLGHLEESNSPWNTPVFVIKKKSGKWRLLQDLRAVNATMHDMGALQPGLPSPVAVPKGWEIIIIDLQDCFFNIKLHPEDCKRFAFSVPSPNFKRPYQRFQWKVLPQGMKNSPTLCQKFVDKAILTVRDKYQDSYIVHYMDDILLAHPSRSIVDEILTSMIQALNKHGLVVSTEKIQKYDNLKYLGTHIQGDSVSYQKLQIRTDKLRTLNDFQKLLGNINWIRPFLKLTTGELKPLFEILNGDSNPISTRKLTPEACKALQLMNERLSTARVKRLDLSQPWSLCILKTEYTPTACLWQDGVVEWIHLPHISPKVITPYDIFCTQLIIKGRHRSKELFSKDPDYIVVPYTKVQFDLLLQEKEDWPISLLGFLGEVHFHLPKDPLLTFTLQTAIIFPHMTSTTPLEKGIVIFTDGSANGRSVTYIQGREPIIKENTQNTAQQAEIVAVITAFEEVSQPFNLYTDSKYVTGLFPEIETATLSPRTKIYTELKHLQRLIHKRQEKFYIGHIRGHTGLPGPLAQGNAYADSLTRILTAGKRTADGSEFEKRTADGSEFESPKKKAKVE

SEQ ID NO: 3292 - protein, 2114 aa, synthetic construct
MPAAKRVKLDGGDKKYSIGLDIGTNSVGWAVITDEYKVPSKKFKVLGNTDRHSIKKNLIGALLFDSGETAEATRLKRTARRRYTRRKNRICYLQEIFSNEMAKVDDSFFHRLEESFLVEEDKKHERHPIFGNIVDEVAYHEKYPTIYHLRKKLVDSTDKADLRLIYLALAHMIKFRGHFLIEGDLNPDNSDVDKLFIQLVQTYNQLFEENPINASGVDAKAILSARLSKSRRLENLIAQLPGEKKNGLFGNLIALSLGLTPNFKSNFDLAEDAKLQLSKDTYDDDLDNLLAQIGDQYADLFLAAKNLSDAILLSDILRVNTEITKAPLSASMIKRYDEHHQDLTLLKALVRQQLPEKYKEIFFDQSKNGYAGYIDGGASQEEFYKFIKPILEKMDGTEELLVKLNREDLLRKQRTFDNGSIPHQIHLGELHAILRRQEDFYPFLKDNREKIEKILTFRIPYYVGPLARGNSRFAWMTRKSEETITPWNFEEVVDKGASAQSFIERMTNFDKNLPNEKVLPKHSLLYEYFTVYNELTKVKYVTEGMRKPAFLSGEQKKAIVDLLFKTNRKVTVKQLKEDYFKKIECFDSVEISGVEDRFNASLGTYHDLLKIIKDKDFLDNEENEDILEDIVLTLTLFEDREMIEERLKTYAHLFDDKVMKQLKRRRYTGWGRLSRKLINGIRDKQSGKTILDFLKSDGFANRNFMQLIHDDSLTFKEDIQKAQVSGQGDSLHEHIANLAGSPAIKKGILQTVKVVDELVKVMGRHKPENIVIEMARENQTTQKGQKNSRERMKRIEEGIKELGSQILKEHPVENTQLQNEKLYLYYLQNGRDMYVDQELDINRLSDYDVDHIVPQSFLKDDSIDNKVLTRSDKARGKSDNVPSEEVVKKMKNYWRQLLNAKLITQRKFDNLTKAERGGLSELDKAGFIKRQLVETRQITKHVAQILDSRMNTKYDENDKLIREVKVITLKSKLVSDFRKDFQFYKVREINNYHHAHDAYLNAVVGTALIKKYPKLESEFVYGDYKVYDVRKMIAKSEQEIGKATAKYFFYSNIMNFFKTEITLANGEIRKRPLIETNGETGEIVWDKGRDFATVRKVLSMPQVNIVKKTEVQTGGFSKESILPKRNSDKLIARKKDWDPKKYGGFDSPTVAYSVLVVAKVEKGKSKKLKSVKELLGITIMERSSFEKNPIDFLEAKGYKEVKKDLIIKLPKYSLFELENGRKRMLASAGELQKGNELALPSKYVNFLYLASHYEKLKGSPEDNEQKQLFVEQHKHYLDEIIEQISEFSKRVILADANLDKVLSAYNKHRDKPIREQAENIIHLFTLTNLGAPAAFKYFDTTIDRKRYTSTKEVLDATLIHQSITGLYETRIDLSQLGGDGGGGSGGSGGSGGWVQEISDSRPMLHIYLNGRRFLGLLNTGADKTCIAGRDWPANWPIHQTESSLQGLGMACGVARSSQPLRWQHEDKSGIIHPFVIPTLPFTLWGRDIMKDIKVRLMTDSPDDSQDLMIGAIESNLFADQISWKSDQPVWLNQWPLKQEKLQALQQLVTEQLQLGHLEESNSPWNTPVFVIKKKSGKWRLLQDLRAVNATMHDMGALQPGLPSPVAVPKGWEIIIIDLQDCFFNIKLHPEDCKRFAFSVPSPNFKRPYQRFQWKVLPQGMKNSPTLCQKFVDKAILTVRDKYQDSYIVHYMDDILLAHPSRSIVDEILTSMIQALNKHGLVVSTEKIQKYDNLKYLGTHIQGDSVSYQKLQIRTDKLRTLNDFQKLLGNINWIRPFLKLTTGELKPLFEILNGDSNPISTRKLTPEACKALQLMNERLSTARVKRLDLSQPWSLCILKTEYTPTACLWQDGVVEWIHLPHISPKVITPYDIFCTQLIIKGRHRSKELFSKDPDYIVVPYTKVQFDLLLQEKEDWPISLLGFLGEVHFHLPKDPLLTFTLQTAIIFPHMTSTTPLEKGIVIFTDGSANGRSVTYIQGREPIIKENTQNTAQQAEIVAVITAFEEVSQPFNLYTDSKYVTGLFPEIETATLSPRTKIYTELKHLQRLIHKRQEKFYIGHIRGHTGLPGPLAQGNAYADSLTRILTAGKRTADGSEFEKRTADGSEFESPKKKAKVE

SEQ ID NO: 3293 - protein, 2113 aa, synthetic construct
MPAAKRVKLDGGDKKYSIGLDIGTNSVGWAVITDEYKVPSKKFKVLGNTDRHSIKKNLIGALLFDSGETAEATRLKRTARRRYTRRKNRICYLQEIFSNEMAKVDDSFFHRLEESFLVEEDKKHERHPIFGNIVDEVAYHEKYPTIYHLRKKLVDSTDKADLRLIYLALAHMIKFRGHFLIEGDLNPDNSDVDKLFIQLVQTYNQLFEENPINASGVDAKAILSARLSKSRRLENLIAQLPGEKKNGLFGNLIALSLGLTPNFKSNFDLAEDAKLQLSKDTYDDDLDNLLAQIGDQYADLFLAAKNLSDAILLSDILRVNTEITKAPLSASMIKRYDEHHQDLTLLKALVRQQLPEKYKEIFFDQSKNGYAGYIDGGASQEEFYKFIKPILEKMDGTEELLVKLNREDLLRKQRTFDNGSIPHQIHLGELHAILRRQEDFYPFLKDNREKIEKILTFRIPYYVGPLARGNSRFAWMTRKSEETITPWNFEEVVDKGASAQSFIERMTNFDKNLPNEKVLPKHSLLYEYFTVYNELTKVKYVTEGMRKPAFLSGEQKKAIVDLLFKTNRKVTVKQLKEDYFKKIECFDSVEISGVEDRFNASLGTYHDLLKIIKDKDFLDNEENEDILEDIVLTLTLFEDREMIEERLKTYAHLFDDKVMKQLKRRRYTGWGRLSRKLINGIRDKQSGKTILDFLKSDGFANRNFMQLIHDDSLTFKEDIQKAQVSGQGDSLHEHIANLAGSPAIKKGILQTVKVVDELVKVMGRHKPENIVIEMARENQTTQKGQKNSRERMKRIEEGIKELGSQILKEHPVENTQLQNEKLYLYYLQNGRDMYVDQELDINRLSDYDVDHIVPQSFLKDDSIDNKVLTRSDKARGKSDNVPSEEVVKKMKNYWRQLLNAKLITQRKFDNLTKAERGGLSELDKAGFIKRQLVETRQITKHVAQILDSRMNTKYDENDKLIREVKVITLKSKLVSDFRKDFQFYKVREINNYHHAHDAYLNAVVGTALIKKYPKLESEFVYGDYKVYDVRKMIAKSEQEIGKATAKYFFYSNIMNFFKTEITLANGEIRKRPLIETNGETGEIVWDKGRDFATVRKVLSMPQVNIVKKTEVQTGGFSKESILPKRNSDKLIARKKDWDPKKYGGFDSPTVAYSVLVVAKVEKGKSKKLKSVKELLGITIMERSSFEKNPIDFLEAKGYKEVKKDLIIKLPKYSLFELENGRKRMLASAGELQKGNELALPSKYVNFLYLASHYEKLKGSPEDNEQKQLFVEQHKHYLDEIIEQISEFSKRVILADANLDKVLSAYNKHRDKPIREQAENIIHLFTLTNLGAPAAFKYFDTTIDRKRYTSTKEVLDATLIHQSITGLYETRIDLSQLGGDGGGGSEAAAKGGWVQEISDSRPMLHIYLNGRRFLGLLNTGADKTCIAGRDWPANWPIHQTESSLQGLGMACGVARSSQPLRWQHEDKSGIIHPFVIPTLPFTLWGRDIMKDIKVRLMTDSPDDSQDLMIGAIESNLFADQISWKSDQPVWLNQWPLKQEKLQALQQLVTEQLQLGHLEESNSPWNTPVFVIKKKSGKWRLLQDLRAVNATMHDMGALQPGLPSPVAVPKGWEIIIIDLQDCFFNIKLHPEDCKRFAFSVPSPNFKRPYQRFQWKVLPQGMKNSPTLCQKFVDKAILTVRDKYQDSYIVHYMDDILLAHPSRSIVDEILTSMIQALNKHGLVVSTEKIQKYDNLKYLGTHIQGDSVSYQKLQIRTDKLRTLNDFQKLLGNINWIRPFLKLTTGELKPLFEILNGDSNPISTRKLTPEACKALQLMNERLSTARVKRLDLSQPWSLCILKTEYTPTACLWQDGVVEWIHLPHISPKVITPYDIFCTQLIIKGRHRSKELFSKDPDYIVVPYTKVQFDLLLQEKEDWPISLLGFLGEVHFHLPKDPLLTFTLQTAIIFPHMTSTTPLEKGIVIFTDGSANGRSVTYIQGREPIIKENTQNTAQQAEIVAVITAFEEVSQPFNLYTDSKYVTGLFPEIETATLSPRTKIYTELKHLQRLIHKRQEKFYIGHIRGHTGLPGPLAQGNAYADSLTRILTAGKRTADGSEFEKRTADGSEFESPKKKAKVE

SEQ ID NO: 3294 - protein, 2043 aa, synthetic construct
MPAAKRVKLDGGDKKYSIGLDIGTNSVGWAVITDEYKVPSKKFKVLGNTDRHSIKKNLIGALLFDSGETAEATRLKRTARRRYTRRKNRICYLQEIFSNEMAKVDDSFFHRLEESFLVEEDKKHERHPIFGNIVDEVAYHEKYPTIYHLRKKLVDSTDKADLRLIYLALAHMIKFRGHFLIEGDLNPDNSDVDKLFIQLVQTYNQLFEENPINASGVDAKAILSARLSKSRRLENLIAQLPGEKKNGLFGNLIALSLGLTPNFKSNFDLAEDAKLQLSKDTYDDDLDNLLAQIGDQYADLFLAAKNLSDAILLSDILRVNTEITKAPLSASMIKRYDEHHQDLTLLKALVRQQLPEKYKEIFFDQSKNGYAGYIDGGASQEEFYKFIKPILEKMDGTEELLVKLNREDLLRKQRTFDNGSIPHQIHLGELHAILRRQEDFYPFLKDNREKIEKILTFRIPYYVGPLARGNSRFAWMTRKSEETITPWNFEEVVDKGASAQSFIERMTNFDKNLPNEKVLPKHSLLYEYFTVYNELTKVKYVTEGMRKPAFLSGEQKKAIVDLLFKTNRKVTVKQLKEDYFKKIECFDSVEISGVEDRFNASLGTYHDLLKIIKDKDFLDNEENEDILEDIVLTLTLFEDREMIEERLKTYAHLFDDKVMKQLKRRRYTGWGRLSRKLINGIRDKQSGKTILDFLKSDGFANRNFMQLIHDDSLTFKEDIQKAQVSGQGDSLHEHIANLAGSPAIKKGILQTVKVVDELVKVMGRHKPENIVIEMARENQTTQKGQKNSRERMKRIEEGIKELGSQILKEHPVENTQLQNEKLYLYYLQNGRDMYVDQELDINRLSDYDVDHIVPQSFLKDDSIDNKVLTRSDKARGKSDNVPSEEVVKKMKNYWRQLLNAKLITQRKFDNLTKAERGGLSELDKAGFIKRQLVETRQITKHVAQILDSRMNTKYDENDKLIREVKVITLKSKLVSDFRKDFQFYKVREINNYHHAHDAYLNAVVGTALIKKYPKLESEFVYGDYKVYDVRKMIAKSEQEIGKATAKYFFYSNIMNFFKTEITLANGEIRKRPLIETNGETGEIVWDKGRDFATVRKVLSMPQVNIVKKTEVQTGGFSKESILPKRNSDKLIARKKDWDPKKYGGFDSPTVAYSVLVVAKVEKGKSKKLKSVKELLGITIMERSSFEKNPIDFLEAKGYKEVKKDLIIKLPKYSLFELENGRKRMLASAGELQKGNELALPSKYVNFLYLASHYEKLKGSPEDNEQKQLFVEQHKHYLDEIIEQISEFSKRVILADANLDKVLSAYNKHRDKPIREQAENIIHLFTLTNLGAPAAFKYFDTTIDRKRYTSTKEVLDATLIHQSITGLYETRIDLSQLGGDGGEAAAKEAAAKEAAAKEAAAKEAAAKEAAAKGGGRDIMKDIKVRLMTDSPDDSQDLMIGAIESNLFADQISWKSDQPVWLNQWPLKQEKLQALQQLVTEQLQLGHLEESNSPWNTPVFVIKKKSGKWRLLQDLRAVNATMHDMGALQPGLPSPVAVPKGWEIIIIDLQDCFFNIKLHPEDCKRFAFSVPSPNFKRPYQRFQWKVLPQGMKNSPTLCQKFVDKAILTVRDKYQDSYIVHYMDDILLAHPSRSIVDEILTSMIQALNKHGLVVSTEKIQKYDNLKYLGTHIQGDSVSYQKLQIRTDKLRTLNDFQKLLGNINWIRPFLKLTTGELKPLFEILNGDSNPISTRKLTPEACKALQLMNERLSTARVKRLDLSQPWSLCILKTEYTPTACLWQDGVVEWIHLPHISPKVITPYDIFCTQLIIKGRHRSKELFSKDPDYIVVPYTKVQFDLLLQEKEDWPISLLGFLGEVHFHLPKDPLLTFTLQTAIIFPHMTSTTPLEKGIVIFTDGSANGRSVTYIQGREPIIKENTQNTAQQAEIVAVITAFEEVSQPFNLYTDSKYVTGLFPEIETATLSPRTKIYTELKHLQRLIHKRQEKFYIGHIRGHTGLPGPLAQGNAYADSLTRILTAGKRTADGSEFEKRTADGSEFESPKKKAKVE

SEQ ID NO: 3295 - protein, 2046 aa, synthetic construct; identical to SEQ ID NO: 3238

SEQ ID NO: 3296 - protein, 2028 aa, synthetic construct; identical to SEQ ID NO: 3201

SEQ ID NO: 3297 - protein, 2031 aa, synthetic construct
MPAAKRVKLDGGDKKYSIGLDIGTNSVGWAVITDEYKVPSKKFKVLGNTDRHSIKKNLIGALLFDSGETAEATRLKRTARRRYTRRKNRICYLQEIFSNEMAKVDDSFFHRLEESFLVEEDKKHERHPIFGNIVDEVAYHEKYPTIYHLRKKLVDSTDKADLRLIYLALAHMIKFRGHFLIEGDLNPDNSDVDKLFIQLVQTYNQLFEENPINASGVDAKAILSARLSKSRRLENLIAQLPGEKKNGLFGNLIALSLGLTPNFKSNFDLAEDAKLQLSKDTYDDDLDNLLAQIGDQYADLFLAAKNLSDAILLSDILRVNTEITKAPLSASMIKRYDEHHQDLTLLKALVRQQLPEKYKEIFFDQSKNGYAGYIDGGASQEEFYKFIKPILEKMDGTEELLVKLNREDLLRKQRTFDNGSIPHQIHLGELHAILRRQEDFYPFLKDNREKIEKILTFRIPYYVGPLARGNSRFAWMTRKSEETITPWNFEEVVDKGASAQSFIERMTNFDKNLPNEKVLPKHSLLYEYFTVYNELTKVKYVTEGMRKPAFLSGEQKKAIVDLLFKTNRKVTVKQLKEDYFKKIECFDSVEISGVEDRFNASLGTYHDLLKIIKDKDFLDNEENEDILEDIVLTLTLFEDREMIEERLKTYAHLFDDKVMKQLKRRRYTGWGRLSRKLINGIRDKQSGKTILDFLKSDGFANRNFMQLIHDDSLTFKEDIQKAQVSGQGDSLHEHIANLAGSPAIKKGILQTVKVVDELVKVMGRHKPENIVIEMARENQTTQKGQKNSRERMKRIEEGIKELGSQILKEHPVENTQLQNEKLYLYYLQNGRDMYVDQELDINRLSDYDVDHIVPQSFLKDDSIDNKVLTRSDKARGKSDNVPSEEVVKKMKNYWRQLLNAKLITQRKFDNLTKAERGGLSELDKAGFIKRQLVETRQITKHVAQILDSRMNTKYDENDKLIREVKVITLKSKLVSDFRKDFQFYKVREINNYHHAHDAYLNAVVGTALIKKYPKLESEFVYGDYKVYDVRKMIAKSEQEIGKATAKYFFYSNIMNFFKTEITLANGEIRKRPLIETNGETGEIVWDKGRDFATVRKVLSMPQVNIVKKTEVQTGGFSKESILPKRNSDKLIARKKDWDPKKYGGFDSPTVAYSVLVVAKVEKGKSKKLKSVKELLGITIMERSSFEKNPIDFLEAKGYKEVKKDLIIKLPKYSLFELENGRKRMLASAGELQKGNELALPSKYVNFLYLASHYEKLKGSPEDNEQKQLFVEQHKHYLDEIIEQISEFSKRVILADANLDKVLSAYNKHRDKPIREQAENIIHLFTLTNLGAPAAFKYFDTTIDRKRYTSTKEVLDATLIHQSITGLYETRIDLSQLGGDGGGSSGSSGSSGSSGSSGSSGGGRDIMKDIKVRLMTDSPDDSQDLMIGAIESNLFADQISWKSDQPVWLNQWPLKQEKLQALQQLVTEQLQLGHLEESNSPWNTPVFVIKKKSGKWRLLQDLRAVNATMHDMGALQPGLPSPVAVPKGWEIIIIDLQDCFFNIKLHPEDCKRFAFSVPSPNFKRPYQRFQWKVLPQGMKNSPTLCQKFVDKAILTVRDKYQDSYIVHYMDDILLAHPSRSIVDEILTSMIQALNKHGLVVSTEKIQKYDNLKYLGTHIQGDSVSYQKLQIRTDKLRTLNDFQKLLGNINWIRPFLKLTTGELKPLFEILNGDSNPISTRKLTPEACKALQLMNERLSTARVKRLDLSQPWSLCILKTEYTPTACLWQDGVVEWIHLPHISPKVITPYDIFCTQLIIKGRHRSKELFSKDPDYIVVPYTKVQFDLLLQEKEDWPISLLGFLGEVHFHLPKDPLLTFTLQTAIIFPHMTSTTPLEKGIVIFTDGSANGRSVTYIQGREPIIKENTQNTAQQAEIVAVITAFEEVSQPFNLYTDSKYVTGLFPEIETATLSPRTKIYTELKHLQRLIHKRQEKFYIGHIRGHTGLPGPLAQGNAYADSLTRILTAGKRTADGSEFEKRTADGSEFESPKKKAKVE

SEQ ID NO: 3298 - protein, 2028 aa, synthetic construct
MPAAKRVKLDGGDKKYSIGLDIGTNSVGWAVITDEYKVPSKKFKVLGNTDRHSIKKNLIGALLFDSGETAEATRLKRTARRRYTRRKNRICYLQEIFSNEMAKVDDSFFHRLEESFLVEEDKKHERHPIFGNIVDEVAYHEKYPTIYHLRKKLVDSTDKADLRLIYLALAHMIKFRGHFLIEGDLNPDNSDVDKLFIQLVQTYNQLFEENPINASGVDAKAILSARLSKSRRLENLIAQLPGEKKNGLFGNLIALSLGLTPNFKSNFDLAEDAKLQLSKDTYDDDLDNLLAQIGDQYADLFLAAKNLSDAILLSDILRVNTEITKAPLSASMIKRYDEHHQDLTLLKALVRQQLPEKYKEIFFDQSKNGYAGYIDGGASQEEFYKFIKPILEKMDGTEELLVKLNREDLLRKQRTFDNGSIPHQIHLGELHAILRRQEDFYPFLKDNREKIEKILTFRIPYYVGPLARGNSRFAWMTRKSEETITPWNFEEVVDKGASAQSFIERMTNFDKNLPNEKVLPKHSLLYEYFTVYNELTKVKYVTEGMRKPAFLSGEQKKAIVDLLFKTNRKVTVKQLKEDYFKKIECFDSVEISGVEDRFNASLGTYHDLLKIIKDKDFLDNEENEDILEDIVLTLTLFEDREMIEERLKTYAHLFDDKVMKQLKRRRYTGWGRLSRKLINGIRDKQSGKTILDFLKSDGFANRNFMQLIHDDSLTFKEDIQKAQVSGQGDSLHEHIANLAGSPAIKKGILQTVKVVDELVKVMGRHKPENIVIEMARENQTTQKGQKNSRERMKRIEEGIKELGSQILKEHPVENTQLQNEKLYLYYLQNGRDMYVDQELDINRLSDYDVDHIVPQSFLKDDSIDNKVLTRSDKARGKSDNVPSEEVVKKMKNYWRQLLNAKLITQRKFDNLTKAERGGLSELDKAGFIKRQLVETRQITKHVAQILDSRMNTKYDENDKLIREVKVITLKSKLVSDFRKDFQFYKVREINNYHHAHDAYLNAVVGTALIKKYPKLESEFVYGDYKVYDVRKMIAKSEQEIGKATAKYFFYSNIMNFFKTEITLANGEIRKRPLIETNGETGEIVWDKGRDFATVRKVLSMPQVNIVKKTEVQTGGFSKESILPKRNSDKLIARKKDWDPKKYGGFDSPTVAYSVLVVAKVEKGKSKKLKSVKELLGITIMERSSFEKNPIDFLEAKGYKEVKKDLIIKLPKYSLFELENGRKRMLASAGELQKGNELALPSKYVNFLYLASHYEKLKGSPEDNEQKQLFVEQHKHYLDEIIEQISEFSKRVILADANLDKVLSAYNKHRDKPIREQAENIIHLFTLTNLGAPAAFKYFDTTIDRKRYTSTKEVLDATLIHQSITGLYETRIDLSQLGGDGGGGGGSEAAAKGGGGSGGGRDIMKDIKVRLMTDSPDDSQDLMIGAIESNLFADQISWKSDQPVWLNQWPLKQEKLQALQQLVTEQLQLGHLEESNSPWNTPVFVIKKKSGKWRLLQDLRAVNATMHDMGALQPGLPSPVAVPKGWEIIIIDLQDCFFNIKLHPEDCKRFAFSVPSPNFKRPYQRFQWKVLPQGMKNSPTLCQKFVDKAILTVRDKYQDSYIVHYMDDILLAHPSRSIVDEILTSMIQALNKHGLVVSTEKIQKYDNLKYLGTHIQGDSVSYQKLQIRTDKLRTLNDFQKLLGNINWIRPFLKLTTGELKPLFEILNGDSNPISTRKLTPEACKALQLMNERLSTARVKRLDLSQPWSLCILKTEYTPTACLWQDGVVEWIHLPHISPKVITPYDIFCTQLIIKGRHRSKELFSKDPDYIVVPYTKVQFDLLLQEKEDWPISLLGFLGEVHFHLPKDPLLTFTLQTAIIFPHMTSTTPLEKGIVIFTDGSANGRSVTYIQGREPIIKENTQNTAQQAEIVAVITAFEEVSQPFNLYTDSKYVTGLFPEIETATLSPRTKIYTELKHLQRLIHKRQEKFYIGHIRGHTGLPGPLAQGNAYADSLTRILTAGKRTADGSEFEKRTADGSEFESPKKKAKVE

SEQ ID NO: 3299 - protein, 2028 aa, synthetic construct
MPAAKRVKLDGGDKKYSIGLDIGTNSVGWAVITDEYKVPSKKFKVLGNTDRHSIKKNLIGALLFDSGETAEATRLKRTARRRYTRRKNRICYLQEIFSNEMAKVDDSFFHRLEESFLVEEDKKHERHPIFGNIVDEVAYHEKYPTIYHLRKKLVDSTDKADLRLIYLALAHMIKFRGHFLIEGDLNPDNSDVDKLFIQLVQTYNQLFEENPINASGVDAKAILSARLSKSRRLENLIAQLPGEKKNGLFGNLIALSLGLTPNFKSNFDLAEDAKLQLSKDTYDDDLDNLLAQIGDQYADLFLAAKNLSDAILLSDILRVNTEITKAPLSASMIKRYDEHHQDLTLLKALVRQQLPEKYKEIFFDQSKNGYAGYIDGGASQEEFYKFIKPILEKMDGTEELLVKLNREDLLRKQRTFDNGSIPHQIHLGELHAILRRQEDFYPFLKDNREKIEKILTFRIPYYVGPLARGNSRFAWMTRKSEETITPWNFEEVVDKGASAQSFIERMTNFDKNLPNEKVLPKHSLLYEYFTVYNELTKVKYVTEGMRKPAFLSGEQKKAIVDLLFKTNRKVTVKQLKEDYFKKIECFDSVEISGVEDRFNASLGTYHDLLKIIKDKDFLDNEENEDILEDIVLTLTLFEDREMIEERLKTYAHLFDDKVMKQLKRRRYTGWGRLSRKLINGIRDKQSGKTILDFLKSDGFANRNFMQLIHDDSLTFKEDIQKAQVSGQGDSLHEHIANLAGSPAIKKGILQTVKVVDELVKVMGRHKPENIVIEMARENQTTQKGQKNSRERMKRIEEGIKELGSQILKEHPVENTQLQNEKLYLYYLQNGRDMYVDQELDINRLSDYDVDHIVPQSFLKDDSIDNKVLTRSDKARGKSDNVPSEEVVKKMKNYWRQLLNAKLITQRKFDNLTKAERGGLSELDKAGFIKRQLVETRQITKHVAQILDSRMNTKYDENDKLIREVKVITLKSKLVSDFRKDFQFYKVREINNYHHAHDAYLNAVVGTALIKKYPKLESEFVYGDYKVYDVRKMIAKSEQEIGKATAKYFFYSNIMNFFKTEITLANGEIRKRPLIETNGETGEIVWDKGRDFATVRKVLSMPQVNIVKKTEVQTGGFSKESILPKRNSDKLIARKKDWDPKKYGGFDSPTVAYSVLVVAKVEKGKSKKLKSVKELLGITIMERSSFEKNPIDFLEAKGYKEVKKDLIIKLPKYSLFELENGRKRMLASAGELQKGNELALPSKYVNFLYLASHYEKLKGSPEDNEQKQLFVEQHKHYLDEIIEQISEFSKRVILADANLDKVLSAYNKHRDKPIREQAENIIHLFTLTNLGAPAAFKYFDTTIDRKRYTSTKEVLDATLIHQSITGLYETRIDLSQLGGDGGEAAAKEAAAKEAAAKGGGRDIMKDIKVRLMTDSPDDSQDLMIGAIESNLFADQISWKSDQPVWLNQWPLKQEKLQALQQLVTEQLQLGHLEESNSPWNTPVFVIKKKSGKWRLLQDLRAVNATMHDMGALQPGLPSPVAVPKGWEIIIIDLQDCFFNIKLHPEDCKRFAFSVPSPNFKRPYQRFQWKVLPQGMKNSPTLCQKFVDKAILTVRDKYQDSYIVHYMDDILLAHPSRSIVDEILTSMIQALNKHGLVVSTEKIQKYDNLKYLGTHIQGDSVSYQKLQIRTDKLRTLNDFQKLLGNINWIRPFLKLTTGELKPLFEILNGDSNPISTRKLTPEACKALQLMNERLSTARVKRLDLSQPWSLCILKTEYTPTACLWQDGVVEWIHLPHISPKVITPYDIFCTQLIIKGRHRSKELFSKDPDYIVVPYTKVQFDLLLQEKEDWPISLLGFLGEVHFHLPKDPLLTFTLQTAIIFPHMTSTTPLEKGIVIFTDGSANGRSVTYIQGREPIIKENTQNTAQQAEIVAVITAFEEVSQPFNLYTDSKYVTGLFPEIETATLSPRTKIYTELKHLQRLIHKRQEKFYIGHIRGHTGLPGPLAQGNAYADSLTRILTAGKRTADGSEFEKRTADGSEFESPKKKAKVE

SEQ ID NO: 3300 - protein, 2024 aa, synthetic construct; identical to SEQ ID NO: 3213

SEQ ID NO: 3301 - protein, 2024 aa, synthetic construct
MPAAKRVKLDGGDKKYSIGLDIGTNSVGWAVITDEYKVPSKKFKVLGNTDRHSIKKNLIGALLFDSGETAEATRLKRTARRRYTRRKNRICYLQEIFSNEMAKVDDSFFHRLEESFLVEEDKKHERHPIFGNIVDEVAYHEKYPTIYHLRKKLVDSTDKADLRLIYLALAHMIKFRGHFLIEGDLNPDNSDVDKLFIQLVQTYNQLFEENPINASGVDAKAILSARLSKSRRLENLIAQLPGEKKNGLFGNLIALSLGLTPNFKSNFDLAEDAKLQLSKDTYDDDLDNLLAQIGDQYADLFLAAKNLSDAILLSDILRVNTEITKAPLSASMIKRYDEHHQDLTLLKALVRQQLPEKYKEIFFDQSKNGYAGYIDGGASQEEFYKFIKPILEKMDGTEELLVKLNREDLLRKQRTFDNGSIPHQIHLGELHAILRRQEDFYPFLKDNREKIEKILTFRIPYYVGPLARGNSRFAWMTRKSEETITPWNFEEVVDKGASAQSFIERMTNFDKNLPNEKVLPKHSLLYEYFTVYNELTKVKYVTEGMRKPAFLSGEQKKAIVDLLFKTNRKVTVKQLKEDYFKKIECFDSVEISGVEDRFNASLGTYHDLLKIIKDKDFLDNEENEDILEDIVLTLTLFEDREMIEERLKTYAHLFDDKVMKQLKRRRYTGWGRLSRKLINGIRDKQSGKTILDFLKSDGFANRNFMQLIHDDSLTFKEDIQKAQVSGQGDSLHEHIANLAGSPAIKKGILQTVKVVDELVKVMGRHKPENIVIEMARENQTTQKGQKNSRERMKRIEEGIKELGSQILKEHPVENTQLQNEKLYLYYLQNGRDMYVDQELDINRLSDYDVDHIVPQSFLKDDSIDNKVLTRSDKARGKSDNVPSEEVVKKMKNYWRQLLNAKLITQRKFDNLTKAERGGLSELDKAGFIKRQLVETRQITKHVAQILDSRMNTKYDENDKLIREVKVITLKSKLVSDFRKDFQFYKVREINNYHHAHDAYLNAVVGTALIKKYPKLESEFVYGDYKVYDVRKMIAKSEQEIGKATAKYFFYSNIMNFFKTEITLANGEIRKRPLIETNGETGEIVWDKGRDFATVRKVLSMPQVNIVKKTEVQTGGFSKESILPKRNSDKLIARKKDWDPKKYGGFDSPTVAYSVLVVAKVEKGKSKKLKSVKELLGITIMERSSFEKNPIDFLEAKGYKEVKKDLIIKLPKYSLFELENGRKRMLASAGELQKGNELALPSKYVNFLYLASHYEKLKGSPEDNEQKQLFVEQHKHYLDEIIEQISEFSKRVILADANLDKVLSAYNKHRDKPIREQAENIIHLFTLTNLGAPAAFKYFDTTIDRKRYTSTKEVLDATLIHQSITGLYETRIDLSQLGGDGGEAAAKGSSGGSGGGRDIMKDIKVRLMTDSPDDSQDLMIGAIESNLFADQISWKSDQPVWLNQWPLKQEKLQALQQLVTEQLQLGHLEESNSPWNTPVFVIKKKSGKWRLLQDLRAVNATMHDMGALQPGLPSPVAVPKGWEIIIIDLQDCFFNIKLHPEDCKRFAFSVPSPNFKRPYQRFQWKVLPQGMKNSPTLCQKFVDKAILTVRDKYQDSYIVHYMDDILLAHPSRSIVDEILTSMIQALNKHGLVVSTEKIQKYDNLKYLGTHIQGDSVSYQKLQIRTDKLRTLNDFQKLLGNINWIRPFLKLTTGELKPLFEILNGDSNPISTRKLTPEACKALQLMNERLSTARVKRLDLSQPWSLCILKTEYTPTACLWQDGVVEWIHLPHISPKVITPYDIFCTQLIIKGRHRSKELFSKDPDYIVVPYTKVQFDLLLQEKEDWPISLLGFLGEVHFHLPKDPLLTFTLQTAIIFPHMTSTTPLEKGIVIFTDGSANGRSVTYIQGREPIIKENTQNTAQQAEIVAVITAFEEVSQPFNLYTDSKYVTGLFPEIETATLSPRTKIYTELKHLQRLIHKRQEKFYIGHIRGHTGLPGPLAQGNAYADSLTRILTAGKRTADGSEFEKRTADGSEFESPKKKAKVE

SEQ ID NO: 3302 - protein, 2028 aa, synthetic construct
MPAAKRVKLDGGDKKYSIGLDIGTNSVGWAVITDEYKVPSKKFKVLGNTDRHSIKKNLIGALLFDSGETAEATRLKRTARRRYTRRKNRICYLQEIFSNEMAKVDDSFFHRLEESFLVEEDKKHERHPIFGNIVDEVAYHEKYPTIYHLRKKLVDSTDKADLRLIYLALAHMIKFRGHFLIEGDLNPDNSDVDKLFIQLVQTYNQLFEENPINASGVDAKAILSARLSKSRRLENLIAQLPGEKKNGLFGNLIALSLGLTPNFKSNFDLAEDAKLQLSKDTYDDDLDNLLAQIGDQYADLFLAAKNLSDAILLSDILRVNTEITKAPLSASMIKRYDEHHQDLTLLKALVRQQLPEKYKEIFFDQSKNGYAGYIDGGASQEEFYKFIKPILEKMDGTEELLVKLNREDLLRKQRTFDNGSIPHQIHLGELHAILRRQEDFYPFLKDNREKIEKILTFRIPYYVGPLARGNSRFAWMTRKSEETITPWNFEEVVDKGASAQSFIERMTNFDKNLPNEKVLPKHSLLYEYFTVYNELTKVKYVTEGMRKPAFLSGEQKKAIVDLLFKTNRKVTVKQLKEDYFKKIECFDSVEISGVEDRFNASLGTYHDLLKIIKDKDFLDNEENEDILEDIVLTLTLFEDREMIEERLKTYAHLFDDKVMKQLKRRRYTGWGRLSRKLINGIRDKQSGKTILDFLKSDGFANRNFMQLIHDDSLTFKEDIQKAQVSGQGDSLHEHIANLAGSPAIKKGILQTVKVVDELVKVMGRHKPENIVIEMARENQTTQKGQKNSRERMKRIEEGIKELGSQILKEHPVENTQLQNEKLYLYYLQNGRDMYVDQELDINRLSDYDVDHIVPQSFLKDDSIDNKVLTRSDKARGKSDNVPSEEVVKKMKNYWRQLLNAKLITQRKFDNLTKAERGGLSELDKAGFIKRQLVETRQITKHVAQILDSRMNTKYDENDKLIREVKVITLKSKLVSDFRKDFQFYKVREINNYHHAHDAYLNAVVGTALIKKYPKLESEFVYGDYKVYDVRKMIAKSEQEIGKATAKYFFYSNIMNFFKTEITLANGEIRKRPLIETNGETGEIVWDKGRDFATVRKVLSMPQVNIVKKTEVQTGGFSKESILPKRNSDKLIARKKDWDPKKYGGFDSPTVAYSVLVVAKVEKGKSKKLKSVKELLGITIMERSSFEKNPIDFLEAKGYKEVKKDLIIKLPKYSLFELENGRKRMLASAGELQKGNELALPSKYVNFLYLASHYEKLKGSPEDNEQKQLFVEQHKHYLDEIIEQISEFSKRVILADANLDKVLSAYNKHRDKPIREQAENIIHLFTLTNLGAPAAFKYFDTTIDRKRYTSTKEVLDATLIHQSITGLYETRIDLSQLGGDGGGGSGGSGGSGGSGGSGGGRDIMKDIKVRLMTDSPDDSQDLMIGAIESNLFADQISWKSDQPVWLNQWPLKQEKLQALQQLVTEQLQLGHLEESNSPWNTPVFVIKKKSGKWRLLQDLRAVNATMHDMGALQPGLPSPVAVPKGWEIIIIDLQDCFFNIKLHPEDCKRFAFSVPSPNFKRPYQRFQWKVLPQGMKNSPTLCQKFVDKAILTVRDKYQDSYIVHYMDDILLAHPSRSIVDEILTSMIQALNKHGLVVSTEKIQKYDNLKYLGTHIQGDSVSYQKLQIRTDKLRTLNDFQKLLGNINWIRPFLKLTTGELKPLFEILNGDSNPISTRKLTPEACKALQLMNERLSTARVKRLDLSQPWSLCILKTEYTPTACLWQDGVVEWIHLPHISPKVITPYDIFCTQLIIKGRHRSKELFSKDPDYIVVPYTKVQFDLLLQEKEDWPISLLGFLGEVHFHLPKDPLLTFTLQTAIIFPHMTSTTPLEKGIVIFTDGSANGRSVTYIQGREPIIKENTQNTAQQAEIVAVITAFEEVSQPFNLYTDSKYVTGLFPEIETATLSPRTKIYTELKHLQRLIHKRQEKFYIGHIRGHTGLPGPLAQGNAYADSLTRILTAGKRTADGSEFEKRTADGSEFESPKKKAKVE

SEQ ID NO: 3303 - protein, 2028 aa, synthetic construct
MPAAKRVKLDGGDKKYSIGLDIGTNSVGWAVITDEYKVPSKKFKVLGNTDRHSIKKNLIGALLFDSGETAEATRLKRTARRRYTRRKNRICYLQEIFSNEMAKVDDSFFHRLEESFLVEEDKKHERHPIFGNIVDEVAYHEKYPTIYHLRKKLVDSTDKADLRLIYLALAHMIKFRGHFLIEGDLNPDNSDVDKLFIQLVQTYNQLFEENPINASGVDAKAILSARLSKSRRLENLIAQLPGEKKNGLFGNLIALSLGLTPNFKSNFDLAEDAKLQLSKDTYDDDLDNLLAQIGDQYADLFLAAKNLSDAILLSDILRVNTEITKAPLSASMIKRYDEHHQDLTLLKALVRQQLPEKYKEIFFDQSKNGYAGYIDGGASQEEFYKFIKPILEKMDGTEELLVKLNREDLLRKQRTFDNGSIPHQIHLGELHAILRRQEDFYPFLKDNREKIEKILTFRIPYYVGPLARGNSRFAWMTRKSEETITPWNFEEVVDKGASAQSFIERMTNFDKNLPNEKVLPKHSLLYEYFTVYNELTKVKYVTEGMRKPAFLSGEQKKAIVDLLFKTNRKVTVKQLKEDYFKKIECFDSVEISGVEDRFNASLGTYHDLLKIIKDKDFLDNEENEDILEDIVLTLTLFEDREMIEERLKTYAHLFDDKVMKQLKRRRYTGWGRLSRKLINGIRDKQSGKTILDFLKSDGFANRNFMQLIHDDSLTFKEDIQKAQVSGQGDSLHEHIANLAGSPAIKKGILQTVKVVDELVKVMGRHKPENIVIEMARENQTTQKGQKNSRERMKRIEEGIKELGSQILKEHPVENTQLQNEKLYLYYLQNGRDMYVDQELDINRLSDYDVDHIVPQSFLKDDSIDNKVLTRSDKARGKSDNVPSEEVVKKMKNYWRQLLNAKLITQRKFDNLTKAERGGLSELDKAGFIKRQLVETRQITKHVAQILDSRMNTKYDENDKLIREVKVITLKSKLVSDFRKDFQFYKVREINNYHHAHDAYLNAVVGTALIKKYPKLESEFVYGDYKVYDVRKMIAKSEQEIGKATAKYFFYSNIMNFFKTEITLANGEIRKRPLIETNGETGEIVWDKGRDFATVRKVLSMPQVNIVKKTEVQTGGFSKESILPKRNSDKLIARKKDWDPKKYGGFDSPTVAYSVLVVAKVEKGKSKKLKSVKELLGITIMERSSFEKNPIDFLEAKGYKEVKKDLIIKLPKYSLFELENGRKRMLASAGELQKGNELALPSKYVNFLYLASHYEKLKGSPEDNEQKQLFVEQHKHYLDEIIEQISEFSKRVILADANLDKVLSAYNKHRDKPIREQAENIIHLFTLTNLGAPAAFKYFDTTIDRKRYTSTKEVLDATLIHQSITGLYETRIDLSQLGGDGGGSSGSSGSSGSSGSSGGGRDIMKDIKVRLMTDSPDDSQDLMIGAIESNLFADQISWKSDQPVWLNQWPLKQEKLQALQQLVTEQLQLGHLEESNSPWNTPVFVIKKKSGKWRLLQDLRAVNATMHDMGALQPGLPSPVAVPKGWEIIIIDLQDCFFNIKLHPEDCKRFAFSVPSPNFKRPYQRFQWKVLPQGMKNSPTLCQKFVDKAILTVRDKYQDSYIVHYMDDILLAHPSRSIVDEILTSMIQALNKHGLVVSTEKIQKYDNLKYLGTHIQGDSVSYQKLQIRTDKLRTLNDFQKLLGNINWIRPFLKLTTGELKPLFEILNGDSNPISTRKLTPEACKALQLMNERLSTARVKRLDLSQPWSLCILKTEYTPTACLWQDGVVEWIHLPHISPKVITPYDIFCTQLIIKGRHRSKELFSKDPDYIVVPYTKVQFDLLLQEKEDWPISLLGFLGEVHFHLPKDPLLTFTLQTAIIFPHMTSTTPLEKGIVIFTDGSANGRSVTYIQGREPIIKENTQNTAQQAEIVAVITAFEEVSQPFNLYTDSKYVTGLFPEIETATLSPRTKIYTELKHLQRLIHKRQEKFYIGHIRGHTGLPGPLAQGNAYADSLTRILTAGKRTADGSEFEKRTADGSEFESPKKKAKVE

SEQ ID NO: 3304 - protein, 2022 aa, synthetic construct; identical to SEQ ID NO: 3221

SEQ ID NO: 3305 - protein, 2022 aa, synthetic construct
MPAAKRVKLDGGDKKYSIGLDIGTNSVGWAVITDEYKVPSKKFKVLGNTDRHSIKKNLIGALLFDSGETAEATRLKRTARRRYTRRKNRICYLQEIFSNEMAKVDDSFFHRLEESFLVEEDKKHERHPIFGNIVDEVAYHEKYPTIYHLRKKLVDSTDKADLRLIYLALAHMIKFRGHFLIEGDLNPDNSDVDKLFIQLVQTYNQLFEENPINASGVDAKAILSARLSKSRRLENLIAQLPGEKKNGLFGNLIALSLGLTPNFKSNFDLAEDAKLQLSKDTYDDDLDNLLAQIGDQYADLFLAAKNLSDAILLSDILRVNTEITKAPLSASMIKRYDEHHQDLTLLKALVRQQLPEKYKEIFFDQSKNGYAGYIDGGASQEEFYKFIKPILEKMDGTEELLVKLNREDLLRKQRTFDNGSIPHQIHLGELHAILRRQEDFYPFLKDNREKIEKILTFRIPYYVGPLARGNSRFAWMTRKSEETITPWNFEEVVDKGASAQSFIERMTNFDKNLPNEKVLPKHSLLYEYFTVYNELTKVKYVTEGMRKPAFLSGEQKKAIVDLLFKTNRKVTVKQLKEDYFKKIECFDSVEISGVEDRFNASLGTYHDLLKIIKDKDFLDNEENEDILEDIVLTLTLFEDREMIEERLKTYAHLFDDKVMKQLKRRRYTGWGRLSRKLINGIRDKQSGKTILDFLKSDGFANRNFMQLIHDDSLTFKEDIQKAQVSGQGDSLHEHIANLAGSPAIKKGILQTVKVVDELVKVMGRHKPENIVIEMARENQTTQKGQKNSRERMKRIEEGIKELGSQILKEHPVENTQLQNEKLYLYYLQNGRDMYVDQELDINRLSDYDVDHIVPQSFLKDDSIDNKVLTRSDKARGKSDNVPSEEVVKKMKNYWRQLLNAKLITQRKFDNLTKAERGGLSELDKAGFIKRQLVETRQITKHVAQILDSRMNTKYDENDKLIREVKVITLKSKLVSDFRKDFQFYKVREINNYHHAHDAYLNAVVGTALIKKYPKLESEFVYGDYKVYDVRKMIAKSEQEIGKATAKYFFYSNIMNFFKTEITLANGEIRKRPLIETNGETGEIVWDKGRDFATVRKVLSMPQVNIVKKTEVQTGGFSKESILPKRNSDKLIARKKDWDPKKYGGFDSPTVAYSVLVVAKVEKGKSKKLKSVKELLGITIMERSSFEKNPIDFLEAKGYKEVKKDLIIKLPKYSLFELENGRKRMLASAGELQKGNELALPSKYVNFLYLASHYEKLKGSPEDNEQKQLFVEQHKHYLDEIIEQISEFSKRVILADANLDKVLSAYNKHRDKPIREQAENIIHLFTLTNLGAPAAFKYFDTTIDRKRYTSTKEVLDATLIHQSITGLYETRIDLSQLGGDGGGSSGGSPAPGGGRDIMKDIKVRLMTDSPDDSQDLMIGAIESNLFADQISWKSDQPVWLNQWPLKQEKLQALQQLVTEQLQLGHLEESNSPWNTPVFVIKKKSGKWRLLQDLRAVNATMHDMGALQPGLPSPVAVPKGWEIIIIDLQDCFFNIKLHPEDCKRFAFSVPSPNFKRPYQRFQWKVLPQGMKNSPTLCQKFVDKAILTVRDKYQDSYIVHYMDDILLAHPSRSIVDEILTSMIQALNKHGLVVSTEKIQKYDNLKYLGTHIQGDSVSYQKLQIRTDKLRTLNDFQKLLGNINWIRPFLKLTTGELKPLFEILNGDSNPISTRKLTPEACKALQLMNERLSTARVKRLDLSQPWSLCILKTEYTPTACLWQDGVVEWIHLPHISPKVITPYDIFCTQLIIKGRHRSKELFSKDPDYIVVPYTKVQFDLLLQEKEDWPISLLGFLGEVHFHLPKDPLLTFTLQTAIIFPHMTSTTPLEKGIVIFTDGSANGRSVTYIQGREPIIKENTQNTAQQAEIVAVITAFEEVSQPFNLYTDSKYVTGLFPEIETATLSPRTKIYTELKHLQRLIHKRQEKFYIGHIRGHTGLPGPLAQGNAYADSLTRILTAGKRTADGSEFEKRTADGSEFESPKKKAKVE

SEQ ID NO: 3306 - protein, 2024 aa, synthetic construct
MPAAKRVKLDGGDKKYSIGLDIGTNSVGWAVITDEYKVPSKKFKVLGNTDRHSIKKNLIGALLFDSGETAEATRLKRTARRRYTRRKNRICYLQEIFSNEMAKVDDSFFHRLEESFLVEEDKKHERHPIFGNIVDEVAYHEKYPTIYHLRKKLVDSTDKADLRLIYLALAHMIKFRGHFLIEGDLNPDNSDVDKLFIQLVQTYNQLFEENPINASGVDAKAILSARLSKSRRLENLIAQLPGEKKNGLFGNLIALSLGLTPNFKSNFDLAEDAKLQLSKDTYDDDLDNLLAQIGDQYADLFLAAKNLSDAILLSDILRVNTEITKAPLSASMIKRYDEHHQDLTLLKALVRQQLPEKYKEIFFDQSKNGYAGYIDGGASQEEFYKFIKPILEKMDGTEELLVKLNREDLLRKQRTFDNGSIPHQIHLGELHAILRRQEDFYPFLKDNREKIEKILTFRIPYYVGPLARGNSRFAWMTRKSEETITPWNFEEVVDKGASAQSFIERMTNFDKNLPNEKVLPKHSLLYEYFTVYNELTKVKYVTEGMRKPAFLSGEQKKAIVDLLFKTNRKVTVKQLKEDYFKKIECFDSVEISGVEDRFNASLGTYHDLLKIIKDKDFLDNEENEDILEDIVLTLTLFEDREMIEERLKTYAHLFDDKVMKQLKRRRYTGWGRLSRKLINGIRDKQSGKTILDFLKSDGFANRNFMQLIHDDSLTFKEDIQKAQVSGQGDSLHEHIANLAGSPAIKKGILQTVKVVDELVKVMGRHKPENIVIEMARENQTTQKGQKNSRERMKRIEEGIKELGSQILKEHPVENTQLQNEKLYLYYLQNGRDMYVDQELDINRLSDYDVDHIVPQSFLKDDSIDNKVLTRSDKARGKSDNVPSEEVVKKMKNYWRQLLNAKLITQRKFDNLTKAERGGLSELDKAGFIKRQLVETRQITKHVAQILDSRMNTKYDENDKLIREVKVITLKSKLVSDFRKDFQFYKVREINNYHHAHDAYLNAVVGTALIKKYPKLESEFVYGDYKVYDVRKMIAKSEQEIGKATAKYFFYSNIMNFFKTEITLANGEIRKRPLIETNGETGEIVWDKGRDFATVRKVLSMPQVNIVKKTEVQTGGFSKESILPKRNSDKLIARKKDWDPKKYGGFDSPTVAYSVLVVAKVEKGKSKKLKSVKELLGITIMERSSFEKNPIDFLEAKGYKEVKKDLIIKLPKYSLFELENGRKRMLASAGELQKGNELALPSKYVNFLYLASHYEKLKGSPEDNEQKQLFVEQHKHYLDEIIEQISEFSKRVILADANLDKVLSAYNKHRDKPIREQAENIIHLFTLTNLGAPAAFKYFDTTIDRKRYTSTKEVLDATLIHQSITGLYETRIDLSQLGGDGGEAAAKGGGGSSGGGRDIMKDIKVRLMTDSPDDSQDLMIGAIESNLFADQISWKSDQPVWLNQWPLKQEKLQALQQLVTEQLQLGHLEESNSPWNTPVFVIKKKSGKWRLLQDLRAVNATMHDMGALQPGLPSPVAVPKGWEIIIIDLQDCFFNIKLHPEDCKRFAFSVPSPNFKRPYQRFQWKVLPQGMKNSPTLCQKFVDKAILTVRDKYQDSYIVHYMDDILLAHPSRSIVDEILTSMIQALNKHGLVVSTEKIQKYDNLKYLGTHIQGDSVSYQKLQIRTDKLRTLNDFQKLLGNINWIRPFLKLTTGELKPLFEILNGDSNPISTRKLTPEACKALQLMNERLSTARVKRLDLSQPWSLCILKTEYTPTACLWQDGVVEWIHLPHISPKVITPYDIFCTQLIIKGRHRSKELFSKDPDYIVVPYTKVQFDLLLQEKEDWPISLLGFLGEVHFHLPKDPLLTFTLQTAIIFPHMTSTTPLEKGIVIFTDGSANGRSVTYIQGREPIIKENTQNTAQQAEIVAVITAFEEVSQPFNLYTDSKYVTGLFPEIETATLSPRTKIYTELKHLQRLIHKRQEKFYIGHIRGHTGLPGPLAQGNAYADSLTRILTAGKRTADGSEFEKRTADGSEFESPKKKAKVE

SEQ ID NO: 3307 - protein, 2021 aa, synthetic construct
MPAAKRVKLDGGDKKYSIGLDIGTNSVGWAVITDEYKVPSKKFKVLGNTDRHSIKKNLIGALLFDSGETAEATRLKRTARRRYTRRKNRICYLQEIFSNEMAKVDDSFFHRLEESFLVEEDKKHERHPIFGNIVDEVAYHEKYPTIYHLRKKLVDSTDKADLRLIYLALAHMIKFRGHFLIEGDLNPDNSDVDKLFIQLVQTYNQLFEENPINASGVDAKAILSARLSKSRRLENLIAQLPGEKKNGLFGNLIALSLGLTPNFKSNFDLAEDAKLQLSKDTYDDDLDNLLAQIGDQYADLFLAAKNLSDAILLSDILRVNTEITKAPLSASMIKRYDEHHQDLTLLKALVRQQLPEKYKEIFFDQSKNGYAGYIDGGASQEEFYKFIKPILEKMDGTEELLVKLNREDLLRKQRTFDNGSIPHQIHLGELHAILRRQEDFYPFLKDNREKIEKILTFRIPYYVGPLARGNSRFAWMTRKSEETITPWNFEEVVDKGASAQSFIERMTNFDKNLPNEKVLPKHSLLYEYFTVYNELTKVKYVTEGMRKPAFLSGEQKKAIVDLLFKTNRKVTVKQLKEDYFKKIECFDSVEISGVEDRFNASLGTYHDLLKIIKDKDFLDNEENEDILEDIVLTLTLFEDREMIEERLKTYAHLFDDKVMKQLKRRRYTGWGRLSRKLINGIRDKQSGKTILDFLKSDGFANRNFMQLIHDDSLTFKEDIQKAQVSGQGDSLHEHIANLAGSPAIKKGILQTVKVVDELVKVMGRHKPENIVIEMARENQTTQKGQKNSRERMKRIEEGIKELGSQILKEHPVENTQLQNEKLYLYYLQNGRDMYVDQELDINRLSDYDVDHIVPQSFLKDDSIDNKVLTRSDKARGKSDNVPSEEVVKKMKNYWRQLLNAKLITQRKFDNLTKAERGGLSELDKAGFIKRQLVETRQITKHVAQILDSRMNTKYDENDKLIREVKVITLKSKLVSDFRKDFQFYKVREINNYHHAHDAYLNAVVGTALIKKYPKLESEFVYGDYKVYDVRKMIAKSEQEIGKATAKYFFYSNIMNFFKTEITLANGEIRKRPLIETNGETGEIVWDKGRDFATVRKVLSMPQVNIVKKTEVQTGGFSKESILPKRNSDKLIARKKDWDPKKYGGFDSPTVAYSVLVVAKVEKGKSKKLKSVKELLGITIMERSSFEKNPIDFLEAKGYKEVKKDLIIKLPKYSLFELENGRKRMLASAGELQKGNELALPSKYVNFLYLASHYEKLKGSPEDNEQKQLFVEQHKHYLDEIIEQISEFSKRVILADANLDKVLSAYNKHRDKPIREQAENIIHLFTLTNLGAPAAFKYFDTTIDRKRYTSTKEVLDATLIHQSITGLYETRIDLSQLGGDGGGSSEAAAKGGGRDIMKDIKVRLMTDSPDDSQDLMIGAIESNLFADQISWKSDQPVWLNQWPLKQEKLQALQQLVTEQLQLGHLEESNSPWNTPVFVIKKKSGKWRLLQDLRAVNATMHDMGALQPGLPSPVAVPKGWEIIIIDLQDCFFNIKLHPEDCKRFAFSVPSPNFKRPYQRFQWKVLPQGMKNSPTLCQKFVDKAILTVRDKYQDSYIVHYMDDILLAHPSRSIVDEILTSMIQALNKHGLVVSTEKIQKYDNLKYLGTHIQGDSVSYQKLQIRTDKLRTLNDFQKLLGNINWIRPFLKLTTGELKPLFEILNGDSNPISTRKLTPEACKALQLMNERLSTARVKRLDLSQPWSLCILKTEYTPTACLWQDGVVEWIHLPHISPKVITPYDIFCTQLIIKGRHRSKELFSKDPDYIVVPYTKVQFDLLLQEKEDWPISLLGFLGEVHFHLPKDPLLTFTLQTAIIFPHMTSTTPLEKGIVIFTDGSANGRSVTYIQGREPIIKENTQNTAQQAEIVAVITAFEEVSQPFNLYTDSKYVTGLFPEIETATLSPRTKIYTELKHLQRLIHKRQEKFYIGHIRGHTGLPGPLAQGNAYADSLTRILTAGKRTADGSEFEKRTADGSEFESPKKKAKVE

SEQ ID NO: 3308 - protein, 2022 aa, synthetic construct; identical to SEQ ID NO: 3224

SEQ ID NO: 3309 - protein, 2024 aa, synthetic construct
MPAAKRVKLDGGDKKYSIGLDIGTNSVGWAVITDEYKVPSKKFKVLGNTDRHSIKKNLIGALLFDSGETAEATRLKRTARRRYTRRKNRICYLQEIFSNEMAKVDDSFFHRLEESFLVEEDKKHERHPIFGNIVDEVAYHEKYPTIYHLRKKLVDSTDKADLRLIYLALAHMIKFRGHFLIEGDLNPDNSDVDKLFIQLVQTYNQLFEENPINASGVDAKAILSARLSKSRRLENLIAQLPGEKKNGLFGNLIALSLGLTPNFKSNFDLAEDAKLQLSKDTYDDDLDNLLAQIGDQYADLFLAAKNLSDAILLSDILRVNTEITKAPLSASMIKRYDEHHQDLTLLKALVRQQLPEKYKEIFFDQSKNGYAGYIDGGASQEEFYKFIKPILEKMDGTEELLVKLNREDLLRKQRTFDNGSIPHQIHLGELHAILRRQEDFYPFLKDNREKIEKILTFRIPYYVGPLARGNSRFAWMTRKSEETITPWNFEEVVDKGASAQSFIERMTNFDKNLPNEKVLPKHSLLYEYFTVYNELTKVKYVTEGMRKPAFLSGEQKKAIVDLLFKTNRKVTVKQLKEDYFKKIECFDSVEISGVEDRFNASLGTYHDLLKIIKDKDFLDNEENEDILEDIVLTLTLFEDREMIEERLKTYAHLFDDKVMKQLKRRRYTGWGRLSRKLINGIRDKQSGKTILDFLKSDGFANRNFMQLIHDDSLTFKEDIQKAQVSGQGDSLHEHIANLAGSPAIKKGILQTVKVVDELVKVMGRHKPENIVIEMARENQTTQKGQKNSRERMKRIEEGIKELGSQILKEHPVENTQLQNEKLYLYYLQNGRDMYVDQELDINRLSDYDVDHIVPQSFLKDDSIDNKVLTRSDKARGKSDNVPSEEVVKKMKNYWRQLLNAKLITQRKFDNLTKAERGGLSELDKAGFIKRQLVETRQITKHVAQILDSRMNTKYDENDKLIREVKVITLKSKLVSDFRKDFQFYKVREINNYHHAHDAYLNAVVGTALIKKYPKLESEFVYGDYKVYDVRKMIAKSEQEIGKATAKYFFYSNIMNFFKTEITLANGEIRKRPLIETNGETGEIVWDKGRDFATVRKVLSMPQVNIVKKTEVQTGGFSKESILPKRNSDKLIARKKDWDPKKYGGFDSPTVAYSVLVVAKVEKGKSKKLKSVKELLGITIMERSSFEKNPIDFLEAKGYKEVKKDLIIKLPKYSLFELENGRKRMLASAGELQKGNELALPSKYVNFLYLASHYEKLKGSPEDNEQKQLFVEQHKHYLDEIIEQISEFSKRVILADANLDKVLSAYNKHRDKPIREQAENIIHLFTLTNLGAPAAFKYFDTTIDRKRYTSTKEVLDATLIHQSITGLYETRIDLSQLGGDGGPAPAPAPAPAPGGGRDIMKDIKVRLMTDSPDDSQDLMIGAIESNLFADQISWKSDQPVWLNQWPLKQEKLQALQQLVTEQLQLGHLEESNSPWNTPVFVIKKKSGKWRLLQDLRAVNATMHDMGALQPGLPSPVAVPKGWEIIIIDLQDCFFNIKLHPEDCKRFAFSVPSPNFKRPYQRFQWKVLPQGMKNSPTLCQKFVDKAILTVRDKYQDSYIVHYMDDILLAHPSRSIVDEILTSMIQALNKHGLVVSTEKIQKYDNLKYLGTHIQGDSVSYQKLQIRTDKLRTLNDFQKLLGNINWIRPFLKLTTGELKPLFEILNGDSNPISTRKLTPEACKALQLMNERLSTARVKRLDLSQPWSLCILKTEYTPTACLWQDGVVEWIHLPHISPKVITPYDIFCTQLIIKGRHRSKELFSKDPDYIVVPYTKVQFDLLLQEKEDWPISLLGFLGEVHFHLPKDPLLTFTLQTAIIFPHMTSTTPLEKGIVIFTDGSANGRSVTYIQGREPIIKENTQNTAQQAEIVAVITAFEEVSQPFNLYTDSKYVTGLFPEIETATLSPRTKIYTELKHLQRLIHKRQEKFYIGHIRGHTGLPGPLAQGNAYADSLTRILTAGKRTADGSEFEKRTADGSEFESPKKKAKVE

SEQ ID NO: 3310 - protein, 2024 aa, synthetic construct
MPAAKRVKLDGGDKKYSIGLDIGTNSVGWAVITDEYKVPSKKFKVLGNTDRHSIKKNLIGALLFDSGETAEATRLKRTARRRYTRRKNRICYLQEIFSNEMAKVDDSFFHRLEESFLVEEDKKHERHPIFGNIVDEVAYHEKYPTIYHLRKKLVDSTDKADLRLIYLALAHMIKFRGHFLIEGDLNPDNSDVDKLFIQLVQTYNQLFEENPINASGVDAKAILSARLSKSRRLENLIAQLPGEKKNGLFGNLIALSLGLTPNFKSNFDLAEDAKLQLSKDTYDDDLDNLLAQIGDQYADLFLAAKNLSDAILLSDILRVNTEITKAPLSASMIKRYDEHHQDLTLLKALVRQQLPEKYKEIFFDQSKNGYAGYIDGGASQEEFYKFIKPILEKMDGTEELLVKLNREDLLRKQRTFDNGSIPHQIHLGELHAILRRQEDFYPFLKDNREKIEKILTFRIPYYVGPLARGNSRFAWMTRKSEETITPWNFEEVVDKGASAQSFIERMTNFDKNLPNEKVLPKHSLLYEYFTVYNELTKVKYVTEGMRKPAFLSGEQKKAIVDLLFKTNRKVTVKQLKEDYFKKIECFDSVEISGVEDRFNASLGTYHDLLKIIKDKDFLDNEENEDILEDIVLTLTLFEDREMIEERLKTYAHLFDDKVMKQLKRRRYTGWGRLSRKLINGIRDKQSGKTILDFLKSDGFANRNFMQLIHDDSLTFKEDIQKAQVSGQGDSLHEHIANLAGSPAIKKGILQTVKVVDELVKVMGRHKPENIVIEMARENQTTQKGQKNSRERMKRIEEGIKELGSQILKEHPVENTQLQNEKLYLYYLQNGRDMYVDQELDINRLSDYDVDHIVPQSFLKDDSIDNKVLTRSDKARGKSDNVPSEEVVKKMKNYWRQLLNAKLITQRKFDNLTKAERGGLSELDKAGFIKRQLVETRQITKHVAQILDSRMNTKYDENDKLIREVKVITLKSKLVSDFRKDFQFYKVREINNYHHAHDAYLNAVVGTALIKKYPKLESEFVYGDYKVYDVRKMIAKSEQEIGKATAKYFFYSNIMNFFKTEITLANGEIRKRPLIETNGETGEIVWDKGRDFATVRKVLSMPQVNIVKKTEVQTGGFSKESILPKRNSDKLIARKKDWDPKKYGGFDSPTVAYSVLVVAKVEKGKSKKLKSVKELLGITIMERSSFEKNPIDFLEAKGYKEVKKDLIIKLPKYSLFELENGRKRMLASAGELQKGNELALPSKYVNFLYLASHYEKLKGSPEDNEQKQLFVEQHKHYLDEIIEQISEFSKRVILADANLDKVLSAYNKHRDKPIREQAENIIHLFTLTNLGAPAAFKYFDTTIDRKRYTSTKEVLDATLIHQSITGLYETRIDLSQLGGDGGGSSEAAAKGGSGGGRDIMKDIKVRLMTDSPDDSQDLMIGAIESNLFADQISWKSDQPVWLNQWPLKQEKLQALQQLVTEQLQLGHLEESNSPWNTPVFVIKKKSGKWRLLQDLRAVNATMHDMGALQPGLPSPVAVPKGWEIIIIDLQDCFFNIKLHPEDCKRFAFSVPSPNFKRPYQRFQWKVLPQGMKNSPTLCQKFVDKAILTVRDKYQDSYIVHYMDDILLAHPSRSIVDEILTSMIQALNKHGLVVSTEKIQKYDNLKYLGTHIQGDSVSYQKLQIRTDKLRTLNDFQKLLGNINWIRPFLKLTTGELKPLFEILNGDSNPISTRKLTPEACKALQLMNERLSTARVKRLDLSQPWSLCILKTEYTPTACLWQDGVVEWIHLPHISPKVITPYDIFCTQLIIKGRHRSKELFSKDPDYIVVPYTKVQFDLLLQEKEDWPISLLGFLGEVHFHLPKDPLLTFTLQTAIIFPHMTSTTPLEKGIVIFTDGSANGRSVTYIQGREPIIKENTQNTAQQAEIVAVITAFEEVSQPFNLYTDSKYVTGLFPEIETATLSPRTKIYTELKHLQRLIHKRQEKFYIGHIRGHTGLPGPLAQGNAYADSLTRILTAGKRTADGSEFEKRTADGSEFESPKKKAKVE

SEQ ID NO: 3311 - protein, 2024 aa, synthetic construct
MPAAKRVKLDGGDKKYSIGLDIGTNSVGWAVITDEYKVPSKKFKVLGNTDRHSIKKNLIGALLFDSGETAEATRLKRTARRRYTRRKNRICYLQEIFSNEMAKVDDSFFHRLEESFLVEEDKKHERHPIFGNIVDEVAYHEKYPTIYHLRKKLVDSTDKADLRLIYLALAHMIKFRGHFLIEGDLNPDNSDVDKLFIQLVQTYNQLFEENPINASGVDAKAILSARLSKSRRLENLIAQLPGEKKNGLFGNLIALSLGLTPNFKSNFDLAEDAKLQLSKDTYDDDLDNLLAQIGDQYADLFLAAKNLSDAILLSDILRVNTEITKAPLSASMIKRYDEHHQDLTLLKALVRQQLPEKYKEIFFDQSKNGYAGYIDGGASQEEFYKFIKPILEKMDGTEELLVKLNREDLLRKQRTFDNGSIPHQIHLGELHAILRRQEDFYPFLKDNREKIEKILTFRIPYYVGPLARGNSRFAWMTRKSEETITPWNFEEVVDKGASAQSFIERMTNFDKNLPNEKVLPKHSLLYEYFTVYNELTKVKYVTEGMRKPAFLSGEQKKAIVDLLFKTNRKVTVKQLKEDYFKKIECFDSVEISGVEDRFNASLGTYHDLLKIIKDKDFLDNEENEDILEDIVLTLTLFEDREMIEERLKTYAHLFDDKVMKQLKRRRYTGWGRLSRKLINGIRDKQSGKTILDFLKSDGFANRNFMQLIHDDSLTFKEDIQKAQVSGQGDSLHEHIANLAGSPAIKKGILQTVKVVDELVKVMGRHKPENIVIEMARENQTTQKGQKNSRERMKRIEEGIKELGSQILKEHPVENTQLQNEKLYLYYLQNGRDMYVDQELDINRLSDYDVDHIVPQSFLKDDSIDNKVLTRSDKARGKSDNVPSEEVVKKMKNYWRQLLNAKLITQRKFDNLTKAERGGLSELDKAGFIKRQLVETRQITKHVAQILDSRMNTKYDENDKLIREVKVITLKSKLVSDFRKDFQFYKVREINNYHHAHDAYLNAVVGTALIKKYPKLESEFVYGDYKVYDVRKMIAKSEQEIGKATAKYFFYSNIMNFFKTEITLANGEIRKRPLIETNGETGEIVWDKGRDFATVRKVLSMPQVNIVKKTEVQTGGFSKESILPKRNSDKLIARKKDWDPKKYGGFDSPTVAYSVLVVAKVEKGKSKKLKSVKELLGITIMERSSFEKNPIDFLEAKGYKEVKKDLIIKLPKYSLFELENGRKRMLASAGELQKGNELALPSKYVNFLYLASHYEKLKGSPEDNEQKQLFVEQHKHYLDEIIEQISEFSKRVILADANLDKVLSAYNKHRDKPIREQAENIIHLFTLTNLGAPAAFKYFDTTIDRKRYTSTKEVLDATLIHQSITGLYETRIDLSQLGGDGGGGGGSSEAAAKGGGRDIMKDIKVRLMTDSPDDSQDLMIGAIESNLFADQISWKSDQPVWLNQWPLKQEKLQALQQLVTEQLQLGHLEESNSPWNTPVFVIKKKSGKWRLLQDLRAVNATMHDMGALQPGLPSPVAVPKGWEIIIIDLQDCFFNIKLHPEDCKRFAFSVPSPNFKRPYQRFQWKVLPQGMKNSPTLCQKFVDKAILTVRDKYQDSYIVHYMDDILLAHPSRSIVDEILTSMIQALNKHGLVVSTEKIQKYDNLKYLGTHIQGDSVSYQKLQIRTDKLRTLNDFQKLLGNINWIRPFLKLTTGELKPLFEILNGDSNPISTRKLTPEACKALQLMNERLSTARVKRLDLSQPWSLCILKTEYTPTACLWQDGVVEWIHLPHISPKVITPYDIFCTQLIIKGRHRSKELFSKDPDYIVVPYTKVQFDLLLQEKEDWPISLLGFLGEVHFHLPKDPLLTFTLQTAIIFPHMTSTTPLEKGIVIFTDGSANGRSVTYIQGREPIIKENTQNTAQQAEIVAVITAFEEVSQPFNLYTDSKYVTGLFPEIETATLSPRTKIYTELKHLQRLIHKRQEKFYIGHIRGHTGLPGPLAQGNAYADSLTRILTAGKRTADGSEFEKRTADGSEFESPKKKAKVE

SEQ ID NO: 3312 - protein, 2022 aa, synthetic construct; identical to SEQ ID NO: 3229

SEQ ID NO: 3313 - protein, 2021 aa, synthetic construct; identical to SEQ ID NO: 3208

SEQ ID NO: 3314 - protein, 2024 aa, synthetic construct
MPAAKRVKLDGGDKKYSIGLDIGTNSVGWAVITDEYKVPSKKFKVLGNTDRHSIKKNLIGALLFDSGETAEATRLKRTARRRYTRRKNRICYLQEIFSNEMAKVDDSFFHRLEESFLVEEDKKHERHPIFGNIVDEVAYHEKYPTIYHLRKKLVDSTDKADLRLIYLALAHMIKFRGHFLIEGDLNPDNSDVDKLFIQLVQTYNQLFEENPINASGVDAKAILSARLSKSRRLENLIAQLPGEKKNGLFGNLIALSLGLTPNFKSNFDLAEDAKLQLSKDTYDDDLDNLLAQIGDQYADLFLAAKNLSDAILLSDILRVNTEITKAPLSASMIKRYDEHHQDLTLLKALVRQQLPEKYKEIFFDQSKNGYAGYIDGGASQEEFYKFIKPILEKMDGTEELLVKLNREDLLRKQRTFDNGSIPHQIHLGELHAILRRQEDFYPFLKDNREKIEKILTFRIPYYVGPLARGNSRFAWMTRKSEETITPWNFEEVVDKGASAQSFIERMTNFDKNLPNEKVLPKHSLLYEYFTVYNELTKVKYVTEGMRKPAFLSGEQKKAIVDLLFKTNRKVTVKQLKEDYFKKIECFDSVEISGVEDRFNASLGTYHDLLKIIKDKDFLDNEENEDILEDIVLTLTLFEDREMIEERLKTYAHLFDDKVMKQLKRRRYTGWGRLSRKLINGIRDKQSGKTILDFLKSDGFANRNFMQLIHDDSLTFKEDIQKAQVSGQGDSLHEHIANLAGSPAIKKGILQTVKVVDELVKVMGRHKPENIVIEMARENQTTQKGQKNSRERMKRIEEGIKELGSQILKEHPVENTQLQNEKLYLYYLQNGRDMYVDQELDINRLSDYDVDHIVPQSFLKDDSIDNKVLTRSDKARGKSDNVPSEEVVKKMKNYWRQLLNAKLITQRKFDNLTKAERGGLSELDKAGFIKRQLVETRQITKHVAQILDSRMNTKYDENDKLIREVKVITLKSKLVSDFRKDFQFYKVREINNYHHAHDAYLNAVVGTALIKKYPKLESEFVYGDYKVYDVRKMIAKSEQEIGKATAKYFFYSNIMNFFKTEITLANGEIRKRPLIETNGETGEIVWDKGRDFATVRKVLSMPQVNIVKKTEVQTGGFSKESILPKRNSDKLIARKKDWDPKKYGGFDSPTVAYSVLVVAKVEKGKSKKLKSVKELLGITIMERSSFEKNPIDFLEAKGYKEVKKDLIIKLPKYSLFELENGRKRMLASAGELQKGNELALPSKYVNFLYLASHYEKLKGSPEDNEQKQLFVEQHKHYLDEIIEQISEFSKRVILADANLDKVLSAYNKHRDKPIREQAENIIHLFTLTNLGAPAAFKYFDTTIDRKRYTSTKEVLDATLIHQSITGLYETRIDLSQLGGDGGGSSGGSEAAAKGGGRDIMKDIKVRLMTDSPDDSQDLMIGAIESNLFADQISWKSDQPVWLNQWPLKQEKLQALQQLVTEQLQLGHLEESNSPWNTPVFVIKKKSGKWRLLQDLRAVNATMHDMGALQPGLPSPVAVPKGWEIIIIDLQDCFFNIKLHPEDCKRFAFSVPSPNFKRPYQRFQWKVLPQGMKNSPTLCQKFVDKAILTVRDKYQDSYIVHYMDDILLAHPSRSIVDEILTSMIQALNKHGLVVSTEKIQKYDNLKYLGTHIQGDSVSYQKLQIRTDKLRTLNDFQKLLGNINWIRPFLKLTTGELKPLFEILNGDSNPISTRKLTPEACKALQLMNERLSTARVKRLDLSQPWSLCILKTEYTPTACLWQDGVVEWIHLPHISPKVITPYDIFCTQLIIKGRHRSKELFSKDPDYIVVPYTKVQFDLLLQEKEDWPISLLGFLGEVHFHLPKDPLLTFTLQTAIIFPHMTSTTPLEKGIVIFTDGSANGRSVTYIQGREPIIKENTQNTAQQAEIVAVITAFEEVSQPFNLYTDSKYVTGLFPEIETATLSPRTKIYTELKHLQRLIHKRQEKFYIGHIRGHTGLPGPLAQGNAYADSLTRILTAGKRTADGSEFEKRTADGSEFESPKKKAKVE

SEQ ID NO: 3315 - protein, 2022 aa, synthetic construct; identical to SEQ ID NO: 3199

SEQ ID NO: 3316 - protein, 2022 aa, synthetic construct
MPAAKRVKLDGGDKKYSIGLDIGTNSVGWAVITDEYKVPSKKFKVLGNTDRHSIKKNLIGALLFDSGETAEATRLKRTARRRYTRRKNRICYLQEIFSNEMAKVDDSFFHRLEESFLVEEDKKHERHPIFGNIVDEVAYHEKYPTIYHLRKKLVDSTDKADLRLIYLALAHMIKFRGHFLIEGDLNPDNSDVDKLFIQLVQTYNQLFEENPINASGVDAKAILSARLSKSRRLENLIAQLPGEKKNGLFGNLIALSLGLTPNFKSNFDLAEDAKLQLSKDTYDDDLDNLLAQIGDQYADLFLAAKNLSDAILLSDILRVNTEITKAPLSASMIKRYDEHHQDLTLLKALVRQQLPEKYKEIFFDQSKNGYAGYIDGGASQEEFYKFIKPILEKMDGTEELLVKLNREDLLRKQRTFDNGSIPHQIHLGELHAILRRQEDFYPFLKDNREKIEKILTFRIPYYVGPLARGNSRFAWMTRKSEETITPWNFEEVVDKGASAQSFIERMTNFDKNLPNEKVLPKHSLLYEYFTVYNELTKVKYVTEGMRKPAFLSGEQKKAIVDLLFKTNRKVTVKQLKEDYFKKIECFDSVEISGVEDRFNASLGTYHDLLKIIKDKDFLDNEENEDILEDIVLTLTLFEDREMIEERLKTYAHLFDDKVMKQLKRRRYTGWGRLSRKLINGIRDKQSGKTILDFLKSDGFANRNFMQLIHDDSLTFKEDIQKAQVSGQGDSLHEHIANLAGSPAIKKGILQTVKVVDELVKVMGRHKPENIVIEMARENQTTQKGQKNSRERMKRIEEGIKELGSQILKEHPVENTQLQNEKLYLYYLQNGRDMYVDQELDINRLSDYDVDHIVPQSFLKDDSIDNKVLTRSDKARGKSDNVPSEEVVKKMKNYWRQLLNAKLITQRKFDNLTKAERGGLSELDKAGFIKRQLVETRQITKHVAQILDSRMNTKYDENDKLIREVKVITLKSKLVSDFRKDFQFYKVREINNYHHAHDAYLNAVVGTALIKKYPKLESEFVYGDYKVYDVRKMIAKSEQEIGKATAKYFFYSNIMNFFKTEITLANGEIRKRPLIETNGETGEIVWDKGRDFATVRKVLSMPQVNIVKKTEVQTGGFSKESILPKRNSDKLIARKKDWDPKKYGGFDSPTVAYSVLVVAKVEKGKSKKLKSVKELLGITIMERSSFEKNPIDFLEAKGYKEVKKDLIIKLPKYSLFELENGRKRMLASAGELQKGNELALPSKYVNFLYLASHYEKLKGSPEDNEQKQLFVEQHKHYLDEIIEQISEFSKRVILADANLDKVLSAYNKHRDKPIREQAENIIHLFTLTNLGAPAAFKYFDTTIDRKRYTSTKEVLDATLIHQSITGLYETRIDLSQLGGDGGGGSGGSGGSGGGRDIMKDIKVRLMTDSPDDSQDLMIGAIESNLFADQISWKSDQPVWLNQWPLKQEKLQALQQLVTEQLQLGHLEESNSPWNTPVFVIKKKSGKWRLLQDLRAVNATMHDMGALQPGLPSPVAVPKGWEIIIIDLQDCFFNIKLHPEDCKRFAFSVPSPNFKRPYQRFQWKVLPQGMKNSPTLCQKFVDKAILTVRDKYQDSYIVHYMDDILLAHPSRSIVDEILTSMIQALNKHGLVVSTEKIQKYDNLKYLGTHIQGDSVSYQKLQIRTDKLRTLNDFQKLLGNINWIRPFLKLTTGELKPLFEILNGDSNPISTRKLTPEACKALQLMNERLSTARVKRLDLSQPWSLCILKTEYTPTACLWQDGVVEWIHLPHISPKVITPYDIFCTQLIIKGRHRSKELFSKDPDYIVVPYTKVQFDLLLQEKEDWPISLLGFLGEVHFHLPKDPLLTFTLQTAIIFPHMTSTTPLEKGIVIFTDGSANGRSVTYIQGREPIIKENTQNTAQQAEIVAVITAFEEVSQPFNLYTDSKYVTGLFPEIETATLSPRTKIYTELKHLQRLIHKRQEKFYIGHIRGHTGLPGPLAQGNAYADSLTRILTAGKRTADGSEFEKRTADGSEFESPKKKAKVE

SEQ ID NO: 3317 - protein, 2025 aa, synthetic construct
MPAAKRVKLDGGDKKYSIGLDIGTNSVGWAVITDEYKVPSKKFKVLGNTDRHSIKKNLIGALLFDSGETAEATRLKRTARRRYTRRKNRICYLQEIFSNEMAKVDDSFFHRLEESFLVEEDKKHERHPIFGNIVDEVAYHEKYPTIYHLRKKLVDSTDKADLRLIYLALAHMIKFRGHFLIEGDLNPDNSDVDKLFIQLVQTYNQLFEENPINASGVDAKAILSARLSKSRRLENLIAQLPGEKKNGLFGNLIALSLGLTPNFKSNFDLAEDAKLQLSKDTYDDDLDNLLAQIGDQYADLFLAAKNLSDAILLSDILRVNTEITKAPLSASMIKRYDEHHQDLTLLKALVRQQLPEKYKEIFFDQSKNGYAGYIDGGASQEEFYKFIKPILEKMDGTEELLVKLNREDLLRKQRTFDNGSIPHQIHLGELHAILRRQEDFYPFLKDNREKIEKILTFRIPYYVGPLARGNSRFAWMTRKSEETITPWNFEEVVDKGASAQSFIERMTNFDKNLPNEKVLPKHSLLYEYFTVYNELTKVKYVTEGMRKPAFLSGEQKKAIVDLLFKTNRKVTVKQLKEDYFKKIECFDSVEISGVEDRFNASLGTYHDLLKIIKDKDFLDNEENEDILEDIVLTLTLFEDREMIEERLKTYAHLFDDKVMKQLKRRRYTGWGRLSRKLINGIRDKQSGKTILDFLKSDGFANRNFMQLIHDDSLTFKEDIQKAQVSGQGDSLHEHIANLAGSPAIKKGILQTVKVVDELVKVMGRHKPENIVIEMARENQTTQKGQKNSRERMKRIEEGIKELGSQILKEHPVENTQLQNEKLYLYYLQNGRDMYVDQELDINRLSDYDVDHIVPQSFLKDDSIDNKVLTRSDKARGKSDNVPSEEVVKKMKNYWRQLLNAKLITQRKFDNLTKAERGGLSELDKAGFIKRQLVETRQITKHVAQILDSRMNTKYDENDKLIREVKVITLKSKLVSDFRKDFQFYKVREINNYHHAHDAYLNAVVGTALIKKYPKLESEFVYGDYKVYDVRKMIAKSEQEIGKATAKYFFYSNIMNFFKTEITLANGEIRKRPLIETNGETGEIVWDKGRDFATVRKVLSMPQVNIVKKTEVQTGGFSKESILPKRNSDKLIARKKDWDPKKYGGFDSPTVAYSVLVVAKVEKGKSKKLKSVKELLGITIMERSSFEKNPIDFLEAKGYKEVKKDLIIKLPKYSLFELENGRKRMLASAGELQKGNELALPSKYVNFLYLASHYEKLKGSPEDNEQKQLFVEQHKHYLDEIIEQISEFSKRVILADANLDKVLSAYNKHRDKPIREQAENIIHLFTLTNLGAPAAFKYFDTTIDRKRYTSTKEVLDATLIHQSITGLYETRIDLSQLGGDGGGGSGGSGGSGGSGGGRDIMKDIKVRLMTDSPDDSQDLMIGAIESNLFADQISWKSDQPVWLNQWPLKQEKLQALQQLVTEQLQLGHLEESNSPWNTPVFVIKKKSGKWRLLQDLRAVNATMHDMGALQPGLPSPVAVPKGWEIIIIDLQDCFFNIKLHPEDCKRFAFSVPSPNFKRPYQRFQWKVLPQGMKNSPTLCQKFVDKAILTVRDKYQDSYIVHYMDDILLAHPSRSIVDEILTSMIQALNKHGLVVSTEKIQKYDNLKYLGTHIQGDSVSYQKLQIRTDKLRTLNDFQKLLGNINWIRPFLKLTTGELKPLFEILNGDSNPISTRKLTPEACKALQLMNERLSTARVKRLDLSQPWSLCILKTEYTPTACLWQDGVVEWIHLPHISPKVITPYDIFCTQLIIKGRHRSKELFSKDPDYIVVPYTKVQFDLLLQEKEDWPISLLGFLGEVHFHLPKDPLLTFTLQTAIIFPHMTSTTPLEKGIVIFTDGSANGRSVTYIQGREPIIKENTQNTAQQAEIVAVITAFEEVSQPFNLYTDSKYVTGLFPEIETATLSPRTKIYTELKHLQRLIHKRQEKFYIGHIRGHTGLPGPLAQGNAYADSLTRILTAGKRTADGSEFEKRTADGSEFESPKKKAKVE

SEQ ID NO: 3318 - protein, 2024 aa, synthetic construct; identical to SEQ ID NO: 3207

SEQ ID NO: 3319 - protein, 2016 aa, synthetic construct; identical to SEQ ID NO: 3210

SEQ ID NO: 3320 - protein, 2024 aa, synthetic construct
MPAAKRVKLDGGDKKYSIGLDIGTNSVGWAVITDEYKVPSKKFKVLGNTDRHSIKKNLIGALLFDSGETAEATRLKRTARRRYTRRKNRICYLQEIFSNEMAKVDDSFFHRLEESFLVEEDKKHERHPIFGNIVDEVAYHEKYPTIYHLRKKLVDSTDKADLRLIYLALAHMIKFRGHFLIEGDLNPDNSDVDKLFIQLVQTYNQLFEENPINASGVDAKAILSARLSKSRRLENLIAQLPGEKKNGLFGNLIALSLGLTPNFKSNFDLAEDAKLQLSKDTYDDDLDNLLAQIGDQYADLFLAAKNLSDAILLSDILRVNTEITKAPLSASMIKRYDEHHQDLTLLKALVRQQLPEKYKEIFFDQSKNGYAGYIDGGASQEEFYKFIKPILEKMDGTEELLVKLNREDLLRKQRTFDNGSIPHQIHLGELHAILRRQEDFYPFLKDNREKIEKILTFRIPYYVGPLARGNSRFAWMTRKSEETITPWNFEEVVDKGASAQSFIERMTNFDKNLPNEKVLPKHSLLYEYFTVYNELTKVKYVTEGMRKPAFLSGEQKKAIVDLLFKTNRKVTVKQLKEDYFKKIECFDSVEISGVEDRFNASLGTYHDLLKIIKDKDFLDNEENEDILEDIVLTLTLFEDREMIEERLKTYAHLFDDKVMKQLKRRRYTGWGRLSRKLINGIRDKQSGKTILDFLKSDGFANRNFMQLIHDDSLTFKEDIQKAQVSGQGDSLHEHIANLAGSPAIKKGILQTVKVVDELVKVMGRHKPENIVIEMARENQTTQKGQKNSRERMKRIEEGIKELGSQILKEHPVENTQLQNEKLYLYYLQNGRDMYVDQELDINRLSDYDVDHIVPQSFLKDDSIDNKVLTRSDKARGKSDNVPSEEVVKKMKNYWRQLLNAKLITQRKFDNLTKAERGGLSELDKAGFIKRQLVETRQITKHVAQILDSRMNTKYDENDKLIREVKVITLKSKLVSDFRKDFQFYKVREINNYHHAHDAYLNAVVGTALIKKYPKLESEFVYGDYKVYDVRKMIAKSEQEIGKATAKYFFYSNIMNFFKTEITLANGEIRKRPLIETNGETGEIVWDKGRDFATVRKVLSMPQVNIVKKTEVQTGGFSKESILPKRNSDKLIARKKDWDPKKYGGFDSPTVAYSVLVVAKVEKGKSKKLKSVKELLGITIMERSSFEKNPIDFLEAKGYKEVKKDLIIKLPKYSLFELENGRKRMLASAGELQKGNELALPSKYVNFLYLASHYEKLKGSPEDNEQKQLFVEQHKHYLDEIIEQISEFSKRVILADANLDKVLSAYNKHRDKPIREQAENIIHLFTLTNLGAPAAFKYFDTTIDRKRYTSTKEVLDATLIHQSITGLYETRIDLSQLGGDGGGGSPAPEAAAKGGGRDIMKDIKVRLMTDSPDDSQDLMIGAIESNLFADQISWKSDQPVWLNQWPLKQEKLQALQQLVTEQLQLGHLEESNSPWNTPVFVIKKKSGKWRLLQDLRAVNATMHDMGALQPGLPSPVAVPKGWEIIIIDLQDCFFNIKLHPEDCKRFAFSVPSPNFKRPYQRFQWKVLPQGMKNSPTLCQKFVDKAILTVRDKYQDSYIVHYMDDILLAHPSRSIVDEILTSMIQALNKHGLVVSTEKIQKYDNLKYLGTHIQGDSVSYQKLQIRTDKLRTLNDFQKLLGNINWIRPFLKLTTGELKPLFEILNGDSNPISTRKLTPEACKALQLMNERLSTARVKRLDLSQPWSLCILKTEYTPTACLWQDGVVEWIHLPHISPKVITPYDIFCTQLIIKGRHRSKELFSKDPDYIVVPYTKVQFDLLLQEKEDWPISLLGFLGEVHFHLPKDPLLTFTLQTAIIFPHMTSTTPLEKGIVIFTDGSANGRSVTYIQGREPIIKENTQNTAQQAEIVAVITAFEEVSQPFNLYTDSKYVTGLFPEIETATLSPRTKIYTELKHLQRLIHKRQEKFYIGHIRGHTGLPGPLAQGNAYADSLTRILTAGKRTADGSEFEKRTADGSEFESPKKKAKVE

SEQ ID NO: 3321 - protein, 2022 aa, synthetic construct; identical to SEQ ID NO: 3215

SEQ ID NO: 3322 - protein, 2024 aa, synthetic construct; identical to SEQ ID NO: 3232

SEQ ID NO: 3323 - protein, 2024 aa, synthetic construct; identical to SEQ ID NO: 3235

SEQ ID NO: 3324 - protein, 2024 aa, synthetic construct; identical to SEQ ID NO: 3236

SEQ ID NO: 3325 - protein, 2024 aa, synthetic construct
MPAAKRVKLDGGDKKYSIGLDIGTNSVGWAVITDEYKVPSKKFKVLGNTDRHSIKKNLIGALLFDSGETAEATRLKRTARRRYTRRKNRICYLQEIFSNEMAKVDDSFFHRLEESFLVEEDKKHERHPIFGNIVDEVAYHEKYPTIYHLRKKLVDSTDKADLRLIYLALAHMIKFRGHFLIEGDLNPDNSDVDKLFIQLVQTYNQLFEENPINASGVDAKAILSARLSKSRRLENLIAQLPGEKKNGLFGNLIALSLGLTPNFKSNFDLAEDAKLQLSKDTYDDDLDNLLAQIGDQYADLFLAAKNLSDAILLSDILRVNTEITKAPLSASMIKRYDEHHQDLTLLKALVRQQLPEKYKEIFFDQSKNGYAGYIDGGASQEEFYKFIKPILEKMDGTEELLVKLNREDLLRKQRTFDNGSIPHQIHLGELHAILRRQEDFYPFLKDNREKIEKILTFRIPYYVGPLARGNSRFAWMTRKSEETITPWNFEEVVDKGASAQSFIERMTNFDKNLPNEKVLPKHSLLYEYFTVYNELTKVKYVTEGMRKPAFLSGEQKKAIVDLLFKTNRKVTVKQLKEDYFKKIECFDSVEISGVEDRFNASLGTYHDLLKIIKDKDFLDNEENEDILEDIVLTLTLFEDREMIEERLKTYAHLFDDKVMKQLKRRRYTGWGRLSRKLINGIRDKQSGKTILDFLKSDGFANRNFMQLIHDDSLTFKEDIQKAQVSGQGDSLHEHIANLAGSPAIKKGILQTVKVVDELVKVMGRHKPENIVIEMARENQTTQKGQKNSRERMKRIEEGIKELGSQILKEHPVENTQLQNEKLYLYYLQNGRDMYVDQELDINRLSDYDVDHIVPQSFLKDDSIDNKVLTRSDKARGKSDNVPSEEVVKKMKNYWRQLLNAKLITQRKFDNLTKAERGGLSELDKAGFIKRQLVETRQITKHVAQILDSRMNTKYDENDKLIREVKVITLKSKLVSDFRKDFQFYKVREINNYHHAHDAYLNAVVGTALIKKYPKLESEFVYGDYKVYDVRKMIAKSEQEIGKATAKYFFYSNIMNFFKTEITLANGEIRKRPLIETNGETGEIVWDKGRDFATVRKVLSMPQVNIVKKTEVQTGGFSKESILPKRNSDKLIARKKDWDPKKYGGFDSPTVAYSVLVVAKVEKGKSKKLKSVKELLGITIMERSSFEKNPIDFLEAKGYKEVKKDLIIKLPKYSLFELENGRKRMLASAGELQKGNELALPSKYVNFLYLASHYEKLKGSPEDNEQKQLFVEQHKHYLDEIIEQISEFSKRVILADANLDKVLSAYNKHRDKPIREQAENIIHLFTLTNLGAPAAFKYFDTTIDRKRYTSTKEVLDATLIHQSITGLYETRIDLSQLGGDGGGGGGGSEAAAKGGGRDIMKDIKVRLMTDSPDDSQDLMIGAIESNLFADQISWKSDQPVWLNQWPLKQEKLQALQQLVTEQLQLGHLEESNSPWNTPVFVIKKKSGKWRLLQDLRAVNATMHDMGALQPGLPSPVAVPKGWEIIIIDLQDCFFNIKLHPEDCKRFAFSVPSPNFKRPYQRFQWKVLPQGMKNSPTLCQKFVDKAILTVRDKYQDSYIVHYMDDILLAHPSRSIVDEILTSMIQALNKHGLVVSTEKIQKYDNLKYLGTHIQGDSVSYQKLQIRTDKLRTLNDFQKLLGNINWIRPFLKLTTGELKPLFEILNGDSNPISTRKLTPEACKALQLMNERLSTARVKRLDLSQPWSLCILKTEYTPTACLWQDGVVEWIHLPHISPKVITPYDIFCTQLIIKGRHRSKELFSKDPDYIVVPYTKVQFDLLLQEKEDWPISLLGFLGEVHFHLPKDPLLTFTLQTAIIFPHMTSTTPLEKGIVIFTDGSANGRSVTYIQGREPIIKENTQNTAQQAEIVAVITAFEEVSQPFNLYTDSKYVTGLFPEIETATLSPRTKIYTELKHLQRLIHKRQEKFYIGHIRGHTGLPGPLAQGNAYADSLTRILTAGKRTADGSEFEKRTADGSEFESPKKKAKVE

SEQ ID NO: 3326 - protein, 2024 aa, synthetic construct
MPAAKRVKLDGGDKKYSIGLDIGTNSVGWAVITDEYKVPSKKFKVLGNTDRHSIKKNLIGALLFDSGETAEATRLKRTARRRYTRRKNRICYLQEIFSNEMAKVDDSFFHRLEESFLVEEDKKHERHPIFGNIVDEVAYHEKYPTIYHLRKKLVDSTDKADLRLIYLALAHMIKFRGHFLIEGDLNPDNSDVDKLFIQLVQTYNQLFEENPINASGVDAKAILSARLSKSRRLENLIAQLPGEKKNGLFGNLIALSLGLTPNFKSNFDLAEDAKLQLSKDTYDDDLDNLLAQIGDQYADLFLAAKNLSDAILLSDILRVNTEITKAPLSASMIKRYDEHHQDLTLLKALVRQQLPEKYKEIFFDQSKNGYAGYIDGGASQEEFYKFIKPILEKMDGTEELLVKLNREDLLRKQRTFDNGSIPHQIHLGELHAILRRQEDFYPFLKDNREKIEKILTFRIPYYVGPLARGNSRFAWMTRKSEETITPWNFEEVVDKGASAQSFIERMTNFDKNLPNEKVLPKHSLLYEYFTVYNELTKVKYVTEGMRKPAFLSGEQKKAIVDLLFKTNRKVTVKQLKEDYFKKIECFDSVEISGVEDRFNASLGTYHDLLKIIKDKDFLDNEENEDILEDIVLTLTLFEDREMIEERLKTYAHLFDDKVMKQLKRRRYTGWGRLSRKLINGIRDKQSGKTILDFLKSDGFANRNFMQLIHDDSLTFKEDIQKAQVSGQGDSLHEHIANLAGSPAIKKGILQTVKVVDELVKVMGRHKPENIVIEMARENQTTQKGQKNSRERMKRIEEGIKELGSQILKEHPVENTQLQNEKLYLYYLQNGRDMYVDQELDINRLSDYDVDHIVPQSFLKDDSIDNKVLTRSDKARGKSDNVPSEEVVKKMKNYWRQLLNAKLITQRKFDNLTKAERGGLSELDKAGFIKRQLVETRQITKHVAQILDSRMNTKYDENDKLIREVKVITLKSKLVSDFRKDFQFYKVREINNYHHAHDAYLNAVVGTALIKKYPKLESEFVYGDYKVYDVRKMIAKSEQEIGKATAKYFFYSNIMNFFKTEITLANGEIRKRPLIETNGETGEIVWDKGRDFATVRKVLSMPQVNIVKKTEVQTGGFSKESILPKRNSDKLIARKKDWDPKKYGGFDSPTVAYSVLVVAKVEKGKSKKLKSVKELLGITIMERSSFEKNPIDFLEAKGYKEVKKDLIIKLPKYSLFELENGRKRMLASAGELQKGNELALPSKYVNFLYLASHYEKLKGSPEDNEQKQLFVEQHKHYLDEIIEQISEFSKRVILADANLDKVLSAYNKHRDKPIREQAENIIHLFTLTNLGAPAAFKYFDTTIDRKRYTSTKEVLDATLIHQSITGLYETRIDLSQLGGDGGGGSEAAAKGSSGGGRDIMKDIKVRLMTDSPDDSQDLMIGAIESNLFADQISWKSDQPVWLNQWPLKQEKLQALQQLVTEQLQLGHLEESNSPWNTPVFVIKKKSGKWRLLQDLRAVNATMHDMGALQPGLPSPVAVPKGWEIIIIDLQDCFFNIKLHPEDCKRFAFSVPSPNFKRPYQRFQWKVLPQGMKNSPTLCQKFVDKAILTVRDKYQDSYIVHYMDDILLAHPSRSIVDEILTSMIQALNKHGLVVSTEKIQKYDNLKYLGTHIQGDSVSYQKLQIRTDKLRTLNDFQKLLGNINWIRPFLKLTTGELKPLFEILNGDSNPISTRKLTPEACKALQLMNERLSTARVKRLDLSQPWSLCILKTEYTPTACLWQDGVVEWIHLPHISPKVITPYDIFCTQLIIKGRHRSKELFSKDPDYIVVPYTKVQFDLLLQEKEDWPISLLGFLGEVHFHLPKDPLLTFTLQTAIIFPHMTSTTPLEKGIVIFTDGSANGRSVTYIQGREPIIKENTQNTAQQAEIVAVITAFEEVSQPFNLYTDSKYVTGLFPEIETATLSPRTKIYTELKHLQRLIHKRQEKFYIGHIRGHTGLPGPLAQGNAYADSLTRILTAGKRTADGSEFEKRTADGSEFESPKKKAKVE

SEQ ID NO: 3327 - protein, 2018 aa, synthetic construct
MPAAKRVKLDGGDKKYSIGLDIGTNSVGWAVITDEYKVPSKKFKVLGNTDRHSIKKNLIGALLFDSGETAEATRLKRTARRRYTRRKNRICYLQEIFSNEMAKVDDSFFHRLEESFLVEEDKKHERHPIFGNIVDEVAYHEKYPTIYHLRKKLVDSTDKADLRLIYLALAHMIKFRGHFLIEGDLNPDNSDVDKLFIQLVQTYNQLFEENPINASGVDAKAILSARLSKSRRLENLIAQLPGEKKNGLFGNLIALSLGLTPNFKSNFDLAEDAKLQLSKDTYDDDLDNLLAQIGDQYADLFLAAKNLSDAILLSDILRVNTEITKAPLSASMIKRYDEHHQDLTLLKALVRQQLPEKYKEIFFDQSKNGYAGYIDGGASQEEFYKFIKPILEKMDGTEELLVKLNREDLLRKQRTFDNGSIPHQIHLGELHAILRRQEDFYPFLKDNREKIEKILTFRIPYYVGPLARGNSRFAWMTRKSEETITPWNFEEVVDKGASAQSFIERMTNFDKNLPNEKVLPKHSLLYEYFTVYNELTKVKYVTEGMRKPAFLSGEQKKAIVDLLFKTNRKVTVKQLKEDYFKKIECFDSVEISGVEDRFNASLGTYHDLLKIIKDKDFLDNEENEDILEDIVLTLTLFEDREMIEERLKTYAHLFDDKVMKQLKRRRYTGWGRLSRKLINGIRDKQSGKTILDFLKSDGFANRNFMQLIHDDSLTFKEDIQKAQVSGQGDSLHEHIANLAGSPAIKKGILQTVKVVDELVKVMGRHKPENIVIEMARENQTTQKGQKNSRERMKRIEEGIKELGSQILKEHPVENTQLQNEKLYLYYLQNGRDMYVDQELDINRLSDYDVDHIVPQSFLKDDSIDNKVLTRSDKARGKSDNVPSEEVVKKMKNYWRQLLNAKLITQRKFDNLTKAERGGLSELDKAGFIKRQLVETRQITKHVAQILDSRMNTKYDENDKLIREVKVITLKSKLVSDFRKDFQFYKVREINNYHHAHDAYLNAVVGTALIKKYPKLESEFVYGDYKVYDVRKMIAKSEQEIGKATAKYFFYSNIMNFFKTEITLANGEIRKRPLIETNGETGEIVWDKGRDFATVRKVLSMPQVNIVKKTEVQTGGFSKESILPKRNSDKLIARKKDWDPKKYGGFDSPTVAYSVLVVAKVEKGKSKKLKSVKELLGITIMERSSFEKNPIDFLEAKGYKEVKKDLIIKLPKYSLFELENGRKRMLASAGELQKGNELALPSKYVNFLYLASHYEKLKGSPEDNEQKQLFVEQHKHYLDEIIEQISEFSKRVILADANLDKVLSAYNKHRDKPIREQAENIIHLFTLTNLGAPAAFKYFDTTIDRKRYTSTKEVLDATLIHQSITGLYETRIDLSQLGGDGGPAPAPGGGRDIMKDIKVRLMTDSPDDSQDLMIGAIESNLFADQISWKSDQPVWLNQWPLKQEKLQALQQLVTEQLQLGHLEESNSPWNTPVFVIKKKSGKWRLLQDLRAVNATMHDMGALQPGLPSPVAVPKGWEIIIIDLQDCFFNIKLHPEDCKRFAFSVPSPNFKRPYQRFQWKVLPQGMKNSPTLCQKFVDKAILTVRDKYQDSYIVHYMDDILLAHPSRSIVDEILTSMIQALNKHGLVVSTEKIQKYDNLKYLGTHIQGDSVSYQKLQIRTDKLRTLNDFQKLLGNINWIRPFLKLTTGELKPLFEILNPDSNPISTRKLTPEACKALQLMNERLSTARVKRLDLSQPWSLCILKTEYTPTACLWQDGVVEWIHLPHISPKVITPYDIFCTQLIIKGRHRSKELFSKDPDYIVVPYTKVQFDLLLQEKEDWPISLLGFLGEVHFHLPKDPLLTFTLQTAIIFPHMTSTTPLEKGIVIFTDGSANGRSVTYIQGREPIIKENTQNTAQQAEIVAVITAFEEVSQPFNLYTDSKYVTGLFPEIETATLSPRTKIYTELKHLQRLIHKRQEKFYIGHIRGHTGLPGPLAQGNAYADSLTRILTAGKRTADGSEFEKRTADGSEFESPKKKAKVE

SEQ ID NO: 3328 - protein, 2028 aa, synthetic construct
MPAAKRVKLDGGDKKYSIGLDIGTNSVGWAVITDEYKVPSKKFKVLGNTDRHSIKKNLIGALLFDSGETAEATRLKRTARRRYTRRKNRICYLQEIFSNEMAKVDDSFFHRLEESFLVEEDKKHERHPIFGNIVDEVAYHEKYPTIYHLRKKLVDSTDKADLRLIYLALAHMIKFRGHFLIEGDLNPDNSDVDKLFIQLVQTYNQLFEENPINASGVDAKAILSARLSKSRRLENLIAQLPGEKKNGLFGNLIALSLGLTPNFKSNFDLAEDAKLQLSKDTYDDDLDNLLAQIGDQYADLFLAAKNLSDAILLSDILRVNTEITKAPLSASMIKRYDEHHQDLTLLKALVRQQLPEKYKEIFFDQSKNGYAGYIDGGASQEEFYKFIKPILEKMDGTEELLVKLNREDLLRKQRTFDNGSIPHQIHLGELHAILRRQEDFYPFLKDNREKIEKILTFRIPYYVGPLARGNSRFAWMTRKSEETITPWNFEEVVDKGASAQSFIERMTNFDKNLPNEKVLPKHSLLYEYFTVYNELTKVKYVTEGMRKPAFLSGEQKKAIVDLLFKTNRKVTVKQLKEDYFKKIECFDSVEISGVEDRFNASLGTYHDLLKIIKDKDFLDNEENEDILEDIVLTLTLFEDREMIEERLKTYAHLFDDKVMKQLKRRRYTGWGRLSRKLINGIRDKQSGKTILDFLKSDGFANRNFMQLIHDDSLTFKEDIQKAQVSGQGDSLHEHIANLAGSPAIKKGILQTVKVVDELVKVMGRHKPENIVIEMARENQTTQKGQKNSRERMKRIEEGIKELGSQILKEHPVENTQLQNEKLYLYYLQNGRDMYVDQELDINRLSDYDVDHIVPQSFLKDDSIDNKVLTRSDKARGKSDNVPSEEVVKKMKNYWRQLLNAKLITQRKFDNLTKAERGGLSELDKAGFIKRQLVETRQITKHVAQILDSRMNTKYDENDKLIREVKVITLKSKLVSDFRKDFQFYKVREINNYHHAHDAYLNAVVGTALIKKYPKLESEFVYGDYKVYDVRKMIAKSEQEIGKATAKYFFYSNIMNFFKTEITLANGEIRKRPLIETNGETGEIVWDKGRDFATVRKVLSMPQVNIVKKTEVQTGGFSKESILPKRNSDKLIARKKDWDPKKYGGFDSPTVAYSVLVVAKVEKGKSKKLKSVKELLGITIMERSSFEKNPIDFLEAKGYKEVKKDLIIKLPKYSLFELENGRKRMLASAGELQKGNELALPSKYVNFLYLASHYEKLKGSPEDNEQKQLFVEQHKHYLDEIIEQISEFSKRVILADANLDKVLSAYNKHRDKPIREQAENIIHLFTLTNLGAPAAFKYFDTTIDRKRYTSTKEVLDATLIHQSITGLYETRIDLSQLGGDGGGGGGSEAAAKGGGGSGGGRDIMKDIKVRLMTDSPDDSQDLMIGAIESNLFADQISWKSDQPVWLNQWPLKQEKLQALQQLVTEQLQLGHLEESNSPWNTPVFVIKKKSGKWRLLQDLRAVNATMHDMGALQPGLPSPVAVPKGWEIIIIDLQDCFFNIKLHPEDCKRFAFSVPSPNFKRPYQRFQWKVLPQGMKNSPTLCQKFVDKAILTVRDKYQDSYIVHYMDDILLAHPSRSIVDEILTSMIQALNKHGLVVSTEKIQKYDNLKYLGTHIQGDSVSYQKLQIRTDKLRTLNDFQKLLGNINWIRPFLKLTTGELKPLFEILNPDSNPISTRKLTPEACKALQLMNERLSTARVKRLDLSQPWSLCILKTEYTPTACLWQDGVVEWIHLPHISPKVITPYDIFCTQLIIKGRHRSKELFSKDPDYIVVPYTKVQFDLLLQEKEDWPISLLGFLGEVHFHLPKDPLLTFTLQTAIIFPHMTSTTPLEKGIVIFTDGSANGRSVTYIQGREPIIKENTQNTAQQAEIVAVITAFEEVSQPFNLYTDSKYVTGLFPEIETATLSPRTKIYTELKHLQRLIHKRQEKFYIGHIRGHTGLPGPLAQGNAYADSLTRILTAGKRTADGSEFEKRTADGSEFESPKKKAKVE

SEQ ID NO: 3329 - protein, 2022 aa, synthetic construct
MPAAKRVKLDGGDKKYSIGLDIGTNSVGWAVITDEYKVPSKKFKVLGNTDRHSIKKNLIGALLFDSGETAEATRLKRTARRRYTRRKNRICYLQEIFSNEMAKVDDSFFHRLEESFLVEEDKKHERHPIFGNIVDEVAYHEKYPTIYHLRKKLVDSTDKADLRLIYLALAHMIKFRGHFLIEGDLNPDNSDVDKLFIQLVQTYNQLFEENPINASGVDAKAILSARLSKSRRLENLIAQLPGEKKNGLFGNLIALSLGLTPNFKSNFDLAEDAKLQLSKDTYDDDLDNLLAQIGDQYADLFLAAKNLSDAILLSDILRVNTEITKAPLSASMIKRYDEHHQDLTLLKALVRQQLPEKYKEIFFDQSKNGYAGYIDGGASQEEFYKFIKPILEKMDGTEELLVKLNREDLLRKQRTFDNGSIPHQIHLGELHAILRRQEDFYPFLKDNREKIEKILTFRIPYYVGPLARGNSRFAWMTRKSEETITPWNFEEVVDKGASAQSFIERMTNFDKNLPNEKVLPKHSLLYEYFTVYNELTKVKYVTEGMRKPAFLSGEQKKAIVDLLFKTNRKVTVKQLKEDYFKKIECFDSVEISGVEDRFNASLGTYHDLLKIIKDKDFLDNEENEDILEDIVLTLTLFEDREMIEERLKTYAHLFDDKVMKQLKRRRYTGWGRLSRKLINGIRDKQSGKTILDFLKSDGFANRNFMQLIHDDSLTFKEDIQKAQVSGQGDSLHEHIANLAGSPAIKKGILQTVKVVDELVKVMGRHKPENIVIEMARENQTTQKGQKNSRERMKRIEEGIKELGSQILKEHPVENTQLQNEKLYLYYLQNGRDMYVDQELDINRLSDYDVDHIVPQSFLKDDSIDNKVLTRSDKARGKSDNVPSEEVVKKMKNYWRQLLNAKLITQRKFDNLTKAERGGLSELDKAGFIKRQLVETRQITKHVAQILDSRMNTKYDENDKLIREVKVITLKSKLVSDFRKDFQFYKVREINNYHHAHDAYLNAVVGTALIKKYPKLESEFVYGDYKVYDVRKMIAKSEQEIGKATAKYFFYSNIMNFFKTEITLANGEIRKRPLIETNGETGEIVWDKGRDFATVRKVLSMPQVNIVKKTEVQTGGFSKESILPKRNSDKLIARKKDWDPKKYGGFDSPTVAYSVLVVAKVEKGKSKKLKSVKELLGITIMERSSFEKNPIDFLEAKGYKEVKKDLIIKLPKYSLFELENGRKRMLASAGELQKGNELALPSKYVNFLYLASHYEKLKGSPEDNEQKQLFVEQHKHYLDEIIEQISEFSKRVILADANLDKVLSAYNKHRDKPIREQAENIIHLFTLTNLGAPAAFKYFDTTIDRKRYTSTKEVLDATLIHQSITGLYETRIDLSQLGGDGGGGSGGGGSSGGGRDIMKDIKVRLMTDSPDDSQDLMIGAIESNLFADQISWKSDQPVWLNQWPLKQEKLQALQQLVTEQLQLGHLEESNSPWNTPVFVIKKKSGKWRLLQDLRAVNATMHDMGALQPGLPSPVAVPKGWEIIIIDLQDCFFNIKLHPEDCKRFAFSVPSPNFKRPYQRFQWKVLPQGMKNSPTLCQKFVDKAILTVRDKYQDSYIVHYMDDILLAHPSRSIVDEILTSMIQALNKHGLVVSTEKIQKYDNLKYLGTHIQGDSVSYQKLQIRTDKLRTLNDFQKLLGNINWIRPFLKLTTGELKPLFEILNPDSNPISTRKLTPEACKALQLMNERLSTARVKRLDLSQPWSLCILKTEYTPTACLWQDGVVEWIHLPHISPKVITPYDIFCTQLIIKGRHRSKELFSKDPDYIVVPYTKVQFDLLLQEKEDWPISLLGFLGEVHFHLPKDPLLTFTLQTAIIFPHMTSTTPLEKGIVIFTDGSANGRSVTYIQGREPIIKENTQNTAQQAEIVAVITAFEEVSQPFNLYTDSKYVTGLFPEIETATLSPRTKIYTELKHLQRLIHKRQEKFYIGHIRGHTGLPGPLAQGNAYADSLTRILTAGKRTADGSEFEKRTADGSEFESPKKKAKVE

SEQ ID NO: 3330 - protein, 2033 aa, synthetic construct
MPAAKRVKLDGGDKKYSIGLDIGTNSVGWAVITDEYKVPSKKFKVLGNTDRHSIKKNLIGALLFDSGETAEATRLKRTARRRYTRRKNRICYLQEIFSNEMAKVDDSFFHRLEESFLVEEDKKHERHPIFGNIVDEVAYHEKYPTIYHLRKKLVDSTDKADLRLIYLALAHMIKFRGHFLIEGDLNPDNSDVDKLFIQLVQTYNQLFEENPINASGVDAKAILSARLSKSRRLENLIAQLPGEKKNGLFGNLIALSLGLTPNFKSNFDLAEDAKLQLSKDTYDDDLDNLLAQIGDQYADLFLAAKNLSDAILLSDILRVNTEITKAPLSASMIKRYDEHHQDLTLLKALVRQQLPEKYKEIFFDQSKNGYAGYIDGGASQEEFYKFIKPILEKMDGTEELLVKLNREDLLRKQRTFDNGSIPHQIHLGELHAILRRQEDFYPFLKDNREKIEKILTFRIPYYVGPLARGNSRFAWMTRKSEETITPWNFEEVVDKGASAQSFIERMTNFDKNLPNEKVLPKHSLLYEYFTVYNELTKVKYVTEGMRKPAFLSGEQKKAIVDLLFKTNRKVTVKQLKEDYFKKIECFDSVEISGVEDRFNASLGTYHDLLKIIKDKDFLDNEENEDILEDIVLTLTLFEDREMIEERLKTYAHLFDDKVMKQLKRRRYTGWGRLSRKLINGIRDKQSGKTILDFLKSDGFANRNFMQLIHDDSLTFKEDIQKAQVSGQGDSLHEHIANLAGSPAIKKGILQTVKVVDELVKVMGRHKPENIVIEMARENQTTQKGQKNSRERMKRIEEGIKELGSQILKEHPVENTQLQNEKLYLYYLQNGRDMYVDQELDINRLSDYDVDHIVPQSFLKDDSIDNKVLTRSDKARGKSDNVPSEEVVKKMKNYWRQLLNAKLITQRKFDNLTKAERGGLSELDKAGFIKRQLVETRQITKHVAQILDSRMNTKYDENDKLIREVKVITLKSKLVSDFRKDFQFYKVREINNYHHAHDAYLNAVVGTALIKKYPKLESEFVYGDYKVYDVRKMIAKSEQEIGKATAKYFFYSNIMNFFKTEITLANGEIRKRPLIETNGETGEIVWDKGRDFATVRKVLSMPQVNIVKKTEVQTGGFSKESILPKRNSDKLIARKKDWDPKKYGGFDSPTVAYSVLVVAKVEKGKSKKLKSVKELLGITIMERSSFEKNPIDFLEAKGYKEVKKDLIIKLPKYSLFELENGRKRMLASAGELQKGNELALPSKYVNFLYLASHYEKLKGSPEDNEQKQLFVEQHKHYLDEIIEQISEFSKRVILADANLDKVLSAYNKHRDKPIREQAENIIHLFTLTNLGAPAAFKYFDTTIDRKRYTSTKEVLDATLIHQSITGLYETRIDLSQLGGDGGEAAAKEAAAKEAAAKEAAAKGGGRDIMKDIKVRLMTDSPDDSQDLMIGAIESNLFADQISWKSDQPVWLNQWPLKQEKLQALQQLVTEQLQLGHLEESNSPWNTPVFVIKKKSGKWRLLQDLRAVNATMHDMGALQPGLPSPVAPPKGWEIIIIDLQDCFFNIKLHPEDCKRFAFSVPSPNFKRPYQRFQWKVLPQGMKNSPTLCQKFVDKAILTVRDKYQDSYIVHYMDDILLAHPSRSIVDEILTSMIQALNKHGLVVSTEKIQKYDNLKYLGTHIQGDSVSYQKLQIRTDKLRTLNDFQKLLGNINWIRPFLKLTTGELKPLFEILNPDSNPISTRKLTPEACKALQLMNERLSTARVKRLDLSQPWSLCILKTEYTPTACLWQDGVVEWIHLPHISPKVITPYDIFCTQLIIKGRHRSKELFSKDPDYIVVPYTKVQFDLLLQEKEDWPISLLGFLGEVHFHLPKDPLLTFTLQTAIIFPHMTSTTPLEKGIVIFTDGSANGRSVTYIQGREPIIKENTQNTAQQAEIVAVITAFEEVSQPFNLYTDSKYVTGLFPEIETATLSPRTKIYTELKHLQRLIHKRQEKFYIGHIRGHTGLPGPLAQGNAYADSLTRILTAGKRTADGSEFEKRTADGSEFESPKKKAKVE

SEQ ID NO: 3331 - protein, 2022 aa, synthetic construct
MPAAKRVKLDGGDKKYSIGLDIGTNSVGWAVITDEYKVPSKKFKVLGNTDRHSIKKNLIGALLFDSGETAEATRLKRTARRRYTRRKNRICYLQEIFSNEMAKVDDSFFHRLEESFLVEEDKKHERHPIFGNIVDEVAYHEKYPTIYHLRKKLVDSTDKADLRLIYLALAHMIKFRGHFLIEGDLNPDNSDVDKLFIQLVQTYNQLFEENPINASGVDAKAILSARLSKSRRLENLIAQLPGEKKNGLFGNLIALSLGLTPNFKSNFDLAEDAKLQLSKDTYDDDLDNLLAQIGDQYADLFLAAKNLSDAILLSDILRVNTEITKAPLSASMIKRYDEHHQDLTLLKALVRQQLPEKYKEIFFDQSKNGYAGYIDGGASQEEFYKFIKPILEKMDGTEELLVKLNREDLLRKQRTFDNGSIPHQIHLGELHAILRRQEDFYPFLKDNREKIEKILTFRIPYYVGPLARGNSRFAWMTRKSEETITPWNFEEVVDKGASAQSFIERMTNFDKNLPNEKVLPKHSLLYEYFTVYNELTKVKYVTEGMRKPAFLSGEQKKAIVDLLFKTNRKVTVKQLKEDYFKKIECFDSVEISGVEDRFNASLGTYHDLLKIIKDKDFLDNEENEDILEDIVLTLTLFEDREMIEERLKTYAHLFDDKVMKQLKRRRYTGWGRLSRKLINGIRDKQSGKTILDFLKSDGFANRNFMQLIHDDSLTFKEDIQKAQVSGQGDSLHEHIANLAGSPAIKKGILQTVKVVDELVKVMGRHKPENIVIEMARENQTTQKGQKNSRERMKRIEEGIKELGSQILKEHPVENTQLQNEKLYLYYLQNGRDMYVDQELDINRLSDYDVDHIVPQSFLKDDSIDNKVLTRSDKARGKSDNVPSEEVVKKMKNYWRQLLNAKLITQRKFDNLTKAERGGLSELDKAGFIKRQLVETRQITKHVAQILDSRMNTKYDENDKLIREVKVITLKSKLVSDFRKDFQFYKVREINNYHHAHDAYLNAVVGTALIKKYPKLESEFVYGDYKVYDVRKMIAKSEQEIGKATAKYFFYSNIMNFFKTEITLANGEIRKRPLIETNGETGEIVWDKGRDFATVRKVLSMPQVNIVKKTEVQTGGFSKESILPKRNSDKLIARKKDWDPKKYGGFDSPTVAYSVLVVAKVEKGKSKKLKSVKELLGITIMERSSFEKNPIDFLEAKGYKEVKKDLIIKLPKYSLFELENGRKRMLASAGELQKGNELALPSKYVNFLYLASHYEKLKGSPEDNEQKQLFVEQHKHYLDEIIEQISEFSKRVILADANLDKVLSAYNKHRDKPIREQAENIIHLFTLTNLGAPAAFKYFDTTIDRKRYTSTKEVLDATLIHQSITGLYETRIDLSQLGGDGGGGGGGSPAPGGGRDIMKDIKVRLMTDSPDDSQDLMIGAIESNLFADQISWKSDQPVWLNQWPLKQEKLQALQQLVTEQLQLGHLEESNSPWNTPVFVIKKKSGKWRLLQDLRAVNATMHDMGALQPGLPSPVAPPKGWEIIIIDLQDCFFNIKLHPEDCKRFAFSVPSPNFKRPYQRFQWKVLPQGMKNSPTLCQKFVDKAILTVRDKYQDSYIVHYMDDILLAHPSRSIVDEILTSMIQALNKHGLVVSTEKIQKYDNLKYLGTHIQGDSVSYQKLQIRTDKLRTLNDFQKLLGNINWIRPFLKLTTGELKPLFEILNPDSNPISTRKLTPEACKALQLMNERLSTARVKRLDLSQPWSLCILKTEYTPTACLWQDGVVEWIHLPHISPKVITPYDIFCTQLIIKGRHRSKELFSKDPDYIVVPYTKVQFDLLLQEKEDWPISLLGFLGEVHFHLPKDPLLTFTLQTAIIFPHMTSTTPLEKGIVIFTDGSANGRSVTYIQGREPIIKENTQNTAQQAEIVAVITAFEEVSQPFNLYTDSKYVTGLFPEIETATLSPRTKIYTELKHLQRLIHKRQEKFYIGHIRGHTGLPGPLAQGNAYADSLTRILTAGKRTADGSEFEKRTADGSEFESPKKKAKVE

SEQ ID NO: 3332 - protein, 2024 aa, synthetic construct
MPAAKRVKLDGGDKKYSIGLDIGTNSVGWAVITDEYKVPSKKFKVLGNTDRHSIKKNLIGALLFDSGETAEATRLKRTARRRYTRRKNRICYLQEIFSNEMAKVDDSFFHRLEESFLVEEDKKHERHPIFGNIVDEVAYHEKYPTIYHLRKKLVDSTDKADLRLIYLALAHMIKFRGHFLIEGDLNPDNSDVDKLFIQLVQTYNQLFEENPINASGVDAKAILSARLSKSRRLENLIAQLPGEKKNGLFGNLIALSLGLTPNFKSNFDLAEDAKLQLSKDTYDDDLDNLLAQIGDQYADLFLAAKNLSDAILLSDILRVNTEITKAPLSASMIKRYDEHHQDLTLLKALVRQQLPEKYKEIFFDQSKNGYAGYIDGGASQEEFYKFIKPILEKMDGTEELLVKLNREDLLRKQRTFDNGSIPHQIHLGELHAILRRQEDFYPFLKDNREKIEKILTFRIPYYVGPLARGNSRFAWMTRKSEETITPWNFEEVVDKGASAQSFIERMTNFDKNLPNEKVLPKHSLLYEYFTVYNELTKVKYVTEGMRKPAFLSGEQKKAIVDLLFKTNRKVTVKQLKEDYFKKIECFDSVEISGVEDRFNASLGTYHDLLKIIKDKDFLDNEENEDILEDIVLTLTLFEDREMIEERLKTYAHLFDDKVMKQLKRRRYTGWGRLSRKLINGIRDKQSGKTILDFLKSDGFANRNFMQLIHDDSLTFKEDIQKAQVSGQGDSLHEHIANLAGSPAIKKGILQTVKVVDELVKVMGRHKPENIVIEMARENQTTQKGQKNSRERMKRIEEGIKELGSQILKEHPVENTQLQNEKLYLYYLQNGRDMYVDQELDINRLSDYDVDHIVPQSFLKDDSIDNKVLTRSDKARGKSDNVPSEEVVKKMKNYWRQLLNAKLITQRKFDNLTKAERGGLSELDKAGFIKRQLVETRQITKHVAQILDSRMNTKYDENDKLIREVKVITLKSKLVSDFRKDFQFYKVREINNYHHAHDAYLNAVVGTALIKKYPKLESEFVYGDYKVYDVRKMIAKSEQEIGKATAKYFFYSNIMNFFKTEITLANGEIRKRPLIETNGETGEIVWDKGRDFATVRKVLSMPQVNIVKKTEVQTGGFSKESILPKRNSDKLIARKKDWDPKKYGGFDSPTVAYSVLVVAKVEKGKSKKLKSVKELLGITIMERSSFEKNPIDFLEAKGYKEVKKDLIIKLPKYSLFELENGRKRMLASAGELQKGNELALPSKYVNFLYLASHYEKLKGSPEDNEQKQLFVEQHKHYLDEIIEQISEFSKRVILADANLDKVLSAYNKHRDKPIREQAENIIHLFTLTNLGAPAAFKYFDTTIDRKRYTSTKEVLDATLIHQSITGLYETRIDLSQLGGDGGGSSEAAAKPAPGGGRDIMKDIKVRLMTDSPDDSQDLMIGAIESNLFADQISWKSDQPVWLNQWPLKQEKLQALQQLVTEQLQLGHLEESNSPWNTPVFVIKKKSGKWRLLQDLRAVNATMHDMGALQPGLPSPVAPPKGWEIIIIDLQDCFFNIKLHPEDCKRFAFSVPSPNFKRPYQRFQWKVLPQGMKNSPTLCQKFVDKAILTVRDKYQDSYIVHYMDDILLAHPSRSIVDEILTSMIQALNKHGLVVSTEKIQKYDNLKYLGTHIQGDSVSYQKLQIRTDKLRTLNDFQKLLGNINWIRPFLKLTTGELKPLFEILNPDSNPISTRKLTPEACKALQLMNERLSTARVKRLDLSQPWSLCILKTEYTPTACLWQDGVVEWIHLPHISPKVITPYDIFCTQLIIKGRHRSKELFSKDPDYIVVPYTKVQFDLLLQEKEDWPISLLGFLGEVHFHLPKDPLLTFTLQTAIIFPHMTSTTPLEKGIVIFTDGSANGRSVTYIQGREPIIKENTQNTAQQAEIVAVITAFEEVSQPFNLYTDSKYVTGLFPEIETATLSPRTKIYTELKHLQRLIHKRQEKFYIGHIRGHTGLPGPLAQGNAYADSLTRILTAGKRTADGSEFEKRTADGSEFESPKKKAKVE

SEQ ID NO: 3333-3999 - skipped (667 entries)

SEQ ID NO: 4000 - protein, 1381 aa, synthetic construct
MPAAKRVKLDGGDKKYSIGLDIGTNSVGWAVITDEYKVPSKKFKVLGNTDRHSIKKNLIGALLFDSGETAEATRLKRTARRRYTRRKNRICYLQEIFSNEMAKVDDSFFHRLEESFLVEEDKKHERHPIFGNIVDEVAYHEKYPTIYHLRKKLVDSTDKADLRLIYLALAHMIKFRGHFLIEGDLNPDNSDVDKLFIQLVQTYNQLFEENPINASGVDAKAILSARLSKSRRLENLIAQLPGEKKNGLFGNLIALSLGLTPNFKSNFDLAEDAKLQLSKDTYDDDLDNLLAQIGDQYADLFLAAKNLSDAILLSDILRVNTEITKAPLSASMIKRYDEHHQDLTLLKALVRQQLPEKYKEIFFDQSKNGYAGYIDGGASQEEFYKFIKPILEKMDGTEELLVKLNREDLLRKQRTFDNGSIPHQIHLGELHAILRRQEDFYPFLKDNREKIEKILTFRIPYYVGPLARGNSRFAWMTRKSEETITPWNFEEVVDKGASAQSFIERMTNFDKNLPNEKVLPKHSLLYEYFTVYNELTKVKYVTEGMRKPAFLSGEQKKAIVDLLFKTNRKVTVKQLKEDYFKKIECFDSVEISGVEDRFNASLGTYHDLLKIIKDKDFLDNEENEDILEDIVLTLTLFEDREMIEERLKTYAHLFDDKVMKQLKRRRYTGWGRLSRKLINGIRDKQSGKTILDFLKSDGFANRNFMQLIHDDSLTFKEDIQKAQVSGQGDSLHEHIANLAGSPAIKKGILQTVKVVDELVKVMGRHKPENIVIEMARENQTTQKGQKNSRERMKRIEEGIKELGSQILKEHPVENTQLQNEKLYLYYLQNGRDMYVDQELDINRLSDYDVDHIVPQSFLKDDSIDNKVLTRSDKARGKSDNVPSEEVVKKMKNYWRQLLNAKLITQRKFDNLTKAERGGLSELDKAGFIKRQLVETRQITKHVAQILDSRMNTKYDENDKLIREVKVITLKSKLVSDFRKDFQFYKVREINNYHHAHDAYLNAVVGTALIKKYPKLESEFVYGDYKVYDVRKMIAKSEQEIGKATAKYFFYSNIMNFFKTEITLANGEIRKRPLIETNGETGEIVWDKGRDFATVRKVLSMPQVNIVKKTEVQTGGFSKESILPKRNSDKLIARKKDWDPKKYGGFDSPTVAYSVLVVAKVEKGKSKKLKSVKELLGITIMERSSFEKNPIDFLEAKGYKEVKKDLIIKLPKYSLFELENGRKRMLASAGELQKGNELALPSKYVNFLYLASHYEKLKGSPEDNEQKQLFVEQHKHYLDEIIEQISEFSKRVILADANLDKVLSAYNKHRDKPIREQAENIIHLFTLTNLGAPAAFKYFDTTIDRKRYTSTKEVLDATLIHQSITGLYETRIDLSQLGGDGG

SEQ ID NO: 4001 - protein, 31 aa, synthetic construct
AGKRTADGSEFEKRTADGSEFESPKKKAKVE

SEQ ID NO: 4002 - protein, 2138 aa, synthetic construct; identical to SEQ ID NO: 2892

SEQ ID NO: 4003-4500 - skipped (498 entries)

SEQ ID NO: 4501 - protein, 2096 aa, synthetic construct
MPAAKRVKLDGGDKKYSIGLDIGTNSVGWAVITDEYKVPSKKFKVLGNTDRHSIKKNLIGALLFDSGETAEATRLKRTARRRYTRRKNRICYLQEIFSNEMAKVDDSFFHRLEESFLVEEDKKHERHPIFGNIVDEVAYHEKYPTIYHLRKKLVDSTDKADLRLIYLALAHMIKFRGHFLIEGDLNPDNSDVDKLFIQLVQTYNQLFEENPINASGVDAKAILSARLSKSRRLENLIAQLPGEKKNGLFGNLIALSLGLTPNFKSNFDLAEDAKLQLSKDTYDDDLDNLLAQIGDQYADLFLAAKNLSDAILLSDILRVNTEITKAPLSASMIKRYDEHHQDLTLLKALVRQQLPEKYKEIFFDQSKNGYAGYIDGGASQEEFYKFIKPILEKMDGTEELLVKLNREDLLRKQRTFDNGSIPHQIHLGELHAILRRQEDFYPFLKDNREKIEKILTFRIPYYVGPLARGNSRFAWMTRKSEETITPWNFEEVVDKGASAQSFIERMTNFDKNLPNEKVLPKHSLLYEYFTVYNELTKVKYVTEGMRKPAFLSGEQKKAIVDLLFKTNRKVTVKQLKEDYFKKIECFDSVEISGVEDRFNASLGTYHDLLKIIKDKDFLDNEENEDILEDIVLTLTLFEDREMIEERLKTYAHLFDDKVMKQLKRRRYTGWGRLSRKLINGIRDKQSGKTILDFLKSDGFANRNFMQLIHDDSLTFKEDIQKAQVSGQGDSLHEHIANLAGSPAIKKGILQTVKVVDELVKVMGRHKPENIVIEMARENQTTQKGQKNSRERMKRIEEGIKELGSQILKEHPVENTQLQNEKLYLYYLQNGRDMYVDQELDINRLSDYDVDHIVPQSFLKDDSIDNKVLTRSDKARGKSDNVPSEEVVKKMKNYWRQLLNAKLITQRKFDNLTKAERGGLSELDKAGFIKRQLVETRQITKHVAQILDSRMNTKYDENDKLIREVKVITLKSKLVSDFRKDFQFYKVREINNYHHAHDAYLNAVVGTALIKKYPKLESEFVYGDYKVYDVRKMIAKSEQEIGKATAKYFFYSNIMNFFKTEITLANGEIRKRPLIETNGETGEIVWDKGRDFATVRKVLSMPQVNIVKKTEVQTGGFSKESILPKRNSDKLIARKKDWDPKKYGGFDSPTVAYSVLVVAKVEKGKSKKLKSVKELLGITIMERSSFEKNPIDFLEAKGYKEVKKDLIIKLPKYSLFELENGRKRMLASAGELQKGNELALPSKYVNFLYLASHYEKLKGSPEDNEQKQLFVEQHKHYLDEIIEQISEFSKRVILADANLDKVLSAYNKHRDKPIREQAENIIHLFTLTNLGAPAAFKYFDTTIDRKRYTSTKEVLDATLIHQSITGLYETRIDLSQLGGDGGGGSGGSGGSGGTAPLEEEYRLFLEAPIQNVTLLEQWKREIPKVWAEINPPGLASTQAPIHVQLLSTALPVRVRQYPITLEAKRSLRETIRKFRAAGILRPVHSPWNTPLLPVRKSGTSEYRMVQDLREVNKRVETIHPTVPNPYTLLSLLPPDRIWYSVLDLKDAFFCIPLAPESQLIFAFEWADAEEGESGQLTWTRLPQGFKNSPTLFNEALNRDLQGFRLDHPSVSLLQYVDDLLIAADTQAACLSATRDLLMTLAELGYRVSGKKAQLCQEEVTYLGFKIHKGSRSLSNSRTQAILQIPVPKTKRQVREFLGKIGYCRLFIPGFAELAQPLYAATRPGNDPLVWGEKEEEAFQSLKLALTQPPALALPSLDKPFQLFVEETSGAAKGVLTQALGPWKRPVAYLSKRLDPVAAGWPRCLRAIAAAALLTREASKLTFGQDIEITSSHNLESLLRSPPDKWLTNARITQYQVLLLDPPRVRFKQTAALNPATLLPETDDTLPIHHCLDTLDSLTSTRPDLTDQPLAQAEATLFTDGSSYIRDGKRYAGAAVVTLDSVIWAEPLPIGTSAQKAELIALTKALEWSKDKSVNIYTDSRYAFATLHVHGMIYRERGWLTAGGKAIKNAPEILALLTAVWLPKRVAVMHCKGHQKDDAPTSTGNRRADEVAREVAIRPLSTQATISAGKRTADGSEFEKRTADGSEFESPKKKAKVE

SEQ ID NO: 4502 - protein, 2098 aa, synthetic construct
MPAAKRVKLDGGDKKYSIGLDIGTNSVGWAVITDEYKVPSKKFKVLGNTDRHSIKKNLIGALLFDSGETAEATRLKRTARRRYTRRKNRICYLQEIFSNEMAKVDDSFFHRLEESFLVEEDKKHERHPIFGNIVDEVAYHEKYPTIYHLRKKLVDSTDKADLRLIYLALAHMIKFRGHFLIEGDLNPDNSDVDKLFIQLVQTYNQLFEENPINASGVDAKAILSARLSKSRRLENLIAQLPGEKKNGLFGNLIALSLGLTPNFKSNFDLAEDAKLQLSKDTYDDDLDNLLAQIGDQYADLFLAAKNLSDAILLSDILRVNTEITKAPLSASMIKRYDEHHQDLTLLKALVRQQLPEKYKEIFFDQSKNGYAGYIDGGASQEEFYKFIKPILEKMDGTEELLVKLNREDLLRKQRTFDNGSIPHQIHLGELHAILRRQEDFYPFLKDNREKIEKILTFRIPYYVGPLARGNSRFAWMTRKSEETITPWNFEEVVDKGASAQSFIERMTNFDKNLPNEKVLPKHSLLYEYFTVYNELTKVKYVTEGMRKPAFLSGEQKKAIVDLLFKTNRKVTVKQLKEDYFKKIECFDSVEISGVEDRFNASLGTYHDLLKIIKDKDFLDNEENEDILEDIVLTLTLFEDREMIEERLKTYAHLFDDKVMKQLKRRRYTGWGRLSRKLINGIRDKQSGKTILDFLKSDGFANRNFMQLIHDDSLTFKEDIQKAQVSGQGDSLHEHIANLAGSPAIKKGILQTVKVVDELVKVMGRHKPENIVIEMARENQTTQKGQKNSRERMKRIEEGIKELGSQILKEHPVENTQLQNEKLYLYYLQNGRDMYVDQELDINRLSDYDVDHIVPQSFLKDDSIDNKVLTRSDKARGKSDNVPSEEVVKKMKNYWRQLLNAKLITQRKFDNLTKAERGGLSELDKAGFIKRQLVETRQITKHVAQILDSRMNTKYDENDKLIREVKVITLKSKLVSDFRKDFQFYKVREINNYHHAHDAYLNAVVGTALIKKYPKLESEFVYGDYKVYDVRKMIAKSEQEIGKATAKYFFYSNIMNFFKTEITLANGEIRKRPLIETNGETGEIVWDKGRDFATVRKVLSMPQVNIVKKTEVQTGGFSKESILPKRNSDKLIARKKDWDPKKYGGFDSPTVAYSVLVVAKVEKGKSKKLKSVKELLGITIMERSSFEKNPIDFLEAKGYKEVKKDLIIKLPKYSLFELENGRKRMLASAGELQKGNELALPSKYVNFLYLASHYEKLKGSPEDNEQKQLFVEQHKHYLDEIIEQISEFSKRVILADANLDKVLSAYNKHRDKPIREQAENIIHLFTLTNLGAPAAFKYFDTTIDRKRYTSTKEVLDATLIHQSITGLYETRIDLSQLGGDGGGGSGGSGGSGGSGGSGGVLNLEEEYRLHEKPVPSSIDPSWLQLFPTVWAERAGMGLANQVPPVVVELRSGASPVAVRQYPMSKEAREGIRPHIQRFLDLGVLVPCQSPWNTPLLPVKKPGTNDYRPVQDLREINKRVQDIHPTVPNPYNLLSSLPPSHTWYSVLDLKDAFFCLKLHPNSQPLFAFEWRDPEKGNTGQLTWTRLPQGFKNSPTLFNEALHRDLAPFRALNPQVVLLQYVDDLLVAAPTYRDCKEGTQKLLQELSKLGYRVSAKKAQLCQKEVTYLGYLLKEGKRWLTPARKATVMKIPPPTTPRQVREFLGTAGFCRLWIPGFASLAAPLYPLTKPSIPFIWTEEHQKAFDRIKEALLSAPALALPDLTKPFTLYVDERAGVARGVLTQTLGPWRRPVAYLSKKLDPVASGWPTCLKAVAAVALLLKDADKLTLGQNVTVIASHSLESIVRQPPDRWMTNARMTHYQSLLLNERVSFAPPAVLNPATLLPVESEATPVHRCSEILAEETGTRRDLKDQPLPGVPAWYTDGSSFIAEGKRRAGAAIVDGKRTVWASSLPEGTSAQKAELVALTQALRLAEGKDINIYTDSRYAFATAHIHGAIYKQRGWLTSAGKDIKNKEEILALLEAIHLPKRVAIIHCPGHQKGNDPVATGNRRADEAAKQAALSTRVLAETTKPAGKRTADGSEFEKRTADGSEFESPKKKAKVE

SEQ ID NO: 4503 - protein, 2103 aa, synthetic construct
MPAAKRVKLDGGDKKYSIGLDIGTNSVGWAVITDEYKVPSKKFKVLGNTDRHSIKKNLIGALLFDSGETAEATRLKRTARRRYTRRKNRICYLQEIFSNEMAKVDDSFFHRLEESFLVEEDKKHERHPIFGNIVDEVAYHEKYPTIYHLRKKLVDSTDKADLRLIYLALAHMIKFRGHFLIEGDLNPDNSDVDKLFIQLVQTYNQLFEENPINASGVDAKAILSARLSKSRRLENLIAQLPGEKKNGLFGNLIALSLGLTPNFKSNFDLAEDAKLQLSKDTYDDDLDNLLAQIGDQYADLFLAAKNLSDAILLSDILRVNTEITKAPLSASMIKRYDEHHQDLTLLKALVRQQLPEKYKEIFFDQSKNGYAGYIDGGASQEEFYKFIKPILEKMDGTEELLVKLNREDLLRKQRTFDNGSIPHQIHLGELHAILRRQEDFYPFLKDNREKIEKILTFRIPYYVGPLARGNSRFAWMTRKSEETITPWNFEEVVDKGASAQSFIERMTNFDKNLPNEKVLPKHSLLYEYFTVYNELTKVKYVTEGMRKPAFLSGEQKKAIVDLLFKTNRKVTVKQLKEDYFKKIECFDSVEISGVEDRFNASLGTYHDLLKIIKDKDFLDNEENEDILEDIVLTLTLFEDREMIEERLKTYAHLFDDKVMKQLKRRRYTGWGRLSRKLINGIRDKQSGKTILDFLKSDGFANRNFMQLIHDDSLTFKEDIQKAQVSGQGDSLHEHIANLAGSPAIKKGILQTVKVVDELVKVMGRHKPENIVIEMARENQTTQKGQKNSRERMKRIEEGIKELGSQILKEHPVENTQLQNEKLYLYYLQNGRDMYVDQELDINRLSDYDVDHIVPQSFLKDDSIDNKVLTRSDKARGKSDNVPSEEVVKKMKNYWRQLLNAKLITQRKFDNLTKAERGGLSELDKAGFIKRQLVETRQITKHVAQILDSRMNTKYDENDKLIREVKVITLKSKLVSDFRKDFQFYKVREINNYHHAHDAYLNAVVGTALIKKYPKLESEFVYGDYKVYDVRKMIAKSEQEIGKATAKYFFYSNIMNFFKTEITLANGEIRKRPLIETNGETGEIVWDKGRDFATVRKVLSMPQVNIVKKTEVQTGGFSKESILPKRNSDKLIARKKDWDPKKYGGFDSPTVAYSVLVVAKVEKGKSKKLKSVKELLGITIMERSSFEKNPIDFLEAKGYKEVKKDLIIKLPKYSLFELENGRKRMLASAGELQKGNELALPSKYVNFLYLASHYEKLKGSPEDNEQKQLFVEQHKHYLDEIIEQISEFSKRVILADANLDKVLSAYNKHRDKPIREQAENIIHLFTLTNLGAPAAFKYFDTTIDRKRYTSTKEVLDATLIHQSITGLYETRIDLSQLGGDGGGGSGGSGGSGGSGGSGGSGGLGIEDEYRLHETSTEPDVSLGSTWLSDFPQAWAETGGMGLAVRQAPLIIPLKATSTPVSIQQYPMSHEARLGIKPHIQRLLDQGILVPCQSPWNTPLLPVKKPGTNDYRPVQDLREVNKRVEDIHPTVPNPYNLLSGLPPSHQWYTVLDLKDAFFCLRLHPTSQPLFAFEWRDPGMGISGQLTWTRLPQGFKNSPTLFNEALHRDLADFRIQHPDLILLQYVDDILLAATSELDCQQGTRALLQTLGDLGYRASAKKAQICQKQVKYLGYLLREGQRWLTEARKETVMGQPVPKTPRQLREFLGKAGFCRLFIPGFAEMAAPLYPLTKPGTLFSWGPDQQKAYQEIKQALLTAPALGLPDLTKPFELFVDEKQGYAKGVLTQKLGPWRRPVAYLSKKLDPVAAGWPPCLRMVAAIAVLTKDAGKLTMGQPLVILAPHAVEALVKQPPDRWLSNARMTHYQAMLLDTDRVQFGPVVALNPATLLPLPEEGAPHDCLEILAETHGTRPDLTDQPIPDADHTWYTDGSSFLQEGQRKAGAAVTTETEVIWAGALPAGTSAQRAELIALTQALKMAEGKRLNVYTDSRYAFATAHIHGEIYRRRGWLTSEGREIKNKSEILALLKALFLPKRLSIIHCLGHQKGDSAEARGNRLADQAAREAAIKTPPDTSTLLIAGKRTADGSEFEKRTADGSEFESPKKKAKVE

SEQ ID NO: 4504 - protein, 2110 aa, synthetic construct
MPAAKRVKLDGGDKKYSIGLDIGTNSVGWAVITDEYKVPSKKFKVLGNTDRHSIKKNLIGALLFDSGETAEATRLKRTARRRYTRRKNRICYLQEIFSNEMAKVDDSFFHRLEESFLVEEDKKHERHPIFGNIVDEVAYHEKYPTIYHLRKKLVDSTDKADLRLIYLALAHMIKFRGHFLIEGDLNPDNSDVDKLFIQLVQTYNQLFEENPINASGVDAKAILSARLSKSRRLENLIAQLPGEKKNGLFGNLIALSLGLTPNFKSNFDLAEDAKLQLSKDTYDDDLDNLLAQIGDQYADLFLAAKNLSDAILLSDILRVNTEITKAPLSASMIKRYDEHHQDLTLLKALVRQQLPEKYKEIFFDQSKNGYAGYIDGGASQEEFYKFIKPILEKMDGTEELLVKLNREDLLRKQRTFDNGSIPHQIHLGELHAILRRQEDFYPFLKDNREKIEKILTFRIPYYVGPLARGNSRFAWMTRKSEETITPWNFEEVVDKGASAQSFIERMTNFDKNLPNEKVLPKHSLLYEYFTVYNELTKVKYVTEGMRKPAFLSGEQKKAIVDLLFKTNRKVTVKQLKEDYFKKIECFDSVEISGVEDRFNASLGTYHDLLKIIKDKDFLDNEENEDILEDIVLTLTLFEDREMIEERLKTYAHLFDDKVMKQLKRRRYTGWGRLSRKLINGIRDKQSGKTILDFLKSDGFANRNFMQLIHDDSLTFKEDIQKAQVSGQGDSLHEHIANLAGSPAIKKGILQTVKVVDELVKVMGRHKPENIVIEMARENQTTQKGQKNSRERMKRIEEGIKELGSQILKEHPVENTQLQNEKLYLYYLQNGRDMYVDQELDINRLSDYDVDHIVPQSFLKDDSIDNKVLTRSDKARGKSDNVPSEEVVKKMKNYWRQLLNAKLITQRKFDNLTKAERGGLSELDKAGFIKRQLVETRQITKHVAQILDSRMNTKYDENDKLIREVKVITLKSKLVSDFRKDFQFYKVREINNYHHAHDAYLNAVVGTALIKKYPKLESEFVYGDYKVYDVRKMIAKSEQEIGKATAKYFFYSNIMNFFKTEITLANGEIRKRPLIETNGETGEIVWDKGRDFATVRKVLSMPQVNIVKKTEVQTGGFSKESILPKRNSDKLIARKKDWDPKKYGGFDSPTVAYSVLVVAKVEKGKSKKLKSVKELLGITIMERSSFEKNPIDFLEAKGYKEVKKDLIIKLPKYSLFELENGRKRMLASAGELQKGNELALPSKYVNFLYLASHYEKLKGSPEDNEQKQLFVEQHKHYLDEIIEQISEFSKRVILADANLDKVLSAYNKHRDKPIREQAENIIHLFTLTNLGAPAAFKYFDTTIDRKRYTSTKEVLDATLIHQSITGLYETRIDLSQLGGDGGGGGGSGGGGSGGGGSGGGGSGGGGSGGTLNIEDEHRLHETSKEPDVSLGSTWLSDFPQAWAETGGMGLAVRQAPLIIPLKATSTPVSIKQYPMSQEARLGIKPHIQRLLDQGILVPCQSPWNTPLLPVKKPGTNDYRPVQDLREVNKRVEDIHPTVPNPYNLLSGLPPSHQWYTVLDLKDAFFCLRLHPTSQPLFAFEWRDPEMGISGQLTWTRLPQGFKNSPTLFNEALHRDLADFRIQHPDLILLQYVDDLLLAATSELDCQQGTRALLQTLGNLGYRASAKKAQICQKQVKYLGYLLKEGQRWLTEARKETVMGQPTPKTPRQLREFLGKAGFCRLFIPGFAEMAAPLYPLTKPGTLFNWGPDQQKAYQEIKQALLTAPALGLPDLTKPFELFVDEKQGYAKGVLTQKLGPWRRPVAYLSKKLDPVAAGWPPCLRMVAAIAVLTKDAGKLTMGQPLVILAPHAVEALVKQPPDRWLSNARMTHYQALLLDTDRVQFGPVVALNPATLLPLPEEGLQHNCLDILAEAHGTRPDLTDQPLPDADHTWYTDGSSLLQEGQRKAGAAVTTETEVIWAKALPAGTSAQRAELIALTQALKMAEGKKLNVYTDSRYAFATAHIHGEIYRRRGWLTSEGKEIKNKDEILALLKALFLPKRLSIIHCPGHQKGHSAEARGNRMADQAARKAAITETPDTSTLLAGKRTADGSEFEKRTADGSEFESPKKKAKVE

SEQ ID NO: 4505 - protein, 2094 aa, synthetic construct
MPAAKRVKLDGGDKKYSIGLDIGTNSVGWAVITDEYKVPSKKFKVLGNTDRHSIKKNLIGALLFDSGETAEATRLKRTARRRYTRRKNRICYLQEIFSNEMAKVDDSFFHRLEESFLVEEDKKHERHPIFGNIVDEVAYHEKYPTIYHLRKKLVDSTDKADLRLIYLALAHMIKFRGHFLIEGDLNPDNSDVDKLFIQLVQTYNQLFEENPINASGVDAKAILSARLSKSRRLENLIAQLPGEKKNGLFGNLIALSLGLTPNFKSNFDLAEDAKLQLSKDTYDDDLDNLLAQIGDQYADLFLAAKNLSDAILLSDILRVNTEITKAPLSASMIKRYDEHHQDLTLLKALVRQQLPEKYKEIFFDQSKNGYAGYIDGGASQEEFYKFIKPILEKMDGTEELLVKLNREDLLRKQRTFDNGSIPHQIHLGELHAILRRQEDFYPFLKDNREKIEKILTFRIPYYVGPLARGNSRFAWMTRKSEETITPWNFEEVVDKGASAQSFIERMTNFDKNLPNEKVLPKHSLLYEYFTVYNELTKVKYVTEGMRKPAFLSGEQKKAIVDLLFKTNRKVTVKQLKEDYFKKIECFDSVEISGVEDRFNASLGTYHDLLKIIKDKDFLDNEENEDILEDIVLTLTLFEDREMIEERLKTYAHLFDDKVMKQLKRRRYTGWGRLSRKLINGIRDKQSGKTILDFLKSDGFANRNFMQLIHDDSLTFKEDIQKAQVSGQGDSLHEHIANLAGSPAIKKGILQTVKVVDELVKVMGRHKPENIVIEMARENQTTQKGQKNSRERMKRIEEGIKELGSQILKEHPVENTQLQNEKLYLYYLQNGRDMYVDQELDINRLSDYDVDHIVPQSFLKDDSIDNKVLTRSDKARGKSDNVPSEEVVKKMKNYWRQLLNAKLITQRKFDNLTKAERGGLSELDKAGFIKRQLVETRQITKHVAQILDSRMNTKYDENDKLIREVKVITLKSKLVSDFRKDFQFYKVREINNYHHAHDAYLNAVVGTALIKKYPKLESEFVYGDYKVYDVRKMIAKSEQEIGKATAKYFFYSNIMNFFKTEITLANGEIRKRPLIETNGETGEIVWDKGRDFATVRKVLSMPQVNIVKKTEVQTGGFSKESILPKRNSDKLIARKKDWDPKKYGGFDSPTVAYSVLVVAKVEKGKSKKLKSVKELLGITIMERSSFEKNPIDFLEAKGYKEVKKDLIIKLPKYSLFELENGRKRMLASAGELQKGNELALPSKYVNFLYLASHYEKLKGSPEDNEQKQLFVEQHKHYLDEIIEQISEFSKRVILADANLDKVLSAYNKHRDKPIREQAENIIHLFTLTNLGAPAAFKYFDTTIDRKRYTSTKEVLDATLIHQSITGLYETRIDLSQLGGDGGGSSGSSGSSGGTLNIEDEHRLHETSKEPDVSLGSTWLSDFPQAWAETGGMGLAVRQAPLIIPLKATSTPVSIKQYPMSQEARLGIKPHIQRLLDQGILVPCQSPWNTPLLPVKKPGTNDYRPVQDLREVNKRVEDIHPTVPNPYNLLSGLPPSHQWYTVLDLKDAFFCLRLHPTSQPLFAFEWRDPEMGISGQLTWTRLPQGFKNSPTLFNEALHRDLADFRIQHPDLILLQYVDDLLLAATSELDCQQGTRALLQTLGNLGYRASAKKAQICQKQVKYLGYLLKEGQRWLTEARKETVMGQPTPKTPRQLREFLGTAGFCRLWIPGFAEMAAPLYPLTKPGTLFNWGPDQQKAYQEIKQALLTAPALGLPDLTKPFELFVDEKQGYAKGVLTQKLGPWRRPVAYLSKKLDPVAAGWPPCLRMVAAIAVLTKDAGKLTMGQPLVILAPHAVEALVKQPPDRWLSNARMTHYQALLLDTDRVQFGPVVALNPATLLPLPEEGLQHNCLDILAEAHGTRPDLTDQPLPDADHTWYTDGSSLLQEGQRKAGAAVTTETEVIWAKALPAGTSAQRAELIALTQALKMAEGKKLNVYTDSRYAFATAHIHGEIYRRRGWLTSEGKEIKNKDEILALLKALFLPKRLSIIHCPGHQKGHSAEARGNRMADQAARKAAITETPDTSTLLAGKRTADGSEFEKRTADGSEFESPKKKAKVE

SEQ ID NO: 4506 - protein, 2100 aa, synthetic construct
MPAAKRVKLDGGDKKYSIGLDIGTNSVGWAVITDEYKVPSKKFKVLGNTDRHSIKKNLIGALLFDSGETAEATRLKRTARRRYTRRKNRICYLQEIFSNEMAKVDDSFFHRLEESFLVEEDKKHERHPIFGNIVDEVAYHEKYPTIYHLRKKLVDSTDKADLRLIYLALAHMIKFRGHFLIEGDLNPDNSDVDKLFIQLVQTYNQLFEENPINASGVDAKAILSARLSKSRRLENLIAQLPGEKKNGLFGNLIALSLGLTPNFKSNFDLAEDAKLQLSKDTYDDDLDNLLAQIGDQYADLFLAAKNLSDAILLSDILRVNTEITKAPLSASMIKRYDEHHQDLTLLKALVRQQLPEKYKEIFFDQSKNGYAGYIDGGASQEEFYKFIKPILEKMDGTEELLVKLNREDLLRKQRTFDNGSIPHQIHLGELHAILRRQEDFYPFLKDNREKIEKILTFRIPYYVGPLARGNSRFAWMTRKSEETITPWNFEEVVDKGASAQSFIERMTNFDKNLPNEKVLPKHSLLYEYFTVYNELTKVKYVTEGMRKPAFLSGEQKKAIVDLLFKTNRKVTVKQLKEDYFKKIECFDSVEISGVEDRFNASLGTYHDLLKIIKDKDFLDNEENEDILEDIVLTLTLFEDREMIEERLKTYAHLFDDKVMKQLKRRRYTGWGRLSRKLINGIRDKQSGKTILDFLKSDGFANRNFMQLIHDDSLTFKEDIQKAQVSGQGDSLHEHIANLAGSPAIKKGILQTVKVVDELVKVMGRHKPENIVIEMARENQTTQKGQKNSRERMKRIEEGIKELGSQILKEHPVENTQLQNEKLYLYYLQNGRDMYVDQELDINRLSDYDVDHIVPQSFLKDDSIDNKVLTRSDKARGKSDNVPSEEVVKKMKNYWRQLLNAKLITQRKFDNLTKAERGGLSELDKAGFIKRQLVETRQITKHVAQILDSRMNTKYDENDKLIREVKVITLKSKLVSDFRKDFQFYKVREINNYHHAHDAYLNAVVGTALIKKYPKLESEFVYGDYKVYDVRKMIAKSEQEIGKATAKYFFYSNIMNFFKTEITLANGEIRKRPLIETNGETGEIVWDKGRDFATVRKVLSMPQVNIVKKTEVQTGGFSKESILPKRNSDKLIARKKDWDPKKYGGFDSPTVAYSVLVVAKVEKGKSKKLKSVKELLGITIMERSSFEKNPIDFLEAKGYKEVKKDLIIKLPKYSLFELENGRKRMLASAGELQKGNELALPSKYVNFLYLASHYEKLKGSPEDNEQKQLFVEQHKHYLDEIIEQISEFSKRVILADANLDKVLSAYNKHRDKPIREQAENIIHLFTLTNLGAPAAFKYFDTTIDRKRYTSTKEVLDATLIHQSITGLYETRIDLSQLGGDGGEAAAKEAAAKEAAAKGGTLNIEDEYRLHETSKEPDVPLGSTWLSDFPQAWAETGGMGLAVRQAPLIIPLKATSTPVSIKQYPMSQEARLGIKPHIQRLLDQGILVPCQSPWNTPLLPVKKPGTNDYRPVQDLREVNKRVEDIHPTVPNPYNLLSGLPPSHQWYTVLDLKDAFFCLRLHPTSQPLFAFEWRDPEMGISGQLTWTRLPQGFKNSPTLFNEALHRDLADFRIQHPDLILLQYVDDLLLAATSEQDCQRGTRALLQTLGNLGYRASAKKAQICQKQVKYLGYLLKEGQRWLTEARKETVMGQPTPKTPRQLREFLGKAGFCRLFIPGFAEMAAPLYPLTKPGTLFNWGPDQQKAYQEIKQALLTAPALGLPDLTKPFELFVDEKQGYAKGVLTQKLGPWRRPVAYLSKKLDPVAAGWPPCLRMVAAIAVLTKDAGKLTMGQPLVILAPHAVEALVKQPPDRWLSNARMTHYQAMLLDTDRVQFGPVVALNPATLLPLPEKEAPHDCLEILAETHGTRPDLTDQPIPDADYTWYTDGSSFLQEGQRRAGAAVTTETEVIWARALPAGTSAQRAELIALTQALKMAEGKKLNVYTDSRYAFATAHVHGEIYRRRGWLTSEGREIKNKNEILALLKALFLPKRLSIIHCPGHQKGNSAEARGNRMADQAAREAAMKAVLETSTLLAGKRTADGSEFEKRTADGSEFESPKKKAKVE

SEQ ID NO: 4507 - protein, 2110 aa, synthetic construct
MPAAKRVKLDGGDKKYSIGLDIGTNSVGWAVITDEYKVPSKKFKVLGNTDRHSIKKNLIGALLFDSGETAEATRLKRTARRRYTRRKNRICYLQEIFSNEMAKVDDSFFHRLEESFLVEEDKKHERHPIFGNIVDEVAYHEKYPTIYHLRKKLVDSTDKADLRLIYLALAHMIKFRGHFLIEGDLNPDNSDVDKLFIQLVQTYNQLFEENPINASGVDAKAILSARLSKSRRLENLIAQLPGEKKNGLFGNLIALSLGLTPNFKSNFDLAEDAKLQLSKDTYDDDLDNLLAQIGDQYADLFLAAKNLSDAILLSDILRVNTEITKAPLSASMIKRYDEHHQDLTLLKALVRQQLPEKYKEIFFDQSKNGYAGYIDGGASQEEFYKFIKPILEKMDGTEELLVKLNREDLLRKQRTFDNGSIPHQIHLGELHAILRRQEDFYPFLKDNREKIEKILTFRIPYYVGPLARGNSRFAWMTRKSEETITPWNFEEVVDKGASAQSFIERMTNFDKNLPNEKVLPKHSLLYEYFTVYNELTKVKYVTEGMRKPAFLSGEQKKAIVDLLFKTNRKVTVKQLKEDYFKKIECFDSVEISGVEDRFNASLGTYHDLLKIIKDKDFLDNEENEDILEDIVLTLTLFEDREMIEERLKTYAHLFDDKVMKQLKRRRYTGWGRLSRKLINGIRDKQSGKTILDFLKSDGFANRNFMQLIHDDSLTFKEDIQKAQVSGQGDSLHEHIANLAGSPAIKKGILQTVKVVDELVKVMGRHKPENIVIEMARENQTTQKGQKNSRERMKRIEEGIKELGSQILKEHPVENTQLQNEKLYLYYLQNGRDMYVDQELDINRLSDYDVDHIVPQSFLKDDSIDNKVLTRSDKARGKSDNVPSEEVVKKMKNYWRQLLNAKLITQRKFDNLTKAERGGLSELDKAGFIKRQLVETRQITKHVAQILDSRMNTKYDENDKLIREVKVITLKSKLVSDFRKDFQFYKVREINNYHHAHDAYLNAVVGTALIKKYPKLESEFVYGDYKVYDVRKMIAKSEQEIGKATAKYFFYSNIMNFFKTEITLANGEIRKRPLIETNGETGEIVWDKGRDFATVRKVLSMPQVNIVKKTEVQTGGFSKESILPKRNSDKLIARKKDWDPKKYGGFDSPTVAYSVLVVAKVEKGKSKKLKSVKELLGITIMERSSFEKNPIDFLEAKGYKEVKKDLIIKLPKYSLFELENGRKRMLASAGELQKGNELALPSKYVNFLYLASHYEKLKGSPEDNEQKQLFVEQHKHYLDEIIEQISEFSKRVILADANLDKVLSAYNKHRDKPIREQAENIIHLFTLTNLGAPAAFKYFDTTIDRKRYTSTKEVLDATLIHQSITGLYETRIDLSQLGGDGGEAAAKEAAAKEAAAKEAAAKEAAAKGGTLNIEDEYRLHETSKEPDVSLGSTWLSDFPQAWAETGGMGLAVRQAPLIIPLKATSTPVSIKQYPMSQEARLGIKPHIQRLLDQGILVPCQSPWNTPLLPVKKPGTNDYRPVQDLREVNKRVEDIHPTVPNPYNLLSGLPPSHQWYTVLDLKDAFFCLRLHPTSQPLFAFEWRDPEMGISGQLTWTRLPQGFKNSPTLFNEALHRDLAGFRIQHPDLILLQYVDDLLLAATSELDCQQGTRALLQTLGDLGYRASAKKAQICQKQVKYLGYLLKEGQRWLTEARKETVMGQPIPKTPRQLREFLGTAGFCRLWIPGFAEMAAPLYPLTKPGTLFNWGPDQQKAFQEIKQALLTAPALGLPDLTKPFELFVDEKQGYAKGVLTQKLGPWRRPVAYLSKKLDPVAAGWPPCLRMVAAIAVLTKDAGKLTMGQPLVILAPHAVEALVKQPPDRWLSNARMTHYQALLLDTDRVQFGPVVALNPATLLPLPEEGLQHDCLDILAEAHGTRSDLMDQPLPDADHTWYTDGSSFLQEGQRKAGAAVTTETEVIWARALPAGTSAQRAELIALTQALKMAEGKKLNVYTDSRYAFATAHIHGEIYRRRGWLTSEGKEIKNKDEILALLKALFLPKRLSIIHCPGHQKGNSAEARGNRMADQAAREVATRETPETSTLLAGKRTADGSEFEKRTADGSEFESPKKKAKVE

SEQ ID NO: 4508 - protein, 2112 aa, synthetic construct
MPAAKRVKLDGGDKKYSIGLDIGTNSVGWAVITDEYKVPSKKFKVLGNTDRHSIKKNLIGALLFDSGETAEATRLKRTARRRYTRRKNRICYLQEIFSNEMAKVDDSFFHRLEESFLVEEDKKHERHPIFGNIVDEVAYHEKYPTIYHLRKKLVDSTDKADLRLIYLALAHMIKFRGHFLIEGDLNPDNSDVDKLFIQLVQTYNQLFEENPINASGVDAKAILSARLSKSRRLENLIAQLPGEKKNGLFGNLIALSLGLTPNFKSNFDLAEDAKLQLSKDTYDDDLDNLLAQIGDQYADLFLAAKNLSDAILLSDILRVNTEITKAPLSASMIKRYDEHHQDLTLLKALVRQQLPEKYKEIFFDQSKNGYAGYIDGGASQEEFYKFIKPILEKMDGTEELLVKLNREDLLRKQRTFDNGSIPHQIHLGELHAILRRQEDFYPFLKDNREKIEKILTFRIPYYVGPLARGNSRFAWMTRKSEETITPWNFEEVVDKGASAQSFIERMTNFDKNLPNEKVLPKHSLLYEYFTVYNELTKVKYVTEGMRKPAFLSGEQKKAIVDLLFKTNRKVTVKQLKEDYFKKIECFDSVEISGVEDRFNASLGTYHDLLKIIKDKDFLDNEENEDILEDIVLTLTLFEDREMIEERLKTYAHLFDDKVMKQLKRRRYTGWGRLSRKLINGIRDKQSGKTILDFLKSDGFANRNFMQLIHDDSLTFKEDIQKAQVSGQGDSLHEHIANLAGSPAIKKGILQTVKVVDELVKVMGRHKPENIVIEMARENQTTQKGQKNSRERMKRIEEGIKELGSQILKEHPVENTQLQNEKLYLYYLQNGRDMYVDQELDINRLSDYDVDHIVPQSFLKDDSIDNKVLTRSDKARGKSDNVPSEEVVKKMKNYWRQLLNAKLITQRKFDNLTKAERGGLSELDKAGFIKRQLVETRQITKHVAQILDSRMNTKYDENDKLIREVKVITLKSKLVSDFRKDFQFYKVREINNYHHAHDAYLNAVVGTALIKKYPKLESEFVYGDYKVYDVRKMIAKSEQEIGKATAKYFFYSNIMNFFKTEITLANGEIRKRPLIETNGETGEIVWDKGRDFATVRKVLSMPQVNIVKKTEVQTGGFSKESILPKRNSDKLIARKKDWDPKKYGGFDSPTVAYSVLVVAKVEKGKSKKLKSVKELLGITIMERSSFEKNPIDFLEAKGYKEVKKDLIIKLPKYSLFELENGRKRMLASAGELQKGNELALPSKYVNFLYLASHYEKLKGSPEDNEQKQLFVEQHKHYLDEIIEQISEFSKRVILADANLDKVLSAYNKHRDKPIREQAENIIHLFTLTNLGAPAAFKYFDTTIDRKRYTSTKEVLDATLIHQSITGLYETRIDLSQLGGDGGPAPAPAPGGTLNIEDEYRLHETSKEPDVSLGSTWLSDFPQAWAETGGMGLAVRQAPLIIPLKATSTPVSIKQYPMSQEARLGIKPHIQRLLDQGILVPCQSPWNTPLLPVKKPGTNDYRPVQDLREVNKRVEDIHPTVPNPYNLLSGLPPSHQWYTVLDLKDAFFCLRLHPTSQPLFAFEWRDPEMGISGQLTWTRLPQGFKNSPTLFNEALHRDLADFRIQHPDLILLQYVDDLLLAATSELDCQQGTRALLQTLGNLGYRASAKKAQICQKQVKYLGYLLKEGQRWLTEARKETVMGQPTPKTPRQLREFLGKAGFCRLFIPGFAEMAAPLYPLTKPGTLFNWGPDQQKAYQEIKQALLTAPALGLPDLTKPFELFVDEKQGYAKGVLTQKLGPWRRPVAYLSKKLDPVAAGWPPCLRMVAAIAVLTKDAGKLTMGQPLVILAPHAVEALVKQPPDRWLSNARMTHYQALLLDTDRVQFGPVVALNPATLLPLPEEGLQHNCLDILAEAHGTRPDLTDQPLPDADHTWYTDGSSLLQEGQRKAGAAVTTETEVIWAKALPAGTSAQRAELIALTQALKMAEGKKLNVYTDSRYAFATAHIHGEIYRRRGWLTSEGKEIKNKDEILALLKALFLPKRLSIIHCPGHQKGHSAEARGNRMADQAARKAAITETPDTSTLLIENSSPSGGSKRTADGSEFEAGKRTADGSEFEKRTADGSEFESPKKKAKVE

SEQ ID NO: 4509 - protein, 2096 aa, synthetic construct
MPAAKRVKLDGGDKKYSIGLDIGTNSVGWAVITDEYKVPSKKFKVLGNTDRHSIKKNLIGALLFDSGETAEATRLKRTARRRYTRRKNRICYLQEIFSNEMAKVDDSFFHRLEESFLVEEDKKHERHPIFGNIVDEVAYHEKYPTIYHLRKKLVDSTDKADLRLIYLALAHMIKFRGHFLIEGDLNPDNSDVDKLFIQLVQTYNQLFEENPINASGVDAKAILSARLSKSRRLENLIAQLPGEKKNGLFGNLIALSLGLTPNFKSNFDLAEDAKLQLSKDTYDDDLDNLLAQIGDQYADLFLAAKNLSDAILLSDILRVNTEITKAPLSASMIKRYDEHHQDLTLLKALVRQQLPEKYKEIFFDQSKNGYAGYIDGGASQEEFYKFIKPILEKMDGTEELLVKLNREDLLRKQRTFDNGSIPHQIHLGELHAILRRQEDFYPFLKDNREKIEKILTFRIPYYVGPLARGNSRFAWMTRKSEETITPWNFEEVVDKGASAQSFIERMTNFDKNLPNEKVLPKHSLLYEYFTVYNELTKVKYVTEGMRKPAFLSGEQKKAIVDLLFKTNRKVTVKQLKEDYFKKIECFDSVEISGVEDRFNASLGTYHDLLKIIKDKDFLDNEENEDILEDIVLTLTLFEDREMIEERLKTYAHLFDDKVMKQLKRRRYTGWGRLSRKLINGIRDKQSGKTILDFLKSDGFANRNFMQLIHDDSLTFKEDIQKAQVSGQGDSLHEHIANLAGSPAIKKGILQTVKVVDELVKVMGRHKPENIVIEMARENQTTQKGQKNSRERMKRIEEGIKELGSQILKEHPVENTQLQNEKLYLYYLQNGRDMYVDQELDINRLSDYDVDHIVPQSFLKDDSIDNKVLTRSDKARGKSDNVPSEEVVKKMKNYWRQLLNAKLITQRKFDNLTKAERGGLSELDKAGFIKRQLVETRQITKHVAQILDSRMNTKYDENDKLIREVKVITLKSKLVSDFRKDFQFYKVREINNYHHAHDAYLNAVVGTALIKKYPKLESEFVYGDYKVYDVRKMIAKSEQEIGKATAKYFFYSNIMNFFKTEITLANGEIRKRPLIETNGETGEIVWDKGRDFATVRKVLSMPQVNIVKKTEVQTGGFSKESILPKRNSDKLIARKKDWDPKKYGGFDSPTVAYSVLVVAKVEKGKSKKLKSVKELLGITIMERSSFEKNPIDFLEAKGYKEVKKDLIIKLPKYSLFELENGRKRMLASAGELQKGNELALPSKYVNFLYLASHYEKLKGSPEDNEQKQLFVEQHKHYLDEIIEQISEFSKRVILADANLDKVLSAYNKHRDKPIREQAENIIHLFTLTNLGAPAAFKYFDTTIDRKRYTSTKEVLDATLIHQSITGLYETRIDLSQLGGDGGPAPAPAPAPAPAPGGVLNLEEEYRLHEKPVPSSIDPSWLQLFPTVWAERAGMGLANQVPPVVVELRSGASPVAVRQYPMSKEAREGIRPHIQRFLDLGVLVPCQSPWNTPLLPVKKPGTNDYRPVQDLREINKRVQDIHPTVPNPYNLLSSLPPSHTWYSVLDLKDAFFCLKLHPNSQPLFAFEWRDPEKGNTGQLTWTRLPQGFKNSPTLFNEALHRDLAPFRALNPQVVLLQYVDDLLVAAPTYRDCKEGTQKLLQELSKLGYRVSAKKAQLCQKEVTYLGYLLKEGKRWLTPARKATVMKIPPPTTPRQVREFLGTAGFCRLWIPGFASLAAPLYPLTKPSIPFIWTEEHQKAFDRIKEALLSAPALALPDLTKPFTLYVDERAGVARGVLTQTLGPWRRPVAYLSKKLDPVASGWPTCLKAVAAVALLLKDADKLTLGQNVTVIASHSLESIVRQPPDRWMTNARMTHYQSLLLNERVSFAPPAVLNPATLLPVESEATPVHRCSEILAEETGTRRDLKDQPLPGVPAWYTDGSSFIAEGKRRAGAAIVDGKRTVWASSLPEGTSAQKAELVALTQALRLAEGKDINIYTDSRYAFATAHIHGAIYKQRGWLTSAGKDIKNKEEILALLEAIHLPKRVAIIHCPGHQKGNDPVATGNRRADEAAKQAALSTRVLAETTKPAGKRTADGSEFEKRTADGSEFESPKKKAKVE

SEQ ID NO: 4510 - protein, 2098 aa, synthetic construct
MPAAKRVKLDGGDKKYSIGLDIGTNSVGWAVITDEYKVPSKKFKVLGNTDRHSIKKNLIGALLFDSGETAEATRLKRTARRRYTRRKNRICYLQEIFSNEMAKVDDSFFHRLEESFLVEEDKKHERHPIFGNIVDEVAYHEKYPTIYHLRKKLVDSTDKADLRLIYLALAHMIKFRGHFLIEGDLNPDNSDVDKLFIQLVQTYNQLFEENPINASGVDAKAILSARLSKSRRLENLIAQLPGEKKNGLFGNLIALSLGLTPNFKSNFDLAEDAKLQLSKDTYDDDLDNLLAQIGDQYADLFLAAKNLSDAILLSDILRVNTEITKAPLSASMIKRYDEHHQDLTLLKALVRQQLPEKYKEIFFDQSKNGYAGYIDGGASQEEFYKFIKPILEKMDGTEELLVKLNREDLLRKQRTFDNGSIPHQIHLGELHAILRRQEDFYPFLKDNREKIEKILTFRIPYYVGPLARGNSRFAWMTRKSEETITPWNFEEVVDKGASAQSFIERMTNFDKNLPNEKVLPKHSLLYEYFTVYNELTKVKYVTEGMRKPAFLSGEQKKAIVDLLFKTNRKVTVKQLKEDYFKKIECFDSVEISGVEDRFNASLGTYHDLLKIIKDKDFLDNEENEDILEDIVLTLTLFEDREMIEERLKTYAHLFDDKVMKQLKRRRYTGWGRLSRKLINGIRDKQSGKTILDFLKSDGFANRNFMQLIHDDSLTFKEDIQKAQVSGQGDSLHEHIANLAGSPAIKKGILQTVKVVDELVKVMGRHKPENIVIEMARENQTTQKGQKNSRERMKRIEEGIKELGSQILKEHPVENTQLQNEKLYLYYLQNGRDMYVDQELDINRLSDYDVDHIVPQSFLKDDSIDNKVLTRSDKARGKSDNVPSEEVVKKMKNYWRQLLNAKLITQRKFDNLTKAERGGLSELDKAGFIKRQLVETRQITKHVAQILDSRMNTKYDENDKLIREVKVITLKSKLVSDFRKDFQFYKVREINNYHHAHDAYLNAVVGTALIKKYPKLESEFVYGDYKVYDVRKMIAKSEQEIGKATAKYFFYSNIMNFFKTEITLANGEIRKRPLIETNGETGEIVWDKGRDFATVRKVLSMPQVNIVKKTEVQTGGFSKESILPKRNSDKLIARKKDWDPKKYGGFDSPTVAYSVLVVAKVEKGKSKKLKSVKELLGITIMERSSFEKNPIDFLEAKGYKEVKKDLIIKLPKYSLFELENGRKRMLASAGELQKGNELALPSKYVNFLYLASHYEKLKGSPEDNEQKQLFVEQHKHYLDEIIEQISEFSKRVILADANLDKVLSAYNKHRDKPIREQAENIIHLFTLTNLGAPAAFKYFDTTIDRKRYTSTKEVLDATLIHQSITGLYETRIDLSQLGGDGGPAPAPAPAPAPAPGGTLNIEDEYRLHETSKEPDVPLGSTWLSDFPQAWAETGGMGLAVRQAPLIIPLKATSTPVSIKQYPMSQEARLGIKPHIQRLLDQGILVPCQSPWNTPLLPVKKPGTNDYRPVQDLREVNKRVEDIHPTVPNPYNLLSGLPPSHQWYTVLDLKDAFFCLRLHPTSQPLFAFEWRDPEMGISGQLTWTRLPQGFKNSPTLFNEALHRDLADFRIQHPDLILLQYVDDLLLAATSEQDCQRGTRALLQTLGNLGYRASAKKAQICQKQVKYLGYLLKEGQRWLTEARKETVMGQPTPKTPRQLREFLGTAGFCRLWIPGFAEMAAPLYPLTKPGTLFNWGPDQQKAYQEIKQALLTAPALGLPDLTKPFELFVDEKQGYAKGVLTQKLGPWRRPVAYLSKKLDPVAAGWPPCLRMVAAIAVLTKDAGKLTMGQPLVILAPHAVEALVKQPPDRWLSNARMTHYQAMLLDTDRVQFGPVVALNPATLLPLPEKEAPHDCLEILAETHGTRPDLTDQPIPDADYTWYTDGSSFLQEGQRRAGAAVTTETEVIWARALPAGTSAQRAELIALTQALKMAEGKKLNVYTDSRYAFATAHVHGEIYRRRGWLTSEGREIKNKNEILALLKALFLPKRLSIIHCPGHQKGNSAEARGNRMADQAAREAAMKAVLETSTLLAGKRTADGSEFEKRTADGSEFESPKKKAKVE

SEQ ID NO: 4511 - protein, 2091 aa, synthetic construct
MPAAKRVKLDGGDKKYSIGLDIGTNSVGWAVITDEYKVPSKKFKVLGNTDRHSIKKNLIGALLFDSGETAEATRLKRTARRRYTRRKNRICYLQEIFSNEMAKVDDSFFHRLEESFLVEEDKKHERHPIFGNIVDEVAYHEKYPTIYHLRKKLVDSTDKADLRLIYLALAHMIKFRGHFLIEGDLNPDNSDVDKLFIQLVQTYNQLFEENPINASGVDAKAILSARLSKSRRLENLIAQLPGEKKNGLFGNLIALSLGLTPNFKSNFDLAEDAKLQLSKDTYDDDLDNLLAQIGDQYADLFLAAKNLSDAILLSDILRVNTEITKAPLSASMIKRYDEHHQDLTLLKALVRQQLPEKYKEIFFDQSKNGYAGYIDGGASQEEFYKFIKPILEKMDGTEELLVKLNREDLLRKQRTFDNGSIPHQIHLGELHAILRRQEDFYPFLKDNREKIEKILTFRIPYYVGPLARGNSRFAWMTRKSEETITPWNFEEVVDKGASAQSFIERMTNFDKNLPNEKVLPKHSLLYEYFTVYNELTKVKYVTEGMRKPAFLSGEQKKAIVDLLFKTNRKVTVKQLKEDYFKKIECFDSVEISGVEDRFNASLGTYHDLLKIIKDKDFLDNEENEDILEDIVLTLTLFEDREMIEERLKTYAHLFDDKVMKQLKRRRYTGWGRLSRKLINGIRDKQSGKTILDFLKSDGFANRNFMQLIHDDSLTFKEDIQKAQVSGQGDSLHEHIANLAGSPAIKKGILQTVKVVDELVKVMGRHKPENIVIEMARENQTTQKGQKNSRERMKRIEEGIKELGSQILKEHPVENTQLQNEKLYLYYLQNGRDMYVDQELDINRLSDYDVDHIVPQSFLKDDSIDNKVLTRSDKARGKSDNVPSEEVVKKMKNYWRQLLNAKLITQRKFDNLTKAERGGLSELDKAGFIKRQLVETRQITKHVAQILDSRMNTKYDENDKLIREVKVITLKSKLVSDFRKDFQFYKVREINNYHHAHDAYLNAVVGTALIKKYPKLESEFVYGDYKVYDVRKMIAKSEQEIGKATAKYFFYSNIMNFFKTEITLANGEIRKRPLIETNGETGEIVWDKGRDFATVRKVLSMPQVNIVKKTEVQTGGFSKESILPKRNSDKLIARKKDWDPKKYGGFDSPTVAYSVLVVAKVEKGKSKKLKSVKELLGITIMERSSFEKNPIDFLEAKGYKEVKKDLIIKLPKYSLFELENGRKRMLASAGELQKGNELALPSKYVNFLYLASHYEKLKGSPEDNEQKQLFVEQHKHYLDEIIEQISEFSKRVILADANLDKVLSAYNKHRDKPIREQAENIIHLFTLTNLGAPAAFKYFDTTIDRKRYTSTKEVLDATLIHQSITGLYETRIDLSQLGGDGGGGGGGSGGLGIEDEYRLHETSTEPDVSLGSTWLSDFPQAWAETGGMGLAVRQAPLIIPLKATSTPVSIQQYPMSHEARLGIKPHIQRLLDQGILVPCQSPWNTPLLPVKKPGTNDYRPVQDLREVNKRVEDIHPTVPNPYNLLSGLPPSHQWYTVLDLKDAFFCLRLHPTSQPLFAFEWRDPGMGISGQLTWTRLPQGFKNSPTLFNEALHRDLADFRIQHPDLILLQYVDDILLAATSELDCQQGTRALLQTLGDLGYRASAKKAQICQKQVKYLGYLLREGQRWLTEARKETVMGQPVPKTPRQLREFLGKAGFCRLFIPGFAEMAAPLYPLTKPGTLFSWGPDQQKAYQEIKQALLTAPALGLPDLTKPFELFVDEKQGYAKGVLTQKLGPWRRPVAYLSKKLDPVAAGWPPCLRMVAAIAVLTKDAGKLTMGQPLVILAPHAVEALVKQPPDRWLSNARMTHYQAMLLDTDRVQFGPVVALNPATLLPLPEEGAPHDCLEILAETHGTRPDLTDQPIPDADHTWYTDGSSFLQEGQRKAGAAVTTETEVIWAGALPAGTSAQRAELIALTQALKMAEGKRLNVYTDSRYAFATAHIHGEIYRRRGWLTSEGREIKNKSEILALLKALFLPKRLSIIHCLGHQKGDSAEARGNRLADQAAREAAIKTPPDTSTLLIAGKRTADGSEFEKRTADGSEFESPKKKAKVE

SEQ ID NO: 4512 - protein, 2093 aa, synthetic construct
MPAAKRVKLDGGDKKYSIGLDIGTNSVGWAVITDEYKVPSKKFKVLGNTDRHSIKKNLIGALLFDSGETAEATRLKRTARRRYTRRKNRICYLQEIFSNEMAKVDDSFFHRLEESFLVEEDKKHERHPIFGNIVDEVAYHEKYPTIYHLRKKLVDSTDKADLRLIYLALAHMIKFRGHFLIEGDLNPDNSDVDKLFIQLVQTYNQLFEENPINASGVDAKAILSARLSKSRRLENLIAQLPGEKKNGLFGNLIALSLGLTPNFKSNFDLAEDAKLQLSKDTYDDDLDNLLAQIGDQYADLFLAAKNLSDAILLSDILRVNTEITKAPLSASMIKRYDEHHQDLTLLKALVRQQLPEKYKEIFFDQSKNGYAGYIDGGASQEEFYKFIKPILEKMDGTEELLVKLNREDLLRKQRTFDNGSIPHQIHLGELHAILRRQEDFYPFLKDNREKIEKILTFRIPYYVGPLARGNSRFAWMTRKSEETITPWNFEEVVDKGASAQSFIERMTNFDKNLPNEKVLPKHSLLYEYFTVYNELTKVKYVTEGMRKPAFLSGEQKKAIVDLLFKTNRKVTVKQLKEDYFKKIECFDSVEISGVEDRFNASLGTYHDLLKIIKDKDFLDNEENEDILEDIVLTLTLFEDREMIEERLKTYAHLFDDKVMKQLKRRRYTGWGRLSRKLINGIRDKQSGKTILDFLKSDGFANRNFMQLIHDDSLTFKEDIQKAQVSGQGDSLHEHIANLAGSPAIKKGILQTVKVVDELVKVMGRHKPENIVIEMARENQTTQKGQKNSRERMKRIEEGIKELGSQILKEHPVENTQLQNEKLYLYYLQNGRDMYVDQELDINRLSDYDVDHIVPQSFLKDDSIDNKVLTRSDKARGKSDNVPSEEVVKKMKNYWRQLLNAKLITQRKFDNLTKAERGGLSELDKAGFIKRQLVETRQITKHVAQILDSRMNTKYDENDKLIREVKVITLKSKLVSDFRKDFQFYKVREINNYHHAHDAYLNAVVGTALIKKYPKLESEFVYGDYKVYDVRKMIAKSEQEIGKATAKYFFYSNIMNFFKTEITLANGEIRKRPLIETNGETGEIVWDKGRDFATVRKVLSMPQVNIVKKTEVQTGGFSKESILPKRNSDKLIARKKDWDPKKYGGFDSPTVAYSVLVVAKVEKGKSKKLKSVKELLGITIMERSSFEKNPIDFLEAKGYKEVKKDLIIKLPKYSLFELENGRKRMLASAGELQKGNELALPSKYVNFLYLASHYEKLKGSPEDNEQKQLFVEQHKHYLDEIIEQISEFSKRVILADANLDKVLSAYNKHRDKPIREQAENIIHLFTLTNLGAPAAFKYFDTTIDRKRYTSTKEVLDATLIHQSITGLYETRIDLSQLGGDGGEAAAKGSSGGLGIEDEYRLHETSTEPDVSLGSTWLSDFPQAWAETGGMGLAVRQAPLIIPLKATSTPVSIQQYPMSHEARLGIKPHIQRLLDQGILVPCQSPWNTPLLPVKKPGTNDYRPVQDLREVNKRVEDIHPTVPNPYNLLSGLPPSHQWYTVLDLKDAFFCLRLHPTSQPLFAFEWRDPGMGISGQLTWTRLPQGFKNSPTLFNEALHRDLADFRIQHPDLILLQYVDDILLAATSELDCQQGTRALLQTLGDLGYRASAKKAQICQKQVKYLGYLLREGQRWLTEARKETVMGQPVPKTPRQLREFLGKAGFCRLFIPGFAEMAAPLYPLTKPGTLFSWGPDQQKAYQEIKQALLTAPALGLPDLTKPFELFVDEKQGYAKGVLTQKLGPWRRPVAYLSKKLDPVAAGWPPCLRMVAAIAVLTKDAGKLTMGQPLVILAPHAVEALVKQPPDRWLSNARMTHYQAMLLDTDRVQFGPVVALNPATLLPLPEEGAPHDCLEILAETHGTRPDLTDQPIPDADHTWYTDGSSFLQEGQRKAGAAVTTETEVIWAGALPAGTSAQRAELIALTQALKMAEGKRLNVYTDSRYAFATAHIHGEIYRRRGWLTSEGREIKNKSEILALLKALFLPKRLSIIHCLGHQKGDSAEARGNRLADQAAREAAIKTPPDTSTLLIAGKRTADGSEFEKRTADGSEFESPKKKAKVE

SEQ ID NO: 4513 - protein, 2091 aa, synthetic construct
MPAAKRVKLDGGDKKYSIGLDIGTNSVGWAVITDEYKVPSKKFKVLGNTDRHSIKKNLIGALLFDSGETAEATRLKRTARRRYTRRKNRICYLQEIFSNEMAKVDDSFFHRLEESFLVEEDKKHERHPIFGNIVDEVAYHEKYPTIYHLRKKLVDSTDKADLRLIYLALAHMIKFRGHFLIEGDLNPDNSDVDKLFIQLVQTYNQLFEENPINASGVDAKAILSARLSKSRRLENLIAQLPGEKKNGLFGNLIALSLGLTPNFKSNFDLAEDAKLQLSKDTYDDDLDNLLAQIGDQYADLFLAAKNLSDAILLSDILRVNTEITKAPLSASMIKRYDEHHQDLTLLKALVRQQLPEKYKEIFFDQSKNGYAGYIDGGASQEEFYKFIKPILEKMDGTEELLVKLNREDLLRKQRTFDNGSIPHQIHLGELHAILRRQEDFYPFLKDNREKIEKILTFRIPYYVGPLARGNSRFAWMTRKSEETITPWNFEEVVDKGASAQSFIERMTNFDKNLPNEKVLPKHSLLYEYFTVYNELTKVKYVTEGMRKPAFLSGEQKKAIVDLLFKTNRKVTVKQLKEDYFKKIECFDSVEISGVEDRFNASLGTYHDLLKIIKDKDFLDNEENEDILEDIVLTLTLFEDREMIEERLKTYAHLFDDKVMKQLKRRRYTGWGRLSRKLINGIRDKQSGKTILDFLKSDGFANRNFMQLIHDDSLTFKEDIQKAQVSGQGDSLHEHIANLAGSPAIKKGILQTVKVVDELVKVMGRHKPENIVIEMARENQTTQKGQKNSRERMKRIEEGIKELGSQILKEHPVENTQLQNEKLYLYYLQNGRDMYVDQELDINRLSDYDVDHIVPQSFLKDDSIDNKVLTRSDKARGKSDNVPSEEVVKKMKNYWRQLLNAKLITQRKFDNLTKAERGGLSELDKAGFIKRQLVETRQITKHVAQILDSRMNTKYDENDKLIREVKVITLKSKLVSDFRKDFQFYKVREINNYHHAHDAYLNAVVGTALIKKYPKLESEFVYGDYKVYDVRKMIAKSEQEIGKATAKYFFYSNIMNFFKTEITLANGEIRKRPLIETNGETGEIVWDKGRDFATVRKVLSMPQVNIVKKTEVQTGGFSKESILPKRNSDKLIARKKDWDPKKYGGFDSPTVAYSVLVVAKVEKGKSKKLKSVKELLGITIMERSSFEKNPIDFLEAKGYKEVKKDLIIKLPKYSLFELENGRKRMLASAGELQKGNELALPSKYVNFLYLASHYEKLKGSPEDNEQKQLFVEQHKHYLDEIIEQISEFSKRVILADANLDKVLSAYNKHRDKPIREQAENIIHLFTLTNLGAPAAFKYFDTTIDRKRYTSTKEVLDATLIHQSITGLYETRIDLSQLGGDGGPAPGSSGGTLNIEDEHRLHETSKEPDVSLGSTWLSDFPQAWAETGGMGLAVRQAPLIIPLKATSTPVSIKQYPMSQEARLGIKPHIQRLLDQGILVPCQSPWNTPLLPVKKPGTNDYRPVQDLREVNKRVEDIHPTVPNPYNLLSGLPPSHQWYTVLDLKDAFFCLRLHPTSQPLFAFEWRDPEMGISGQLTWTRLPQGFKNSPTLFNEALHRDLADFRIQHPDLILLQYVDDLLLAATSELDCQQGTRALLQTLGNLGYRASAKKAQICQKQVKYLGYLLKEGQRWLTEARKETVMGQPTPKTPRQLREFLGKAGFCRLFIPGFAEMAAPLYPLTKPGTLFNWGPDQQKAYQEIKQALLTAPALGLPDLTKPFELFVDEKQGYAKGVLTQKLGPWRRPVAYLSKKLDPVAAGWPPCLRMVAAIAVLTKDAGKLTMGQPLVILAPHAVEALVKQPPDRWLSNARMTHYQALLLDTDRVQFGPVVALNPATLLPLPEEGLQHNCLDILAEAHGTRPDLTDQPLPDADHTWYTDGSSLLQEGQRKAGAAVTTETEVIWAKALPAGTSAQRAELIALTQALKMAEGKKLNVYTDSRYAFATAHIHGEIYRRRGWLTSEGKEIKNKDEILALLKALFLPKRLSIIHCPGHQKGHSAEARGNRMADQAARKAAITETPDTSTLLAGKRTADGSEFEKRTADGSEFESPKKKAKVE

SEQ ID NO: 4514 - protein, 2091 aa, synthetic construct; identical to SEQ ID NO: 4513

SEQ ID NO: 4515 - protein, 2091 aa, synthetic construct
MPAAKRVKLDGGDKKYSIGLDIGTNSVGWAVITDEYKVPSKKFKVLGNTDRHSIKKNLIGALLFDSGETAEATRLKRTARRRYTRRKNRICYLQEIFSNEMAKVDDSFFHRLEESFLVEEDKKHERHPIFGNIVDEVAYHEKYPTIYHLRKKLVDSTDKADLRLIYLALAHMIKFRGHFLIEGDLNPDNSDVDKLFIQLVQTYNQLFEENPINASGVDAKAILSARLSKSRRLENLIAQLPGEKKNGLFGNLIALSLGLTPNFKSNFDLAEDAKLQLSKDTYDDDLDNLLAQIGDQYADLFLAAKNLSDAILLSDILRVNTEITKAPLSASMIKRYDEHHQDLTLLKALVRQQLPEKYKEIFFDQSKNGYAGYIDGGASQEEFYKFIKPILEKMDGTEELLVKLNREDLLRKQRTFDNGSIPHQIHLGELHAILRRQEDFYPFLKDNREKIEKILTFRIPYYVGPLARGNSRFAWMTRKSEETITPWNFEEVVDKGASAQSFIERMTNFDKNLPNEKVLPKHSLLYEYFTVYNELTKVKYVTEGMRKPAFLSGEQKKAIVDLLFKTNRKVTVKQLKEDYFKKIECFDSVEISGVEDRFNASLGTYHDLLKIIKDKDFLDNEENEDILEDIVLTLTLFEDREMIEERLKTYAHLFDDKVMKQLKRRRYTGWGRLSRKLINGIRDKQSGKTILDFLKSDGFANRNFMQLIHDDSLTFKEDIQKAQVSGQGDSLHEHIANLAGSPAIKKGILQTVKVVDELVKVMGRHKPENIVIEMARENQTTQKGQKNSRERMKRIEEGIKELGSQILKEHPVENTQLQNEKLYLYYLQNGRDMYVDQELDINRLSDYDVDHIVPQSFLKDDSIDNKVLTRSDKARGKSDNVPSEEVVKKMKNYWRQLLNAKLITQRKFDNLTKAERGGLSELDKAGFIKRQLVETRQITKHVAQILDSRMNTKYDENDKLIREVKVITLKSKLVSDFRKDFQFYKVREINNYHHAHDAYLNAVVGTALIKKYPKLESEFVYGDYKVYDVRKMIAKSEQEIGKATAKYFFYSNIMNFFKTEITLANGEIRKRPLIETNGETGEIVWDKGRDFATVRKVLSMPQVNIVKKTEVQTGGFSKESILPKRNSDKLIARKKDWDPKKYGGFDSPTVAYSVLVVAKVEKGKSKKLKSVKELLGITIMERSSFEKNPIDFLEAKGYKEVKKDLIIKLPKYSLFELENGRKRMLASAGELQKGNELALPSKYVNFLYLASHYEKLKGSPEDNEQKQLFVEQHKHYLDEIIEQISEFSKRVILADANLDKVLSAYNKHRDKPIREQAENIIHLFTLTNLGAPAAFKYFDTTIDRKRYTSTKEVLDATLIHQSITGLYETRIDLSQLGGDGGEAAAKPAPGGVLNLEEEYRLHEKPVPSSIDPSWLQLFPTVWAERAGMGLANQVPPVVVELRSGASPVAVRQYPMSKEAREGIRPHIQRFLDLGVLVPCQSPWNTPLLPVKKPGTNDYRPVQDLREINKRVQDIHPTVPNPYNLLSSLPPSHTWYSVLDLKDAFFCLKLHPNSQPLFAFEWRDPEKGNTGQLTWTRLPQGFKNSPTLFNEALHRDLAPFRALNPQVVLLQYVDDLLVAAPTYRDCKEGTQKLLQELSKLGYRVSAKKAQLCQKEVTYLGYLLKEGKRWLTPARKATVMKIPPPTTPRQVREFLGKAGFCRLFIPGFASLAAPLYPLTKPSIPFIWTEEHQKAFDRIKEALLSAPALALPDLTKPFTLYVDERAGVARGVLTQTLGPWRRPVAYLSKKLDPVASGWPTCLKAVAAVALLLKDADKLTLGQNVTVIASHSLESIVRQPPDRWMTNARMTHYQSLLLNERVSFAPPAVLNPATLLPVESEATPVHRCSEILAEETGTRRDLKDQPLPGVPAWYTDGSSFIAEGKRRAGAAIVDGKRTVWASSLPEGTSAQKAELVALTQALRLAEGKDINIYTDSRYAFATAHIHGAIYKQRGWLTSAGKDIKNKEEILALLEAIHLPKRVAIIHCPGHQKGNDPVATGNRRADEAAKQAALSTRVLAETTKPAGKRTADGSEFEKRTADGSEFESPKKKAKVE

SEQ ID NO: 4516 - protein, 2093 aa, synthetic construct
MPAAKRVKLDGGDKKYSIGLDIGTNSVGWAVITDEYKVPSKKFKVLGNTDRHSIKKNLIGALLFDSGETAEATRLKRTARRRYTRRKNRICYLQEIFSNEMAKVDDSFFHRLEESFLVEEDKKHERHPIFGNIVDEVAYHEKYPTIYHLRKKLVDSTDKADLRLIYLALAHMIKFRGHFLIEGDLNPDNSDVDKLFIQLVQTYNQLFEENPINASGVDAKAILSARLSKSRRLENLIAQLPGEKKNGLFGNLIALSLGLTPNFKSNFDLAEDAKLQLSKDTYDDDLDNLLAQIGDQYADLFLAAKNLSDAILLSDILRVNTEITKAPLSASMIKRYDEHHQDLTLLKALVRQQLPEKYKEIFFDQSKNGYAGYIDGGASQEEFYKFIKPILEKMDGTEELLVKLNREDLLRKQRTFDNGSIPHQIHLGELHAILRRQEDFYPFLKDNREKIEKILTFRIPYYVGPLARGNSRFAWMTRKSEETITPWNFEEVVDKGASAQSFIERMTNFDKNLPNEKVLPKHSLLYEYFTVYNELTKVKYVTEGMRKPAFLSGEQKKAIVDLLFKTNRKVTVKQLKEDYFKKIECFDSVEISGVEDRFNASLGTYHDLLKIIKDKDFLDNEENEDILEDIVLTLTLFEDREMIEERLKTYAHLFDDKVMKQLKRRRYTGWGRLSRKLINGIRDKQSGKTILDFLKSDGFANRNFMQLIHDDSLTFKEDIQKAQVSGQGDSLHEHIANLAGSPAIKKGILQTVKVVDELVKVMGRHKPENIVIEMARENQTTQKGQKNSRERMKRIEEGIKELGSQILKEHPVENTQLQNEKLYLYYLQNGRDMYVDQELDINRLSDYDVDHIVPQSFLKDDSIDNKVLTRSDKARGKSDNVPSEEVVKKMKNYWRQLLNAKLITQRKFDNLTKAERGGLSELDKAGFIKRQLVETRQITKHVAQILDSRMNTKYDENDKLIREVKVITLKSKLVSDFRKDFQFYKVREINNYHHAHDAYLNAVVGTALIKKYPKLESEFVYGDYKVYDVRKMIAKSEQEIGKATAKYFFYSNIMNFFKTEITLANGEIRKRPLIETNGETGEIVWDKGRDFATVRKVLSMPQVNIVKKTEVQTGGFSKESILPKRNSDKLIARKKDWDPKKYGGFDSPTVAYSVLVVAKVEKGKSKKLKSVKELLGITIMERSSFEKNPIDFLEAKGYKEVKKDLIIKLPKYSLFELENGRKRMLASAGELQKGNELALPSKYVNFLYLASHYEKLKGSPEDNEQKQLFVEQHKHYLDEIIEQISEFSKRVILADANLDKVLSAYNKHRDKPIREQAENIIHLFTLTNLGAPAAFKYFDTTIDRKRYTSTKEVLDATLIHQSITGLYETRIDLSQLGGDGGPAPEAAAKGGLGIEDEYRLHETSTEPDVSLGSTWLSDFPQAWAETGGMGLAVRQAPLIIPLKATSTPVSIQQYPMSHEARLGIKPHIQRLLDQGILVPCQSPWNTPLLPVKKPGTNDYRPVQDLREVNKRVEDIHPTVPNPYNLLSGLPPSHQWYTVLDLKDAFFCLRLHPTSQPLFAFEWRDPGMGISGQLTWTRLPQGFKNSPTLFNEALHRDLADFRIQHPDLILLQYVDDILLAATSELDCQQGTRALLQTLGDLGYRASAKKAQICQKQVKYLGYLLREGQRWLTEARKETVMGQPVPKTPRQLREFLGKAGFCRLFIPGFAEMAAPLYPLTKPGTLFSWGPDQQKAYQEIKQALLTAPALGLPDLTKPFELFVDEKQGYAKGVLTQKLGPWRRPVAYLSKKLDPVAAGWPPCLRMVAAIAVLTKDAGKLTMGQPLVILAPHAVEALVKQPPDRWLSNARMTHYQAMLLDTDRVQFGPVVALNPATLLPLPEEGAPHDCLEILAETHGTRPDLTDQPIPDADHTWYTDGSSFLQEGQRKAGAAVTTETEVIWAGALPAGTSAQRAELIALTQALKMAEGKRLNVYTDSRYAFATAHIHGEIYRRRGWLTSEGREIKNKSEILALLKALFLPKRLSIIHCLGHQKGDSAEARGNRLADQAAREAAIKTPPDTSTLLIAGKRTADGSEFEKRTADGSEFESPKKKAKVE

SEQ ID NO: 4517 - protein, 2094 aa, synthetic construct
MPAAKRVKLDGGDKKYSIGLDIGTNSVGWAVITDEYKVPSKKFKVLGNTDRHSIKKNLIGALLFDSGETAEATRLKRTARRRYTRRKNRICYLQEIFSNEMAKVDDSFFHRLEESFLVEEDKKHERHPIFGNIVDEVAYHEKYPTIYHLRKKLVDSTDKADLRLIYLALAHMIKFRGHFLIEGDLNPDNSDVDKLFIQLVQTYNQLFEENPINASGVDAKAILSARLSKSRRLENLIAQLPGEKKNGLFGNLIALSLGLTPNFKSNFDLAEDAKLQLSKDTYDDDLDNLLAQIGDQYADLFLAAKNLSDAILLSDILRVNTEITKAPLSASMIKRYDEHHQDLTLLKALVRQQLPEKYKEIFFDQSKNGYAGYIDGGASQEEFYKFIKPILEKMDGTEELLVKLNREDLLRKQRTFDNGSIPHQIHLGELHAILRRQEDFYPFLKDNREKIEKILTFRIPYYVGPLARGNSRFAWMTRKSEETITPWNFEEVVDKGASAQSFIERMTNFDKNLPNEKVLPKHSLLYEYFTVYNELTKVKYVTEGMRKPAFLSGEQKKAIVDLLFKTNRKVTVKQLKEDYFKKIECFDSVEISGVEDRFNASLGTYHDLLKIIKDKDFLDNEENEDILEDIVLTLTLFEDREMIEERLKTYAHLFDDKVMKQLKRRRYTGWGRLSRKLINGIRDKQSGKTILDFLKSDGFANRNFMQLIHDDSLTFKEDIQKAQVSGQGDSLHEHIANLAGSPAIKKGILQTVKVVDELVKVMGRHKPENIVIEMARENQTTQKGQKNSRERMKRIEEGIKELGSQILKEHPVENTQLQNEKLYLYYLQNGRDMYVDQELDINRLSDYDVDHIVPQSFLKDDSIDNKVLTRSDKARGKSDNVPSEEVVKKMKNYWRQLLNAKLITQRKFDNLTKAERGGLSELDKAGFIKRQLVETRQITKHVAQILDSRMNTKYDENDKLIREVKVITLKSKLVSDFRKDFQFYKVREINNYHHAHDAYLNAVVGTALIKKYPKLESEFVYGDYKVYDVRKMIAKSEQEIGKATAKYFFYSNIMNFFKTEITLANGEIRKRPLIETNGETGEIVWDKGRDFATVRKVLSMPQVNIVKKTEVQTGGFSKESILPKRNSDKLIARKKDWDPKKYGGFDSPTVAYSVLVVAKVEKGKSKKLKSVKELLGITIMERSSFEKNPIDFLEAKGYKEVKKDLIIKLPKYSLFELENGRKRMLASAGELQKGNELALPSKYVNFLYLASHYEKLKGSPEDNEQKQLFVEQHKHYLDEIIEQISEFSKRVILADANLDKVLSAYNKHRDKPIREQAENIIHLFTLTNLGAPAAFKYFDTTIDRKRYTSTKEVLDATLIHQSITGLYETRIDLSQLGGDGGGSSGGGGGSGGLGIEDEYRLHETSTEPDVSLGSTWLSDFPQAWAETGGMGLAVRQAPLIIPLKATSTPVSIQQYPMSHEARLGIKPHIQRLLDQGILVPCQSPWNTPLLPVKKPGTNDYRPVQDLREVNKRVEDIHPTVPNPYNLLSGLPPSHQWYTVLDLKDAFFCLRLHPTSQPLFAFEWRDPGMGISGQLTWTRLPQGFKNSPTLFNEALHRDLADFRIQHPDLILLQYVDDILLAATSELDCQQGTRALLQTLGDLGYRASAKKAQICQKQVKYLGYLLREGQRWLTEARKETVMGQPVPKTPRQLREFLGKAGFCRLFIPGFAEMAAPLYPLTKPGTLFSWGPDQQKAYQEIKQALLTAPALGLPDLTKPFELFVDEKQGYAKGVLTQKLGPWRRPVAYLSKKLDPVAAGWPPCLRMVAAIAVLTKDAGKLTMGQPLVILAPHAVEALVKQPPDRWLSNARMTHYQAMLLDTDRVQFGPVVALNPATLLPLPEEGAPHDCLEILAETHGTRPDLTDQPIPDADHTWYTDGSSFLQEGQRKAGAAVTTETEVIWAGALPAGTSAQRAELIALTQALKMAEGKRLNVYTDSRYAFATAHIHGEIYRRRGWLTSEGREIKNKSEILALLKALFLPKRLSIIHCLGHQKGDSAEARGNRLADQAAREAAIKTPPDTSTLLIAGKRTADGSEFEKRTADGSEFESPKKKAKVE

SEQ ID NO: 4518 - protein, 2094 aa, synthetic construct
MPAAKRVKLDGGDKKYSIGLDIGTNSVGWAVITDEYKVPSKKFKVLGNTDRHSIKKNLIGALLFDSGETAEATRLKRTARRRYTRRKNRICYLQEIFSNEMAKVDDSFFHRLEESFLVEEDKKHERHPIFGNIVDEVAYHEKYPTIYHLRKKLVDSTDKADLRLIYLALAHMIKFRGHFLIEGDLNPDNSDVDKLFIQLVQTYNQLFEENPINASGVDAKAILSARLSKSRRLENLIAQLPGEKKNGLFGNLIALSLGLTPNFKSNFDLAEDAKLQLSKDTYDDDLDNLLAQIGDQYADLFLAAKNLSDAILLSDILRVNTEITKAPLSASMIKRYDEHHQDLTLLKALVRQQLPEKYKEIFFDQSKNGYAGYIDGGASQEEFYKFIKPILEKMDGTEELLVKLNREDLLRKQRTFDNGSIPHQIHLGELHAILRRQEDFYPFLKDNREKIEKILTFRIPYYVGPLARGNSRFAWMTRKSEETITPWNFEEVVDKGASAQSFIERMTNFDKNLPNEKVLPKHSLLYEYFTVYNELTKVKYVTEGMRKPAFLSGEQKKAIVDLLFKTNRKVTVKQLKEDYFKKIECFDSVEISGVEDRFNASLGTYHDLLKIIKDKDFLDNEENEDILEDIVLTLTLFEDREMIEERLKTYAHLFDDKVMKQLKRRRYTGWGRLSRKLINGIRDKQSGKTILDFLKSDGFANRNFMQLIHDDSLTFKEDIQKAQVSGQGDSLHEHIANLAGSPAIKKGILQTVKVVDELVKVMGRHKPENIVIEMARENQTTQKGQKNSRERMKRIEEGIKELGSQILKEHPVENTQLQNEKLYLYYLQNGRDMYVDQELDINRLSDYDVDHIVPQSFLKDDSIDNKVLTRSDKARGKSDNVPSEEVVKKMKNYWRQLLNAKLITQRKFDNLTKAERGGLSELDKAGFIKRQLVETRQITKHVAQILDSRMNTKYDENDKLIREVKVITLKSKLVSDFRKDFQFYKVREINNYHHAHDAYLNAVVGTALIKKYPKLESEFVYGDYKVYDVRKMIAKSEQEIGKATAKYFFYSNIMNFFKTEITLANGEIRKRPLIETNGETGEIVWDKGRDFATVRKVLSMPQVNIVKKTEVQTGGFSKESILPKRNSDKLIARKKDWDPKKYGGFDSPTVAYSVLVVAKVEKGKSKKLKSVKELLGITIMERSSFEKNPIDFLEAKGYKEVKKDLIIKLPKYSLFELENGRKRMLASAGELQKGNELALPSKYVNFLYLASHYEKLKGSPEDNEQKQLFVEQHKHYLDEIIEQISEFSKRVILADANLDKVLSAYNKHRDKPIREQAENIIHLFTLTNLGAPAAFKYFDTTIDRKRYTSTKEVLDATLIHQSITGLYETRIDLSQLGGDGGGSSGGGGGSGGTLNIEDEYRLHETSKEPDVPLGSTWLSDFPQAWAETGGMGLAVRQAPLIIPLKATSTPVSIKQYPMSQEARLGIKPHIQRLLDQGILVPCQSPWNTPLLPVKKPGTNDYRPVQDLREVNKRVEDIHPTVPNPYNLLSGLPPSHQWYTVLDLKDAFFCLRLHPTSQPLFAFEWRDPEMGISGQLTWTRLPQGFKNSPTLFNEALHRDLADFRIQHPDLILLQYVDDLLLAATSEQDCQRGTRALLQTLGNLGYRASAKKAQICQKQVKYLGYLLKEGQRWLTEARKETVMGQPTPKTPRQLREFLGKAGFCRLFIPGFAEMAAPLYPLTKPGTLFNWGPDQQKAYQEIKQALLTAPALGLPDLTKPFELFVDEKQGYAKGVLTQKLGPWRRPVAYLSKKLDPVAAGWPPCLRMVAAIAVLTKDAGKLTMGQPLVILAPHAVEALVKQPPDRWLSNARMTHYQAMLLDTDRVQFGPVVALNPATLLPLPEKEAPHDCLEILAETHGTRPDLTDQPIPDADYTWYTDGSSFLQEGQRRAGAAVTTETEVIWARALPAGTSAQRAELIALTQALKMAEGKKLNVYTDSRYAFATAHVHGEIYRRRGWLTSEGREIKNKNEILALLKALFLPKRLSIIHCPGHQKGNSAEARGNRMADQAAREAAMKAVLETSTLLAGKRTADGSEFEKRTADGSEFESPKKKAKVE

SEQ ID NO: 4519 - protein, 2096 aa, synthetic construct
MPAAKRVKLDGGDKKYSIGLDIGTNSVGWAVITDEYKVPSKKFKVLGNTDRHSIKKNLIGALLFDSGETAEATRLKRTARRRYTRRKNRICYLQEIFSNEMAKVDDSFFHRLEESFLVEEDKKHERHPIFGNIVDEVAYHEKYPTIYHLRKKLVDSTDKADLRLIYLALAHMIKFRGHFLIEGDLNPDNSDVDKLFIQLVQTYNQLFEENPINASGVDAKAILSARLSKSRRLENLIAQLPGEKKNGLFGNLIALSLGLTPNFKSNFDLAEDAKLQLSKDTYDDDLDNLLAQIGDQYADLFLAAKNLSDAILLSDILRVNTEITKAPLSASMIKRYDEHHQDLTLLKALVRQQLPEKYKEIFFDQSKNGYAGYIDGGASQEEFYKFIKPILEKMDGTEELLVKLNREDLLRKQRTFDNGSIPHQIHLGELHAILRRQEDFYPFLKDNREKIEKILTFRIPYYVGPLARGNSRFAWMTRKSEETITPWNFEEVVDKGASAQSFIERMTNFDKNLPNEKVLPKHSLLYEYFTVYNELTKVKYVTEGMRKPAFLSGEQKKAIVDLLFKTNRKVTVKQLKEDYFKKIECFDSVEISGVEDRFNASLGTYHDLLKIIKDKDFLDNEENEDILEDIVLTLTLFEDREMIEERLKTYAHLFDDKVMKQLKRRRYTGWGRLSRKLINGIRDKQSGKTILDFLKSDGFANRNFMQLIHDDSLTFKEDIQKAQVSGQGDSLHEHIANLAGSPAIKKGILQTVKVVDELVKVMGRHKPENIVIEMARENQTTQKGQKNSRERMKRIEEGIKELGSQILKEHPVENTQLQNEKLYLYYLQNGRDMYVDQELDINRLSDYDVDHIVPQSFLKDDSIDNKVLTRSDKARGKSDNVPSEEVVKKMKNYWRQLLNAKLITQRKFDNLTKAERGGLSELDKAGFIKRQLVETRQITKHVAQILDSRMNTKYDENDKLIREVKVITLKSKLVSDFRKDFQFYKVREINNYHHAHDAYLNAVVGTALIKKYPKLESEFVYGDYKVYDVRKMIAKSEQEIGKATAKYFFYSNIMNFFKTEITLANGEIRKRPLIETNGETGEIVWDKGRDFATVRKVLSMPQVNIVKKTEVQTGGFSKESILPKRNSDKLIARKKDWDPKKYGGFDSPTVAYSVLVVAKVEKGKSKKLKSVKELLGITIMERSSFEKNPIDFLEAKGYKEVKKDLIIKLPKYSLFELENGRKRMLASAGELQKGNELALPSKYVNFLYLASHYEKLKGSPEDNEQKQLFVEQHKHYLDEIIEQISEFSKRVILADANLDKVLSAYNKHRDKPIREQAENIIHLFTLTNLGAPAAFKYFDTTIDRKRYTSTKEVLDATLIHQSITGLYETRIDLSQLGGDGGGGGGGSEAAAKGGTLNIEDEYRLHETSKEPDVPLGSTWLSDFPQAWAETGGMGLAVRQAPLIIPLKATSTPVSIKQYPMSQEARLGIKPHIQRLLDQGILVPCQSPWNTPLLPVKKPGTNDYRPVQDLREVNKRVEDIHPTVPNPYNLLSGLPPSHQWYTVLDLKDAFFCLRLHPTSQPLFAFEWRDPEMGISGQLTWTRLPQGFKNSPTLFNEALHRDLADFRIQHPDLILLQYVDDLLLAATSEQDCQRGTRALLQTLGNLGYRASAKKAQICQKQVKYLGYLLKEGQRWLTEARKETVMGQPTPKTPRQLREFLGKAGFCRLFIPGFAEMAAPLYPLTKPGTLFNWGPDQQKAYQEIKQALLTAPALGLPDLTKPFELFVDEKQGYAKGVLTQKLGPWRRPVAYLSKKLDPVAAGWPPCLRMVAAIAVLTKDAGKLTMGQPLVILAPHAVEALVKQPPDRWLSNARMTHYQAMLLDTDRVQFGPVVALNPATLLPLPEKEAPHDCLEILAETHGTRPDLTDQPIPDADYTWYTDGSSFLQEGQRRAGAAVTTETEVIWARALPAGTSAQRAELIALTQALKMAEGKKLNVYTDSRYAFATAHVHGEIYRRRGWLTSEGREIKNKNEILALLKALFLPKRLSIIHCPGHQKGNSAEARGNRMADQAAREAAMKAVLETSTLLAGKRTADGSEFEKRTADGSEFESPKKKAKVE

SEQ ID NO: 4520 - protein, 2094 aa, synthetic construct
MPAAKRVKLDGGDKKYSIGLDIGTNSVGWAVITDEYKVPSKKFKVLGNTDRHSIKKNLIGALLFDSGETAEATRLKRTARRRYTRRKNRICYLQEIFSNEMAKVDDSFFHRLEESFLVEEDKKHERHPIFGNIVDEVAYHEKYPTIYHLRKKLVDSTDKADLRLIYLALAHMIKFRGHFLIEGDLNPDNSDVDKLFIQLVQTYNQLFEENPINASGVDAKAILSARLSKSRRLENLIAQLPGEKKNGLFGNLIALSLGLTPNFKSNFDLAEDAKLQLSKDTYDDDLDNLLAQIGDQYADLFLAAKNLSDAILLSDILRVNTEITKAPLSASMIKRYDEHHQDLTLLKALVRQQLPEKYKEIFFDQSKNGYAGYIDGGASQEEFYKFIKPILEKMDGTEELLVKLNREDLLRKQRTFDNGSIPHQIHLGELHAILRRQEDFYPFLKDNREKIEKILTFRIPYYVGPLARGNSRFAWMTRKSEETITPWNFEEVVDKGASAQSFIERMTNFDKNLPNEKVLPKHSLLYEYFTVYNELTKVKYVTEGMRKPAFLSGEQKKAIVDLLFKTNRKVTVKQLKEDYFKKIECFDSVEISGVEDRFNASLGTYHDLLKIIKDKDFLDNEENEDILEDIVLTLTLFEDREMIEERLKTYAHLFDDKVMKQLKRRRYTGWGRLSRKLINGIRDKQSGKTILDFLKSDGFANRNFMQLIHDDSLTFKEDIQKAQVSGQGDSLHEHIANLAGSPAIKKGILQTVKVVDELVKVMGRHKPENIVIEMARENQTTQKGQKNSRERMKRIEEGIKELGSQILKEHPVENTQLQNEKLYLYYLQNGRDMYVDQELDINRLSDYDVDHIVPQSFLKDDSIDNKVLTRSDKARGKSDNVPSEEVVKKMKNYWRQLLNAKLITQRKFDNLTKAERGGLSELDKAGFIKRQLVETRQITKHVAQILDSRMNTKYDENDKLIREVKVITLKSKLVSDFRKDFQFYKVREINNYHHAHDAYLNAVVGTALIKKYPKLESEFVYGDYKVYDVRKMIAKSEQEIGKATAKYFFYSNIMNFFKTEITLANGEIRKRPLIETNGETGEIVWDKGRDFATVRKVLSMPQVNIVKKTEVQTGGFSKESILPKRNSDKLIARKKDWDPKKYGGFDSPTVAYSVLVVAKVEKGKSKKLKSVKELLGITIMERSSFEKNPIDFLEAKGYKEVKKDLIIKLPKYSLFELENGRKRMLASAGELQKGNELALPSKYVNFLYLASHYEKLKGSPEDNEQKQLFVEQHKHYLDEIIEQISEFSKRVILADANLDKVLSAYNKHRDKPIREQAENIIHLFTLTNLGAPAAFKYFDTTIDRKRYTSTKEVLDATLIHQSITGLYETRIDLSQLGGDGGGGGGGSPAPGGTLNLEDEYRLYETSAEPEVSPGSTWLSDFPQAWAETGGMGLAVRQAPLIIPLKATSTPVSIKQYPMSQEAKLGIKPHIQRLLDQGILVPCQSPWNTPLLPVKKPGTNDYRPVQDLREVNKRVEDIHPTVPNPYNLLSGLPPSHRWYTVLDLKDAFFCLRLHPTSQPLFAFEWRDPGMGISGQLTWTRLPQGFKNSPTLFNEALHRDLADFRIQHPDLILLQYVDDILLAATSELDCQQGTRALLLTLGNLGYRASAKKAQLCQKQVKYLGYLLKEGQRWLTEARKETVMGQPTPKTPRQLREFLGKAGFCRLFIPGFAEMAAPLYPLTKPGTLFNWGPDQQKAYQEIKQALLTAPALGLPDLTKPFELFVDEKQGYAKGVLTQKLGPWRRPVAYLSKKLDPVAAGWPPCLRMVAAIAVLRKDAGKLTMGQPLVILAPHAVEALVKQPPDRWLSNARMTHYQAMLLDTDRVQFGPVVALNPATLLPLPEEGAPHDCLEILAETHGTRPDLTDQPIPDADHTWYTDGSSFLQEGQRKAGAAVTTETEVIWARALPAGTSAQRAELIALTQALKMAEGKRLNVYTDSRYAFATAHIHGEIYRRRGWLTSEGREIKNKSEILALLKALFLPKRLSIIHCLGHQKGDSAEARGNRLADQAAREAAIKTPPDTSTLLAGKRTADGSEFEKRTADGSEFESPKKKAKVE

SEQ ID NO: 4521 - protein, 2094 aa, synthetic construct
MPAAKRVKLDGGDKKYSIGLDIGTNSVGWAVITDEYKVPSKKFKVLGNTDRHSIKKNLIGALLFDSGETAEATRLKRTARRRYTRRKNRICYLQEIFSNEMAKVDDSFFHRLEESFLVEEDKKHERHPIFGNIVDEVAYHEKYPTIYHLRKKLVDSTDKADLRLIYLALAHMIKFRGHFLIEGDLNPDNSDVDKLFIQLVQTYNQLFEENPINASGVDAKAILSARLSKSRRLENLIAQLPGEKKNGLFGNLIALSLGLTPNFKSNFDLAEDAKLQLSKDTYDDDLDNLLAQIGDQYADLFLAAKNLSDAILLSDILRVNTEITKAPLSASMIKRYDEHHQDLTLLKALVRQQLPEKYKEIFFDQSKNGYAGYIDGGASQEEFYKFIKPILEKMDGTEELLVKLNREDLLRKQRTFDNGSIPHQIHLGELHAILRRQEDFYPFLKDNREKIEKILTFRIPYYVGPLARGNSRFAWMTRKSEETITPWNFEEVVDKGASAQSFIERMTNFDKNLPNEKVLPKHSLLYEYFTVYNELTKVKYVTEGMRKPAFLSGEQKKAIVDLLFKTNRKVTVKQLKEDYFKKIECFDSVEISGVEDRFNASLGTYHDLLKIIKDKDFLDNEENEDILEDIVLTLTLFEDREMIEERLKTYAHLFDDKVMKQLKRRRYTGWGRLSRKLINGIRDKQSGKTILDFLKSDGFANRNFMQLIHDDSLTFKEDIQKAQVSGQGDSLHEHIANLAGSPAIKKGILQTVKVVDELVKVMGRHKPENIVIEMARENQTTQKGQKNSRERMKRIEEGIKELGSQILKEHPVENTQLQNEKLYLYYLQNGRDMYVDQELDINRLSDYDVDHIVPQSFLKDDSIDNKVLTRSDKARGKSDNVPSEEVVKKMKNYWRQLLNAKLITQRKFDNLTKAERGGLSELDKAGFIKRQLVETRQITKHVAQILDSRMNTKYDENDKLIREVKVITLKSKLVSDFRKDFQFYKVREINNYHHAHDAYLNAVVGTALIKKYPKLESEFVYGDYKVYDVRKMIAKSEQEIGKATAKYFFYSNIMNFFKTEITLANGEIRKRPLIETNGETGEIVWDKGRDFATVRKVLSMPQVNIVKKTEVQTGGFSKESILPKRNSDKLIARKKDWDPKKYGGFDSPTVAYSVLVVAKVEKGKSKKLKSVKELLGITIMERSSFEKNPIDFLEAKGYKEVKKDLIIKLPKYSLFELENGRKRMLASAGELQKGNELALPSKYVNFLYLASHYEKLKGSPEDNEQKQLFVEQHKHYLDEIIEQISEFSKRVILADANLDKVLSAYNKHRDKPIREQAENIIHLFTLTNLGAPAAFKYFDTTIDRKRYTSTKEVLDATLIHQSITGLYETRIDLSQLGGDGGPAPGGGGGSGGTLNIEDEHRLHETSKEPDVSLGSTWLSDFPQAWAETGGMGLAVRQAPLIIPLKATSTPVSIKQYPMSQEARLGIKPHIQRLLDQGILVPCQSPWNTPLLPVKKPGTNDYRPVQDLREVNKRVEDIHPTVPNPYNLLSGLPPSHQWYTVLDLKDAFFCLRLHPTSQPLFAFEWRDPEMGISGQLTWTRLPQGFKNSPTLFNEALHRDLADFRIQHPDLILLQYVDDLLLAATSELDCQQGTRALLQTLGNLGYRASAKKAQICQKQVKYLGYLLKEGQRWLTEARKETVMGQPTPKTPRQLREFLGKAGFCRLFIPGFAEMAAPLYPLTKPGTLFNWGPDQQKAYQEIKQALLTAPALGLPDLTKPFELFVDEKQGYAKGVLTQKLGPWRRPVAYLSKKLDPVAAGWPPCLRMVAAIAVLTKDAGKLTMGQPLVILAPHAVEALVKQPPDRWLSNARMTHYQALLLDTDRVQFGPVVALNPATLLPLPEEGLQHNCLDILAEAHGTRPDLTDQPLPDADHTWYTDGSSLLQEGQRKAGAAVTTETEVIWAKALPAGTSAQRAELIALTQALKMAEGKKLNVYTDSRYAFATAHIHGEIYRRRGWLTSEGKEIKNKDEILALLKALFLPKRLSIIHCPGHQKGHSAEARGNRMADQAARKAAITETPDTSTLLAGKRTADGSEFEKRTADGSEFESPKKKAKVE

SEQ ID NO: 4522 - protein, 2096 aa, synthetic construct
MPAAKRVKLDGGDKKYSIGLDIGTNSVGWAVITDEYKVPSKKFKVLGNTDRHSIKKNLIGALLFDSGETAEATRLKRTARRRYTRRKNRICYLQEIFSNEMAKVDDSFFHRLEESFLVEEDKKHERHPIFGNIVDEVAYHEKYPTIYHLRKKLVDSTDKADLRLIYLALAHMIKFRGHFLIEGDLNPDNSDVDKLFIQLVQTYNQLFEENPINASGVDAKAILSARLSKSRRLENLIAQLPGEKKNGLFGNLIALSLGLTPNFKSNFDLAEDAKLQLSKDTYDDDLDNLLAQIGDQYADLFLAAKNLSDAILLSDILRVNTEITKAPLSASMIKRYDEHHQDLTLLKALVRQQLPEKYKEIFFDQSKNGYAGYIDGGASQEEFYKFIKPILEKMDGTEELLVKLNREDLLRKQRTFDNGSIPHQIHLGELHAILRRQEDFYPFLKDNREKIEKILTFRIPYYVGPLARGNSRFAWMTRKSEETITPWNFEEVVDKGASAQSFIERMTNFDKNLPNEKVLPKHSLLYEYFTVYNELTKVKYVTEGMRKPAFLSGEQKKAIVDLLFKTNRKVTVKQLKEDYFKKIECFDSVEISGVEDRFNASLGTYHDLLKIIKDKDFLDNEENEDILEDIVLTLTLFEDREMIEERLKTYAHLFDDKVMKQLKRRRYTGWGRLSRKLINGIRDKQSGKTILDFLKSDGFANRNFMQLIHDDSLTFKEDIQKAQVSGQGDSLHEHIANLAGSPAIKKGILQTVKVVDELVKVMGRHKPENIVIEMARENQTTQKGQKNSRERMKRIEEGIKELGSQILKEHPVENTQLQNEKLYLYYLQNGRDMYVDQELDINRLSDYDVDHIVPQSFLKDDSIDNKVLTRSDKARGKSDNVPSEEVVKKMKNYWRQLLNAKLITQRKFDNLTKAERGGLSELDKAGFIKRQLVETRQITKHVAQILDSRMNTKYDENDKLIREVKVITLKSKLVSDFRKDFQFYKVREINNYHHAHDAYLNAVVGTALIKKYPKLESEFVYGDYKVYDVRKMIAKSEQEIGKATAKYFFYSNIMNFFKTEITLANGEIRKRPLIETNGETGEIVWDKGRDFATVRKVLSMPQVNIVKKTEVQTGGFSKESILPKRNSDKLIARKKDWDPKKYGGFDSPTVAYSVLVVAKVEKGKSKKLKSVKELLGITIMERSSFEKNPIDFLEAKGYKEVKKDLIIKLPKYSLFELENGRKRMLASAGELQKGNELALPSKYVNFLYLASHYEKLKGSPEDNEQKQLFVEQHKHYLDEIIEQISEFSKRVILADANLDKVLSAYNKHRDKPIREQAENIIHLFTLTNLGAPAAFKYFDTTIDRKRYTSTKEVLDATLIHQSITGLYETRIDLSQLGGDGGGGSEAAAKGSSGGTLNIEDEYRLHETSKEPDVPLGSTWLSDFPQAWAETGGMGLAVRQAPLIIPLKATSTPVSIKQYPMSQEARLGIKPHIQRLLDQGILVPCQSPWNTPLLPVKKPGTNDYRPVQDLREVNKRVEDIHPTVPNPYNLLSGLPPSHQWYTVLDLKDAFFCLRLHPTSQPLFAFEWRDPEMGISGQLTWTRLPQGFKNSPTLFNEALHRDLADFRIQHPDLILLQYVDDLLLAATSEQDCQRGTRALLQTLGNLGYRASAKKAQICQKQVKYLGYLLKEGQRWLTEARKETVMGQPTPKTPRQLREFLGKAGFCRLFIPGFAEMAAPLYPLTKPGTLFNWGPDQQKAYQEIKQALLTAPALGLPDLTKPFELFVDEKQGYAKGVLTQKLGPWRRPVAYLSKKLDPVAAGWPPCLRMVAAIAVLTKDAGKLTMGQPLVILAPHAVEALVKQPPDRWLSNARMTHYQAMLLDTDRVQFGPVVALNPATLLPLPEKEAPHDCLEILAETHGTRPDLTDQPIPDADYTWYTDGSSFLQEGQRRAGAAVTTETEVIWARALPAGTSAQRAELIALTQALKMAEGKKLNVYTDSRYAFATAHVHGEIYRRRGWLTSEGREIKNKNEILALLKALFLPKRLSIIHCPGHQKGNSAEARGNRMADQAAREAAMKAVLETSTLLAGKRTADGSEFEKRTADGSEFESPKKKAKVE

SEQ ID NO: 4523 - protein, 2096 aa, synthetic construct
MPAAKRVKLDGGDKKYSIGLDIGTNSVGWAVITDEYKVPSKKFKVLGNTDRHSIKKNLIGALLFDSGETAEATRLKRTARRRYTRRKNRICYLQEIFSNEMAKVDDSFFHRLEESFLVEEDKKHERHPIFGNIVDEVAYHEKYPTIYHLRKKLVDSTDKADLRLIYLALAHMIKFRGHFLIEGDLNPDNSDVDKLFIQLVQTYNQLFEENPINASGVDAKAILSARLSKSRRLENLIAQLPGEKKNGLFGNLIALSLGLTPNFKSNFDLAEDAKLQLSKDTYDDDLDNLLAQIGDQYADLFLAAKNLSDAILLSDILRVNTEITKAPLSASMIKRYDEHHQDLTLLKALVRQQLPEKYKEIFFDQSKNGYAGYIDGGASQEEFYKFIKPILEKMDGTEELLVKLNREDLLRKQRTFDNGSIPHQIHLGELHAILRRQEDFYPFLKDNREKIEKILTFRIPYYVGPLARGNSRFAWMTRKSEETITPWNFEEVVDKGASAQSFIERMTNFDKNLPNEKVLPKHSLLYEYFTVYNELTKVKYVTEGMRKPAFLSGEQKKAIVDLLFKTNRKVTVKQLKEDYFKKIECFDSVEISGVEDRFNASLGTYHDLLKIIKDKDFLDNEENEDILEDIVLTLTLFEDREMIEERLKTYAHLFDDKVMKQLKRRRYTGWGRLSRKLINGIRDKQSGKTILDFLKSDGFANRNFMQLIHDDSLTFKEDIQKAQVSGQGDSLHEHIANLAGSPAIKKGILQTVKVVDELVKVMGRHKPENIVIEMARENQTTQKGQKNSRERMKRIEEGIKELGSQILKEHPVENTQLQNEKLYLYYLQNGRDMYVDQELDINRLSDYDVDHIVPQSFLKDDSIDNKVLTRSDKARGKSDNVPSEEVVKKMKNYWRQLLNAKLITQRKFDNLTKAERGGLSELDKAGFIKRQLVETRQITKHVAQILDSRMNTKYDENDKLIREVKVITLKSKLVSDFRKDFQFYKVREINNYHHAHDAYLNAVVGTALIKKYPKLESEFVYGDYKVYDVRKMIAKSEQEIGKATAKYFFYSNIMNFFKTEITLANGEIRKRPLIETNGETGEIVWDKGRDFATVRKVLSMPQVNIVKKTEVQTGGFSKESILPKRNSDKLIARKKDWDPKKYGGFDSPTVAYSVLVVAKVEKGKSKKLKSVKELLGITIMERSSFEKNPIDFLEAKGYKEVKKDLIIKLPKYSLFELENGRKRMLASAGELQKGNELALPSKYVNFLYLASHYEKLKGSPEDNEQKQLFVEQHKHYLDEIIEQISEFSKRVILADANLDKVLSAYNKHRDKPIREQAENIIHLFTLTNLGAPAAFKYFDTTIDRKRYTSTKEVLDATLIHQSITGLYETRIDLSQLGGDGGEAAAKGGSGSSGGTLNIEDEYRLHETSKEPDVPLGSTWLSDFPQAWAETGGMGLAVRQAPLIIPLKATSTPVSIKQYPMSQEARLGIKPHIQRLLDQGILVPCQSPWNTPLLPVKKPGTNDYRPVQDLREVNKRVEDIHPTVPNPYNLLSGLPPSHQWYTVLDLKDAFFCLRLHPTSQPLFAFEWRDPEMGISGQLTWTRLPQGFKNSPTLFNEALHRDLADFRIQHPDLILLQYVDDLLLAATSEQDCQRGTRALLQTLGNLGYRASAKKAQICQKQVKYLGYLLKEGQRWLTEARKETVMGQPTPKTPRQLREFLGTAGFCRLWIPGFAEMAAPLYPLTKPGTLFNWGPDQQKAYQEIKQALLTAPALGLPDLTKPFELFVDEKQGYAKGVLTQKLGPWRRPVAYLSKKLDPVAAGWPPCLRMVAAIAVLTKDAGKLTMGQPLVILAPHAVEALVKQPPDRWLSNARMTHYQAMLLDTDRVQFGPVVALNPATLLPLPEKEAPHDCLEILAETHGTRPDLTDQPIPDADYTWYTDGSSFLQEGQRRAGAAVTTETEVIWARALPAGTSAQRAELIALTQALKMAEGKKLNVYTDSRYAFATAHVHGEIYRRRGWLTSEGREIKNKNEILALLKALFLPKRLSIIHCPGHQKGNSAEARGNRMADQAAREAAMKAVLETSTLLAGKRTADGSEFEKRTADGSEFESPKKKAKVE

SEQ ID NO: 4524 - protein, 2096 aa, synthetic construct
MPAAKRVKLDGGDKKYSIGLDIGTNSVGWAVITDEYKVPSKKFKVLGNTDRHSIKKNLIGALLFDSGETAEATRLKRTARRRYTRRKNRICYLQEIFSNEMAKVDDSFFHRLEESFLVEEDKKHERHPIFGNIVDEVAYHEKYPTIYHLRKKLVDSTDKADLRLIYLALAHMIKFRGHFLIEGDLNPDNSDVDKLFIQLVQTYNQLFEENPINASGVDAKAILSARLSKSRRLENLIAQLPGEKKNGLFGNLIALSLGLTPNFKSNFDLAEDAKLQLSKDTYDDDLDNLLAQIGDQYADLFLAAKNLSDAILLSDILRVNTEITKAPLSASMIKRYDEHHQDLTLLKALVRQQLPEKYKEIFFDQSKNGYAGYIDGGASQEEFYKFIKPILEKMDGTEELLVKLNREDLLRKQRTFDNGSIPHQIHLGELHAILRRQEDFYPFLKDNREKIEKILTFRIPYYVGPLARGNSRFAWMTRKSEETITPWNFEEVVDKGASAQSFIERMTNFDKNLPNEKVLPKHSLLYEYFTVYNELTKVKYVTEGMRKPAFLSGEQKKAIVDLLFKTNRKVTVKQLKEDYFKKIECFDSVEISGVEDRFNASLGTYHDLLKIIKDKDFLDNEENEDILEDIVLTLTLFEDREMIEERLKTYAHLFDDKVMKQLKRRRYTGWGRLSRKLINGIRDKQSGKTILDFLKSDGFANRNFMQLIHDDSLTFKEDIQKAQVSGQGDSLHEHIANLAGSPAIKKGILQTVKVVDELVKVMGRHKPENIVIEMARENQTTQKGQKNSRERMKRIEEGIKELGSQILKEHPVENTQLQNEKLYLYYLQNGRDMYVDQELDINRLSDYDVDHIVPQSFLKDDSIDNKVLTRSDKARGKSDNVPSEEVVKKMKNYWRQLLNAKLITQRKFDNLTKAERGGLSELDKAGFIKRQLVETRQITKHVAQILDSRMNTKYDENDKLIREVKVITLKSKLVSDFRKDFQFYKVREINNYHHAHDAYLNAVVGTALIKKYPKLESEFVYGDYKVYDVRKMIAKSEQEIGKATAKYFFYSNIMNFFKTEITLANGEIRKRPLIETNGETGEIVWDKGRDFATVRKVLSMPQVNIVKKTEVQTGGFSKESILPKRNSDKLIARKKDWDPKKYGGFDSPTVAYSVLVVAKVEKGKSKKLKSVKELLGITIMERSSFEKNPIDFLEAKGYKEVKKDLIIKLPKYSLFELENGRKRMLASAGELQKGNELALPSKYVNFLYLASHYEKLKGSPEDNEQKQLFVEQHKHYLDEIIEQISEFSKRVILADANLDKVLSAYNKHRDKPIREQAENIIHLFTLTNLGAPAAFKYFDTTIDRKRYTSTKEVLDATLIHQSITGLYETRIDLSQLGGDGGEAAAKGSSGGSGGTLNIEDEYRLHETSKEPDVPLGSTWLSDFPQAWAETGGMGLAVRQAPLIIPLKATSTPVSIKQYPMSQEARLGIKPHIQRLLDQGILVPCQSPWNTPLLPVKKPGTNDYRPVQDLREVNKRVEDIHPTVPNPYNLLSGLPPSHQWYTVLDLKDAFFCLRLHPTSQPLFAFEWRDPEMGISGQLTWTRLPQGFKNSPTLFNEALHRDLADFRIQHPDLILLQYVDDLLLAATSEQDCQRGTRALLQTLGNLGYRASAKKAQICQKQVKYLGYLLKEGQRWLTEARKETVMGQPTPKTPRQLREFLGTAGFCRLWIPGFAEMAAPLYPLTKPGTLFNWGPDQQKAYQEIKQALLTAPALGLPDLTKPFELFVDEKQGYAKGVLTQKLGPWRRPVAYLSKKLDPVAAGWPPCLRMVAAIAVLTKDAGKLTMGQPLVILAPHAVEALVKQPPDRWLSNARMTHYQAMLLDTDRVQFGPVVALNPATLLPLPEKEAPHDCLEILAETHGTRPDLTDQPIPDADYTWYTDGSSFLQEGQRRAGAAVTTETEVIWARALPAGTSAQRAELIALTQALKMAEGKKLNVYTDSRYAFATAHVHGEIYRRRGWLTSEGREIKNKNEILALLKALFLPKRLSIIHCPGHQKGNSAEARGNRMADQAAREAAMKAVLETSTLLAGKRTADGSEFEKRTADGSEFESPKKKAKVE

SEQ ID NO: 4525 - protein, 2094 aa, synthetic construct
MPAAKRVKLDGGDKKYSIGLDIGTNSVGWAVITDEYKVPSKKFKVLGNTDRHSIKKNLIGALLFDSGETAEATRLKRTARRRYTRRKNRICYLQEIFSNEMAKVDDSFFHRLEESFLVEEDKKHERHPIFGNIVDEVAYHEKYPTIYHLRKKLVDSTDKADLRLIYLALAHMIKFRGHFLIEGDLNPDNSDVDKLFIQLVQTYNQLFEENPINASGVDAKAILSARLSKSRRLENLIAQLPGEKKNGLFGNLIALSLGLTPNFKSNFDLAEDAKLQLSKDTYDDDLDNLLAQIGDQYADLFLAAKNLSDAILLSDILRVNTEITKAPLSASMIKRYDEHHQDLTLLKALVRQQLPEKYKEIFFDQSKNGYAGYIDGGASQEEFYKFIKPILEKMDGTEELLVKLNREDLLRKQRTFDNGSIPHQIHLGELHAILRRQEDFYPFLKDNREKIEKILTFRIPYYVGPLARGNSRFAWMTRKSEETITPWNFEEVVDKGASAQSFIERMTNFDKNLPNEKVLPKHSLLYEYFTVYNELTKVKYVTEGMRKPAFLSGEQKKAIVDLLFKTNRKVTVKQLKEDYFKKIECFDSVEISGVEDRFNASLGTYHDLLKIIKDKDFLDNEENEDILEDIVLTLTLFEDREMIEERLKTYAHLFDDKVMKQLKRRRYTGWGRLSRKLINGIRDKQSGKTILDFLKSDGFANRNFMQLIHDDSLTFKEDIQKAQVSGQGDSLHEHIANLAGSPAIKKGILQTVKVVDELVKVMGRHKPENIVIEMARENQTTQKGQKNSRERMKRIEEGIKELGSQILKEHPVENTQLQNEKLYLYYLQNGRDMYVDQELDINRLSDYDVDHIVPQSFLKDDSIDNKVLTRSDKARGKSDNVPSEEVVKKMKNYWRQLLNAKLITQRKFDNLTKAERGGLSELDKAGFIKRQLVETRQITKHVAQILDSRMNTKYDENDKLIREVKVITLKSKLVSDFRKDFQFYKVREINNYHHAHDAYLNAVVGTALIKKYPKLESEFVYGDYKVYDVRKMIAKSEQEIGKATAKYFFYSNIMNFFKTEITLANGEIRKRPLIETNGETGEIVWDKGRDFATVRKVLSMPQVNIVKKTEVQTGGFSKESILPKRNSDKLIARKKDWDPKKYGGFDSPTVAYSVLVVAKVEKGKSKKLKSVKELLGITIMERSSFEKNPIDFLEAKGYKEVKKDLIIKLPKYSLFELENGRKRMLASAGELQKGNELALPSKYVNFLYLASHYEKLKGSPEDNEQKQLFVEQHKHYLDEIIEQISEFSKRVILADANLDKVLSAYNKHRDKPIREQAENIIHLFTLTNLGAPAAFKYFDTTIDRKRYTSTKEVLDATLIHQSITGLYETRIDLSQLGGDGGGGSPAPGSSGGTLNIEDEYRLHETSKEPDVPLGSTWLSDFPQAWAETGGMGLAVRQAPLIIPLKATSTPVSIKQYPMSQEARLGIKPHIQRLLDQGILVPCQSPWNTPLLPVKKPGTNDYRPVQDLREVNKRVEDIHPTVPNPYNLLSGLPPSHQWYTVLDLKDAFFCLRLHPTSQPLFAFEWRDPEMGISGQLTWTRLPQGFKNSPTLFNEALHRDLADFRIQHPDLILLQYVDDLLLAATSEQDCQRGTRALLQTLGNLGYRASAKKAQICQKQVKYLGYLLKEGQRWLTEARKETVMGQPTPKTPRQLREFLGKAGFCRLFIPGFAEMAAPLYPLTKPGTLFNWGPDQQKAYQEIKQALLTAPALGLPDLTKPFELFVDEKQGYAKGVLTQKLGPWRRPVAYLSKKLDPVAAGWPPCLRMVAAIAVLTKDAGKLTMGQPLVILAPHAVEALVKQPPDRWLSNARMTHYQAMLLDTDRVQFGPVVALNPATLLPLPEKEAPHDCLEILAETHGTRPDLTDQPIPDADYTWYTDGSSFLQEGQRRAGAAVTTETEVIWARALPAGTSAQRAELIALTQALKMAEGKKLNVYTDSRYAFATAHVHGEIYRRRGWLTSEGREIKNKNEILALLKALFLPKRLSIIHCPGHQKGNSAEARGNRMADQAAREAAMKAVLETSTLLAGKRTADGSEFEKRTADGSEFESPKKKAKVE

SEQ ID NO: 4526 - protein, 2125 aa, synthetic construct
MPAAKRVKLDGGDKKYSIGLDIGTNSVGWAVITDEYKVPSKKFKVLGNTDRHSIKKNLIGALLFDSGETAEATRLKRTARRRYTRRKNRICYLQEIFSNEMAKVDDSFFHRLEESFLVEEDKKHERHPIFGNIVDEVAYHEKYPTIYHLRKKLVDSTDKADLRLIYLALAHMIKFRGHFLIEGDLNPDNSDVDKLFIQLVQTYNQLFEENPINASGVDAKAILSARLSKSRRLENLIAQLPGEKKNGLFGNLIALSLGLTPNFKSNFDLAEDAKLQLSKDTYDDDLDNLLAQIGDQYADLFLAAKNLSDAILLSDILRVNTEITKAPLSASMIKRYDEHHQDLTLLKALVRQQLPEKYKEIFFDQSKNGYAGYIDGGASQEEFYKFIKPILEKMDGTEELLVKLNREDLLRKQRTFDNGSIPHQIHLGELHAILRRQEDFYPFLKDNREKIEKILTFRIPYYVGPLARGNSRFAWMTRKSEETITPWNFEEVVDKGASAQSFIERMTNFDKNLPNEKVLPKHSLLYEYFTVYNELTKVKYVTEGMRKPAFLSGEQKKAIVDLLFKTNRKVTVKQLKEDYFKKIECFDSVEISGVEDRFNASLGTYHDLLKIIKDKDFLDNEENEDILEDIVLTLTLFEDREMIEERLKTYAHLFDDKVMKQLKRRRYTGWGRLSRKLINGIRDKQSGKTILDFLKSDGFANRNFMQLIHDDSLTFKEDIQKAQVSGQGDSLHEHIANLAGSPAIKKGILQTVKVVDELVKVMGRHKPENIVIEMARENQTTQKGQKNSRERMKRIEEGIKELGSQILKEHPVENTQLQNEKLYLYYLQNGRDMYVDQELDINRLSDYDVDHIVPQSFLKDDSIDNKVLTRSDKARGKSDNVPSEEVVKKMKNYWRQLLNAKLITQRKFDNLTKAERGGLSELDKAGFIKRQLVETRQITKHVAQILDSRMNTKYDENDKLIREVKVITLKSKLVSDFRKDFQFYKVREINNYHHAHDAYLNAVVGTALIKKYPKLESEFVYGDYKVYDVRKMIAKSEQEIGKATAKYFFYSNIMNFFKTEITLANGEIRKRPLIETNGETGEIVWDKGRDFATVRKVLSMPQVNIVKKTEVQTGGFSKESILPKRNSDKLIARKKDWDPKKYGGFDSPTVAYSVLVVAKVEKGKSKKLKSVKELLGITIMERSSFEKNPIDFLEAKGYKEVKKDLIIKLPKYSLFELENGRKRMLASAGELQKGNELALPSKYVNFLYLASHYEKLKGSPEDNEQKQLFVEQHKHYLDEIIEQISEFSKRVILADANLDKVLSAYNKHRDKPIREQAENIIHLFTLTNLGAPAAFKYFDTTIDRKRYTSTKEVLDATLIHQSITGLYETRIDLSQLGGDGGGSSPAPGGSGGLLGRDLLTKLKAQIQFSTEGPQVTWEDRPAMCLVLNLEEEYRLHEKPVPPSIDPSWLQLFPMVWAEKAGMGLANQVPPVVVELKSDASPVAVRQYPMSKEAREGIRPHIQRFLDLGILVPCQSPWNTPLLPVKKPGTNDYRPVQDLREVNKRVQDIHPTVPNPYNLLSSLPPSHTWYSVLDLKDAFFCLKLHPNSQPLFAFEWRDPEKGNTGQLTWTRLPQGFKNSPTLFNEALHRDLASFRALNPQVVMLQYVDDLLVAAPTYRDCKEGTRRLLQELSKLGYRVSAKKAQLCREEVTYLGYLLKGGKRWLTPARKATVMKIPTPTTPRQVREFLGTAGFCRLWIPGFASLAAPLYPLTRPKVPFTWTEAHQEAFGRIKEALLSAPALALPDLTKPFALYVDEKEGVARGVLTQTLGPWRRPVAYLSKKLDPVASGWPTCLKAIAAVALLLKDADKLTLGQNVLVIAPHNLESIVRQPPDRWMTNARMTHYQSLLLNERVSFAPPAILNPATLLPVESDDTPIHICSEILAEETGTRPDLRDQPLPGVPAWYTDGSSFIMDGRRQAGAAIVDNKRTVWASNLPEGTSAQKAELIALTQALRLAEGKSINIYTDSRYAFATAHVHGAIYKQRGWLTSAGKDIKNKEEILALLEAIHLPKRVAIIHCPGHQRGTDPVATGNRKADEAAKQAAQSTRILTETTKNAGKRTADGSEFEKRTADGSEFESPKKKAKVE

SEQ ID NO: 4527 - protein, 2096 aa, synthetic construct
MPAAKRVKLDGGDKKYSIGLDIGTNSVGWAVITDEYKVPSKKFKVLGNTDRHSIKKNLIGALLFDSGETAEATRLKRTARRRYTRRKNRICYLQEIFSNEMAKVDDSFFHRLEESFLVEEDKKHERHPIFGNIVDEVAYHEKYPTIYHLRKKLVDSTDKADLRLIYLALAHMIKFRGHFLIEGDLNPDNSDVDKLFIQLVQTYNQLFEENPINASGVDAKAILSARLSKSRRLENLIAQLPGEKKNGLFGNLIALSLGLTPNFKSNFDLAEDAKLQLSKDTYDDDLDNLLAQIGDQYADLFLAAKNLSDAILLSDILRVNTEITKAPLSASMIKRYDEHHQDLTLLKALVRQQLPEKYKEIFFDQSKNGYAGYIDGGASQEEFYKFIKPILEKMDGTEELLVKLNREDLLRKQRTFDNGSIPHQIHLGELHAILRRQEDFYPFLKDNREKIEKILTFRIPYYVGPLARGNSRFAWMTRKSEETITPWNFEEVVDKGASAQSFIERMTNFDKNLPNEKVLPKHSLLYEYFTVYNELTKVKYVTEGMRKPAFLSGEQKKAIVDLLFKTNRKVTVKQLKEDYFKKIECFDSVEISGVEDRFNASLGTYHDLLKIIKDKDFLDNEENEDILEDIVLTLTLFEDREMIEERLKTYAHLFDDKVMKQLKRRRYTGWGRLSRKLINGIRDKQSGKTILDFLKSDGFANRNFMQLIHDDSLTFKEDIQKAQVSGQGDSLHEHIANLAGSPAIKKGILQTVKVVDELVKVMGRHKPENIVIEMARENQTTQKGQKNSRERMKRIEEGIKELGSQILKEHPVENTQLQNEKLYLYYLQNGRDMYVDQELDINRLSDYDVDHIVPQSFLKDDSIDNKVLTRSDKARGKSDNVPSEEVVKKMKNYWRQLLNAKLITQRKFDNLTKAERGGLSELDKAGFIKRQLVETRQITKHVAQILDSRMNTKYDENDKLIREVKVITLKSKLVSDFRKDFQFYKVREINNYHHAHDAYLNAVVGTALIKKYPKLESEFVYGDYKVYDVRKMIAKSEQEIGKATAKYFFYSNIMNFFKTEITLANGEIRKRPLIETNGETGEIVWDKGRDFATVRKVLSMPQVNIVKKTEVQTGGFSKESILPKRNSDKLIARKKDWDPKKYGGFDSPTVAYSVLVVAKVEKGKSKKLKSVKELLGITIMERSSFEKNPIDFLEAKGYKEVKKDLIIKLPKYSLFELENGRKRMLASAGELQKGNELALPSKYVNFLYLASHYEKLKGSPEDNEQKQLFVEQHKHYLDEIIEQISEFSKRVILADANLDKVLSAYNKHRDKPIREQAENIIHLFTLTNLGAPAAFKYFDTTIDRKRYTSTKEVLDATLIHQSITGLYETRIDLSQLGGDGGEAAAKPAPGGSGGTLNIEDEYRLHETSKEPDVPLGSTWLSDFPQAWAETGGMGLAVRQAPLIIPLKATSTPVSIKQYPMSQEARLGIKPHIQRLLDQGILVPCQSPWNTPLLPVKKPGTNDYRPVQDLREVNKRVEDIHPTVPNPYNLLSGLPPSHQWYTVLDLKDAFFCLRLHPTSQPLFAFEWRDPEMGISGQLTWTRLPQGFKNSPTLFNEALHRDLADFRIQHPDLILLQYVDDLLLAATSEQDCQRGTRALLQTLGNLGYRASAKKAQICQKQVKYLGYLLKEGQRWLTEARKETVMGQPTPKTPRQLREFLGKAGFCRLFIPGFAEMAAPLYPLTKPGTLFNWGPDQQKAYQEIKQALLTAPALGLPDLTKPFELFVDEKQGYAKGVLTQKLGPWRRPVAYLSKKLDPVAAGWPPCLRMVAAIAVLTKDAGKLTMGQPLVILAPHAVEALVKQPPDRWLSNARMTHYQAMLLDTDRVQFGPVVALNPATLLPLPEKEAPHDCLEILAETHGTRPDLTDQPIPDADYTWYTDGSSFLQEGQRRAGAAVTTETEVIWARALPAGTSAQRAELIALTQALKMAEGKKLNVYTDSRYAFATAHVHGEIYRRRGWLTSEGREIKNKNEILALLKALFLPKRLSIIHCPGHQKGNSAEARGNRMADQAAREAAMKAVLETSTLLAGKRTADGSEFEKRTADGSEFESPKKKAKVE

SEQ ID NO: 4528 - protein, 2096 aa, synthetic construct
MPAAKRVKLDGGDKKYSIGLDIGTNSVGWAVITDEYKVPSKKFKVLGNTDRHSIKKNLIGALLFDSGETAEATRLKRTARRRYTRRKNRICYLQEIFSNEMAKVDDSFFHRLEESFLVEEDKKHERHPIFGNIVDEVAYHEKYPTIYHLRKKLVDSTDKADLRLIYLALAHMIKFRGHFLIEGDLNPDNSDVDKLFIQLVQTYNQLFEENPINASGVDAKAILSARLSKSRRLENLIAQLPGEKKNGLFGNLIALSLGLTPNFKSNFDLAEDAKLQLSKDTYDDDLDNLLAQIGDQYADLFLAAKNLSDAILLSDILRVNTEITKAPLSASMIKRYDEHHQDLTLLKALVRQQLPEKYKEIFFDQSKNGYAGYIDGGASQEEFYKFIKPILEKMDGTEELLVKLNREDLLRKQRTFDNGSIPHQIHLGELHAILRRQEDFYPFLKDNREKIEKILTFRIPYYVGPLARGNSRFAWMTRKSEETITPWNFEEVVDKGASAQSFIERMTNFDKNLPNEKVLPKHSLLYEYFTVYNELTKVKYVTEGMRKPAFLSGEQKKAIVDLLFKTNRKVTVKQLKEDYFKKIECFDSVEISGVEDRFNASLGTYHDLLKIIKDKDFLDNEENEDILEDIVLTLTLFEDREMIEERLKTYAHLFDDKVMKQLKRRRYTGWGRLSRKLINGIRDKQSGKTILDFLKSDGFANRNFMQLIHDDSLTFKEDIQKAQVSGQGDSLHEHIANLAGSPAIKKGILQTVKVVDELVKVMGRHKPENIVIEMARENQTTQKGQKNSRERMKRIEEGIKELGSQILKEHPVENTQLQNEKLYLYYLQNGRDMYVDQELDINRLSDYDVDHIVPQSFLKDDSIDNKVLTRSDKARGKSDNVPSEEVVKKMKNYWRQLLNAKLITQRKFDNLTKAERGGLSELDKAGFIKRQLVETRQITKHVAQILDSRMNTKYDENDKLIREVKVITLKSKLVSDFRKDFQFYKVREINNYHHAHDAYLNAVVGTALIKKYPKLESEFVYGDYKVYDVRKMIAKSEQEIGKATAKYFFYSNIMNFFKTEITLANGEIRKRPLIETNGETGEIVWDKGRDFATVRKVLSMPQVNIVKKTEVQTGGFSKESILPKRNSDKLIARKKDWDPKKYGGFDSPTVAYSVLVVAKVEKGKSKKLKSVKELLGITIMERSSFEKNPIDFLEAKGYKEVKKDLIIKLPKYSLFELENGRKRMLASAGELQKGNELALPSKYVNFLYLASHYEKLKGSPEDNEQKQLFVEQHKHYLDEIIEQISEFSKRVILADANLDKVLSAYNKHRDKPIREQAENIIHLFTLTNLGAPAAFKYFDTTIDRKRYTSTKEVLDATLIHQSITGLYETRIDLSQLGGDGGPAPEAAAKGGSGGTLNLEDEYRLYETSAEPEVSPGSTWLSDFPQAWAETGGMGLAVRQAPLIIPLKATSTPVSIKQYPMSQEAKLGIKPHIQRLLDQGILVPCQSPWNTPLLPVKKPGTNDYRPVQDLREVNKRVEDIHPTVPNPYNLLSGLPPSHRWYTVLDLKDAFFCLRLHPTSQPLFAFEWRDPGMGISGQLTWTRLPQGFKNSPTLFNEALHRDLADFRIQHPDLILLQYVDDILLAATSELDCQQGTRALLLTLGNLGYRASAKKAQLCQKQVKYLGYLLKEGQRWLTEARKETVMGQPTPKTPRQLREFLGKAGFCRLFIPGFAEMAAPLYPLTKPGTLFNWGPDQQKAYQEIKQALLTAPALGLPDLTKPFELFVDEKQGYAKGVLTQKLGPWRRPVAYLSKKLDPVAAGWPPCLRMVAAIAVLRKDAGKLTMGQPLVILAPHAVEALVKQPPDRWLSNARMTHYQAMLLDTDRVQFGPVVALNPATLLPLPEEGAPHDCLEILAETHGTRPDLTDQPIPDADHTWYTDGSSFLQEGQRKAGAAVTTETEVIWARALPAGTSAQRAELIALTQALKMAEGKRLNVYTDSRYAFATAHIHGEIYRRRGWLTSEGREIKNKSEILALLKALFLPKRLSIIHCLGHQKGDSAEARGNRLADQAAREAAIKTPPDTSTLLAGKRTADGSEFEKRTADGSEFESPKKKAKVE

SEQ ID NO: 4529 - protein, 2088 aa, synthetic construct
MPAAKRVKLDGGDKKYSIGLDIGTNSVGWAVITDEYKVPSKKFKVLGNTDRHSIKKNLIGALLFDSGETAEATRLKRTARRRYTRRKNRICYLQEIFSNEMAKVDDSFFHRLEESFLVEEDKKHERHPIFGNIVDEVAYHEKYPTIYHLRKKLVDSTDKADLRLIYLALAHMIKFRGHFLIEGDLNPDNSDVDKLFIQLVQTYNQLFEENPINASGVDAKAILSARLSKSRRLENLIAQLPGEKKNGLFGNLIALSLGLTPNFKSNFDLAEDAKLQLSKDTYDDDLDNLLAQIGDQYADLFLAAKNLSDAILLSDILRVNTEITKAPLSASMIKRYDEHHQDLTLLKALVRQQLPEKYKEIFFDQSKNGYAGYIDGGASQEEFYKFIKPILEKMDGTEELLVKLNREDLLRKQRTFDNGSIPHQIHLGELHAILRRQEDFYPFLKDNREKIEKILTFRIPYYVGPLARGNSRFAWMTRKSEETITPWNFEEVVDKGASAQSFIERMTNFDKNLPNEKVLPKHSLLYEYFTVYNELTKVKYVTEGMRKPAFLSGEQKKAIVDLLFKTNRKVTVKQLKEDYFKKIECFDSVEISGVEDRFNASLGTYHDLLKIIKDKDFLDNEENEDILEDIVLTLTLFEDREMIEERLKTYAHLFDDKVMKQLKRRRYTGWGRLSRKLINGIRDKQSGKTILDFLKSDGFANRNFMQLIHDDSLTFKEDIQKAQVSGQGDSLHEHIANLAGSPAIKKGILQTVKVVDELVKVMGRHKPENIVIEMARENQTTQKGQKNSRERMKRIEEGIKELGSQILKEHPVENTQLQNEKLYLYYLQNGRDMYVDQELDINRLSDYDVDHIVPQSFLKDDSIDNKVLTRSDKARGKSDNVPSEEVVKKMKNYWRQLLNAKLITQRKFDNLTKAERGGLSELDKAGFIKRQLVETRQITKHVAQILDSRMNTKYDENDKLIREVKVITLKSKLVSDFRKDFQFYKVREINNYHHAHDAYLNAVVGTALIKKYPKLESEFVYGDYKVYDVRKMIAKSEQEIGKATAKYFFYSNIMNFFKTEITLANGEIRKRPLIETNGETGEIVWDKGRDFATVRKVLSMPQVNIVKKTEVQTGGFSKESILPKRNSDKLIARKKDWDPKKYGGFDSPTVAYSVLVVAKVEKGKSKKLKSVKELLGITIMERSSFEKNPIDFLEAKGYKEVKKDLIIKLPKYSLFELENGRKRMLASAGELQKGNELALPSKYVNFLYLASHYEKLKGSPEDNEQKQLFVEQHKHYLDEIIEQISEFSKRVILADANLDKVLSAYNKHRDKPIREQAENIIHLFTLTNLGAPAAFKYFDTTIDRKRYTSTKEVLDATLIHQSITGLYETRIDLSQLGGDGGPAPEAAAKGGSGGLDDEYRLYSPLVKPDQNIQFWLEQFPQAWAETAGMGLAKQVPPQVIQLKASATPVSVRQYPLSKEAQEGIRPHVQRLIQQGILVPVQSPWNTPLLPVRKPGTNDYRPVQDLREVNKRVQDIHPTVPNPYNLLCALPPQRSWYTVLDLKDAFFCLRLHPTSQPLFAFEWRDPGTGRTGQLTWTRLPQGFKNSPTIFNEALHRDLANFRIQHPQVTLLQYVDDLLLAGATKQDCLEGTKALLLELSDLGYRASAKKAQICRREVTYLGYSLRDGQRWLTEARKKTVVQIPAPTTAKQVREFLGKAGFCRLFIPGFATLAAPLYPLTKPKGEFSWAPEHQKAFDAIKKALLSAPALALPDVTKPFTLYVDERKGVARGVLTQTLGPWRRPVAYLSKKLDPVASGWPVCLKAIAAVAILVKDADKLTLGQNITVIAPHALENIVRQPPDRWMTNARMTHYQSLLLTERVTFAPPAALNPATLLPEETDEPVTHDCHQLLIEETGVRKDLTDIPLTGEVLTWFTDGSSYVVEGKRMAGAAVVDGTRTIWASSLPEGTSAQKAELMALTQALRLAEGKSINIYTDSRYAFATAHVHGAIYKQRGWLTSAGREIKNKEEILSLLEALHLPKRLAIIHCPGHQKAKDPISRGNQMADRVAKQAAQGVNLLPAGKRTADGSEFEKRTADGSEFESPKKKAKVE

SEQ ID NO: 4530 - protein, 2096 aa, synthetic construct
MPAAKRVKLDGGDKKYSIGLDIGTNSVGWAVITDEYKVPSKKFKVLGNTDRHSIKKNLIGALLFDSGETAEATRLKRTARRRYTRRKNRICYLQEIFSNEMAKVDDSFFHRLEESFLVEEDKKHERHPIFGNIVDEVAYHEKYPTIYHLRKKLVDSTDKADLRLIYLALAHMIKFRGHFLIEGDLNPDNSDVDKLFIQLVQTYNQLFEENPINASGVDAKAILSARLSKSRRLENLIAQLPGEKKNGLFGNLIALSLGLTPNFKSNFDLAEDAKLQLSKDTYDDDLDNLLAQIGDQYADLFLAAKNLSDAILLSDILRVNTEITKAPLSASMIKRYDEHHQDLTLLKALVRQQLPEKYKEIFFDQSKNGYAGYIDGGASQEEFYKFIKPILEKMDGTEELLVKLNREDLLRKQRTFDNGSIPHQIHLGELHAILRRQEDFYPFLKDNREKIEKILTFRIPYYVGPLARGNSRFAWMTRKSEETITPWNFEEVVDKGASAQSFIERMTNFDKNLPNEKVLPKHSLLYEYFTVYNELTKVKYVTEGMRKPAFLSGEQKKAIVDLLFKTNRKVTVKQLKEDYFKKIECFDSVEISGVEDRFNASLGTYHDLLKIIKDKDFLDNEENEDILEDIVLTLTLFEDREMIEERLKTYAHLFDDKVMKQLKRRRYTGWGRLSRKLINGIRDKQSGKTILDFLKSDGFANRNFMQLIHDDSLTFKEDIQKAQVSGQGDSLHEHIANLAGSPAIKKGILQTVKVVDELVKVMGRHKPENIVIEMARENQTTQKGQKNSRERMKRIEEGIKELGSQILKEHPVENTQLQNEKLYLYYLQNGRDMYVDQELDINRLSDYDVDHIVPQSFLKDDSIDNKVLTRSDKARGKSDNVPSEEVVKKMKNYWRQLLNAKLITQRKFDNLTKAERGGLSELDKAGFIKRQLVETRQITKHVAQILDSRMNTKYDENDKLIREVKVITLKSKLVSDFRKDFQFYKVREINNYHHAHDAYLNAVVGTALIKKYPKLESEFVYGDYKVYDVRKMIAKSEQEIGKATAKYFFYSNIMNFFKTEITLANGEIRKRPLIETNGETGEIVWDKGRDFATVRKVLSMPQVNIVKKTEVQTGGFSKESILPKRNSDKLIARKKDWDPKKYGGFDSPTVAYSVLVVAKVEKGKSKKLKSVKELLGITIMERSSFEKNPIDFLEAKGYKEVKKDLIIKLPKYSLFELENGRKRMLASAGELQKGNELALPSKYVNFLYLASHYEKLKGSPEDNEQKQLFVEQHKHYLDEIIEQISEFSKRVILADANLDKVLSAYNKHRDKPIREQAENIIHLFTLTNLGAPAAFKYFDTTIDRKRYTSTKEVLDATLIHQSITGLYETRIDLSQLGGDGGGGGEAAAKGSSGGTLNIEDEHRLHETSKEPDVSLGSTWLSDFPQAWAETGGMGLAVRQAPLIIPLKATSTPVSIKQYPMSQEARLGIKPHIQRLLDQGILVPCQSPWNTPLLPVKKPGTNDYRPVQDLREVNKRVEDIHPTVPNPYNLLSGLPPSHQWYTVLDLKDAFFCLRLHPTSQPLFAFEWRDPEMGISGQLTWTRLPQGFKNSPTLFNEALHRDLADFRIQHPDLILLQYVDDLLLAATSELDCQQGTRALLQTLGNLGYRASAKKAQICQKQVKYLGYLLKEGQRWLTEARKETVMGQPTPKTPRQLREFLGTAGFCRLWIPGFAEMAAPLYPLTKPGTLFNWGPDQQKAYQEIKQALLTAPALGLPDLTKPFELFVDEKQGYAKGVLTQKLGPWRRPVAYLSKKLDPVAAGWPPCLRMVAAIAVLTKDAGKLTMGQPLVILAPHAVEALVKQPPDRWLSNARMTHYQALLLDTDRVQFGPVVALNPATLLPLPEEGLQHNCLDILAEAHGTRPDLTDQPLPDADHTWYTDGSSLLQEGQRKAGAAVTTETEVIWAKALPAGTSAQRAELIALTQALKMAEGKKLNVYTDSRYAFATAHIHGEIYRRRGWLTSEGKEIKNKDEILALLKALFLPKRLSIIHCPGHQKGHSAEARGNRMADQAARKAAITETPDTSTLLAGKRTADGSEFEKRTADGSEFESPKKKAKVE

SEQ ID NO: 4531 - protein, 2094 aa, synthetic construct
MPAAKRVKLDGGDKKYSIGLDIGTNSVGWAVITDEYKVPSKKFKVLGNTDRHSIKKNLIGALLFDSGETAEATRLKRTARRRYTRRKNRICYLQEIFSNEMAKVDDSFFHRLEESFLVEEDKKHERHPIFGNIVDEVAYHEKYPTIYHLRKKLVDSTDKADLRLIYLALAHMIKFRGHFLIEGDLNPDNSDVDKLFIQLVQTYNQLFEENPINASGVDAKAILSARLSKSRRLENLIAQLPGEKKNGLFGNLIALSLGLTPNFKSNFDLAEDAKLQLSKDTYDDDLDNLLAQIGDQYADLFLAAKNLSDAILLSDILRVNTEITKAPLSASMIKRYDEHHQDLTLLKALVRQQLPEKYKEIFFDQSKNGYAGYIDGGASQEEFYKFIKPILEKMDGTEELLVKLNREDLLRKQRTFDNGSIPHQIHLGELHAILRRQEDFYPFLKDNREKIEKILTFRIPYYVGPLARGNSRFAWMTRKSEETITPWNFEEVVDKGASAQSFIERMTNFDKNLPNEKVLPKHSLLYEYFTVYNELTKVKYVTEGMRKPAFLSGEQKKAIVDLLFKTNRKVTVKQLKEDYFKKIECFDSVEISGVEDRFNASLGTYHDLLKIIKDKDFLDNEENEDILEDIVLTLTLFEDREMIEERLKTYAHLFDDKVMKQLKRRRYTGWGRLSRKLINGIRDKQSGKTILDFLKSDGFANRNFMQLIHDDSLTFKEDIQKAQVSGQGDSLHEHIANLAGSPAIKKGILQTVKVVDELVKVMGRHKPENIVIEMARENQTTQKGQKNSRERMKRIEEGIKELGSQILKEHPVENTQLQNEKLYLYYLQNGRDMYVDQELDINRLSDYDVDHIVPQSFLKDDSIDNKVLTRSDKARGKSDNVPSEEVVKKMKNYWRQLLNAKLITQRKFDNLTKAERGGLSELDKAGFIKRQLVETRQITKHVAQILDSRMNTKYDENDKLIREVKVITLKSKLVSDFRKDFQFYKVREINNYHHAHDAYLNAVVGTALIKKYPKLESEFVYGDYKVYDVRKMIAKSEQEIGKATAKYFFYSNIMNFFKTEITLANGEIRKRPLIETNGETGEIVWDKGRDFATVRKVLSMPQVNIVKKTEVQTGGFSKESILPKRNSDKLIARKKDWDPKKYGGFDSPTVAYSVLVVAKVEKGKSKKLKSVKELLGITIMERSSFEKNPIDFLEAKGYKEVKKDLIIKLPKYSLFELENGRKRMLASAGELQKGNELALPSKYVNFLYLASHYEKLKGSPEDNEQKQLFVEQHKHYLDEIIEQISEFSKRVILADANLDKVLSAYNKHRDKPIREQAENIIHLFTLTNLGAPAAFKYFDTTIDRKRYTSTKEVLDATLIHQSITGLYETRIDLSQLGGDGGEAAAKGGGGSSGGVLNLEEEYRLHEKPVPSSIDPSWLQLFPTVWAERAGMGLANQVPPVVVELRSGASPVAVRQYPMSKEAREGIRPHIQRFLDLGVLVPCQSPWNTPLLPVKKPGTNDYRPVQDLREINKRVQDIHPTVPNPYNLLSSLPPSHTWYSVLDLKDAFFCLKLHPNSQPLFAFEWRDPEKGNTGQLTWTRLPQGFKNSPTLFNEALHRDLAPFRALNPQVVLLQYVDDLLVAAPTYRDCKEGTQKLLQELSKLGYRVSAKKAQLCQKEVTYLGYLLKEGKRWLTPARKATVMKIPPPTTPRQVREFLGKAGFCRLFIPGFASLAAPLYPLTKPSIPFIWTEEHQKAFDRIKEALLSAPALALPDLTKPFTLYVDERAGVARGVLTQTLGPWRRPVAYLSKKLDPVASGWPTCLKAVAAVALLLKDADKLTLGQNVTVIASHSLESIVRQPPDRWMTNARMTHYQSLLLNERVSFAPPAVLNPATLLPVESEATPVHRCSEILAEETGTRRDLKDQPLPGVPAWYTDGSSFIAEGKRRAGAAIVDGKRTVWASSLPEGTSAQKAELVALTQALRLAEGKDINIYTDSRYAFATAHIHGAIYKQRGWLTSAGKDIKNKEEILALLEAIHLPKRVAIIHCPGHQKGNDPVATGNRRADEAAKQAALSTRVLAETTKPAGKRTADGSEFEKRTADGSEFESPKKKAKVE

SEQ ID NO: 4532 - protein, 2088 aa, synthetic construct
MPAAKRVKLDGGDKKYSIGLDIGTNSVGWAVITDEYKVPSKKFKVLGNTDRHSIKKNLIGALLFDSGETAEATRLKRTARRRYTRRKNRICYLQEIFSNEMAKVDDSFFHRLEESFLVEEDKKHERHPIFGNIVDEVAYHEKYPTIYHLRKKLVDSTDKADLRLIYLALAHMIKFRGHFLIEGDLNPDNSDVDKLFIQLVQTYNQLFEENPINASGVDAKAILSARLSKSRRLENLIAQLPGEKKNGLFGNLIALSLGLTPNFKSNFDLAEDAKLQLSKDTYDDDLDNLLAQIGDQYADLFLAAKNLSDAILLSDILRVNTEITKAPLSASMIKRYDEHHQDLTLLKALVRQQLPEKYKEIFFDQSKNGYAGYIDGGASQEEFYKFIKPILEKMDGTEELLVKLNREDLLRKQRTFDNGSIPHQIHLGELHAILRRQEDFYPFLKDNREKIEKILTFRIPYYVGPLARGNSRFAWMTRKSEETITPWNFEEVVDKGASAQSFIERMTNFDKNLPNEKVLPKHSLLYEYFTVYNELTKVKYVTEGMRKPAFLSGEQKKAIVDLLFKTNRKVTVKQLKEDYFKKIECFDSVEISGVEDRFNASLGTYHDLLKIIKDKDFLDNEENEDILEDIVLTLTLFEDREMIEERLKTYAHLFDDKVMKQLKRRRYTGWGRLSRKLINGIRDKQSGKTILDFLKSDGFANRNFMQLIHDDSLTFKEDIQKAQVSGQGDSLHEHIANLAGSPAIKKGILQTVKVVDELVKVMGRHKPENIVIEMARENQTTQKGQKNSRERMKRIEEGIKELGSQILKEHPVENTQLQNEKLYLYYLQNGRDMYVDQELDINRLSDYDVDHIVPQSFLKDDSIDNKVLTRSDKARGKSDNVPSEEVVKKMKNYWRQLLNAKLITQRKFDNLTKAERGGLSELDKAGFIKRQLVETRQITKHVAQILDSRMNTKYDENDKLIREVKVITLKSKLVSDFRKDFQFYKVREINNYHHAHDAYLNAVVGTALIKKYPKLESEFVYGDYKVYDVRKMIAKSEQEIGKATAKYFFYSNIMNFFKTEITLANGEIRKRPLIETNGETGEIVWDKGRDFATVRKVLSMPQVNIVKKTEVQTGGFSKESILPKRNSDKLIARKKDWDPKKYGGFDSPTVAYSVLVVAKVEKGKSKKLKSVKELLGITIMERSSFEKNPIDFLEAKGYKEVKKDLIIKLPKYSLFELENGRKRMLASAGELQKGNELALPSKYVNFLYLASHYEKLKGSPEDNEQKQLFVEQHKHYLDEIIEQISEFSKRVILADANLDKVLSAYNKHRDKPIREQAENIIHLFTLTNLGAPAAFKYFDTTIDRKRYTSTKEVLDATLIHQSITGLYETRIDLSQLGGDGGGSSGGGPAPGGTLQLDDEYRLYSPLVKPDQNIQFWLEQFPQAWAETAGMGLAKQVPPQVIQLKASATPVSVRQYPLSKEAQEGIRPHVQRLIQQGILVPVQSPWNTPLLPVRKPGTNDYRPVQDLREVNKRVQDIHPTVPNPYNLLCALPPQRSWYTVLDLKDAFFCLRLHPTSQPLFAFEWRDPGTGRTGQLTWTRLPQGFKNSPTIFNEALHRDLANFRIQHPQVTLLQYVDDLLLAGATKQDCLEGTKALLLELSDLGYRASAKKAQICRREVTYLGYSLRDGQRWLTEARKKTVVQIPAPTTAKQVREFLGTAGFCRLWIPGFATLAAPLYPLTKPKGEFSWAPEHQKAFDAIKKALLSAPALALPDVTKPFTLYVDERKGVARGVLTQTLGPWRRPVAYLSKKLDPVASGWPVCLKAIAAVAILVKDADKLTLGQNITVIAPHALENIVRQPPDRWMTNARMTHYQSLLLTERVTFAPPAALNPATLLPEETDEPVTHDCHQLLIEETGVRKDLTDIPLTGEVLTWFTDGSSYVVEGKRMAGAAVVDGTRTIWASSLPEGTSAQKAELMALTQALRLAEGKSINIYTDSRYAFATAHVHGAIYKQRGWLTSAGREIKNKEEILSLLEALHLPKRLAIIHCPGHQKAKDPISRGNQMADRVAKQAAQGVNLLAGKRTADGSEFEKRTADGSEFESPKKKAKVE

SEQ ID NO: 4533 - protein, 2094 aa, synthetic construct
MPAAKRVKLDGGDKKYSIGLDIGTNSVGWAVITDEYKVPSKKFKVLGNTDRHSIKKNLIGALLFDSGETAEATRLKRTARRRYTRRKNRICYLQEIFSNEMAKVDDSFFHRLEESFLVEEDKKHERHPIFGNIVDEVAYHEKYPTIYHLRKKLVDSTDKADLRLIYLALAHMIKFRGHFLIEGDLNPDNSDVDKLFIQLVQTYNQLFEENPINASGVDAKAILSARLSKSRRLENLIAQLPGEKKNGLFGNLIALSLGLTPNFKSNFDLAEDAKLQLSKDTYDDDLDNLLAQIGDQYADLFLAAKNLSDAILLSDILRVNTEITKAPLSASMIKRYDEHHQDLTLLKALVRQQLPEKYKEIFFDQSKNGYAGYIDGGASQEEFYKFIKPILEKMDGTEELLVKLNREDLLRKQRTFDNGSIPHQIHLGELHAILRRQEDFYPFLKDNREKIEKILTFRIPYYVGPLARGNSRFAWMTRKSEETITPWNFEEVVDKGASAQSFIERMTNFDKNLPNEKVLPKHSLLYEYFTVYNELTKVKYVTEGMRKPAFLSGEQKKAIVDLLFKTNRKVTVKQLKEDYFKKIECFDSVEISGVEDRFNASLGTYHDLLKIIKDKDFLDNEENEDILEDIVLTLTLFEDREMIEERLKTYAHLFDDKVMKQLKRRRYTGWGRLSRKLINGIRDKQSGKTILDFLKSDGFANRNFMQLIHDDSLTFKEDIQKAQVSGQGDSLHEHIANLAGSPAIKKGILQTVKVVDELVKVMGRHKPENIVIEMARENQTTQKGQKNSRERMKRIEEGIKELGSQILKEHPVENTQLQNEKLYLYYLQNGRDMYVDQELDINRLSDYDVDHIVPQSFLKDDSIDNKVLTRSDKARGKSDNVPSEEVVKKMKNYWRQLLNAKLITQRKFDNLTKAERGGLSELDKAGFIKRQLVETRQITKHVAQILDSRMNTKYDENDKLIREVKVITLKSKLVSDFRKDFQFYKVREINNYHHAHDAYLNAVVGTALIKKYPKLESEFVYGDYKVYDVRKMIAKSEQEIGKATAKYFFYSNIMNFFKTEITLANGEIRKRPLIETNGETGEIVWDKGRDFATVRKVLSMPQVNIVKKTEVQTGGFSKESILPKRNSDKLIARKKDWDPKKYGGFDSPTVAYSVLVVAKVEKGKSKKLKSVKELLGITIMERSSFEKNPIDFLEAKGYKEVKKDLIIKLPKYSLFELENGRKRMLASAGELQKGNELALPSKYVNFLYLASHYEKLKGSPEDNEQKQLFVEQHKHYLDEIIEQISEFSKRVILADANLDKVLSAYNKHRDKPIREQAENIIHLFTLTNLGAPAAFKYFDTTIDRKRYTSTKEVLDATLIHQSITGLYETRIDLSQLGGDGGPAPGSSGGGGGTLNLEDEYRLYETSAEPEVSPGSTWLSDFPQAWAETGGMGLAVRQAPLIIPLKATSTPVSIKQYPMSQEAKLGIKPHIQRLLDQGILVPCQSPWNTPLLPVKKPGTNDYRPVQDLREVNKRVEDIHPTVPNPYNLLSGLPPSHRWYTVLDLKDAFFCLRLHPTSQPLFAFEWRDPGMGISGQLTWTRLPQGFKNSPTLFNEALHRDLADFRIQHPDLILLQYVDDILLAATSELDCQQGTRALLLTLGNLGYRASAKKAQLCQKQVKYLGYLLKEGQRWLTEARKETVMGQPTPKTPRQLREFLGKAGFCRLFIPGFAEMAAPLYPLTKPGTLFNWGPDQQKAYQEIKQALLTAPALGLPDLTKPFELFVDEKQGYAKGVLTQKLGPWRRPVAYLSKKLDPVAAGWPPCLRMVAAIAVLRKDAGKLTMGQPLVILAPHAVEALVKQPPDRWLSNARMTHYQAMLLDTDRVQFGPVVALNPATLLPLPEEGAPHDCLEILAETHGTRPDLTDQPIPDADHTWYTDGSSFLQEGQRKAGAAVTTETEVIWARALPAGTSAQRAELIALTQALKMAEGKRLNVYTDSRYAFATAHIHGEIYRRRGWLTSEGREIKNKSEILALLKALFLPKRLSIIHCLGHQKGDSAEARGNRLADQAAREAAIKTPPDTSTLLAGKRTADGSEFEKRTADGSEFESPKKKAKVE

SEQ ID NO: 4534 - protein, 2096 aa, synthetic construct
MPAAKRVKLDGGDKKYSIGLDIGTNSVGWAVITDEYKVPSKKFKVLGNTDRHSIKKNLIGALLFDSGETAEATRLKRTARRRYTRRKNRICYLQEIFSNEMAKVDDSFFHRLEESFLVEEDKKHERHPIFGNIVDEVAYHEKYPTIYHLRKKLVDSTDKADLRLIYLALAHMIKFRGHFLIEGDLNPDNSDVDKLFIQLVQTYNQLFEENPINASGVDAKAILSARLSKSRRLENLIAQLPGEKKNGLFGNLIALSLGLTPNFKSNFDLAEDAKLQLSKDTYDDDLDNLLAQIGDQYADLFLAAKNLSDAILLSDILRVNTEITKAPLSASMIKRYDEHHQDLTLLKALVRQQLPEKYKEIFFDQSKNGYAGYIDGGASQEEFYKFIKPILEKMDGTEELLVKLNREDLLRKQRTFDNGSIPHQIHLGELHAILRRQEDFYPFLKDNREKIEKILTFRIPYYVGPLARGNSRFAWMTRKSEETITPWNFEEVVDKGASAQSFIERMTNFDKNLPNEKVLPKHSLLYEYFTVYNELTKVKYVTEGMRKPAFLSGEQKKAIVDLLFKTNRKVTVKQLKEDYFKKIECFDSVEISGVEDRFNASLGTYHDLLKIIKDKDFLDNEENEDILEDIVLTLTLFEDREMIEERLKTYAHLFDDKVMKQLKRRRYTGWGRLSRKLINGIRDKQSGKTILDFLKSDGFANRNFMQLIHDDSLTFKEDIQKAQVSGQGDSLHEHIANLAGSPAIKKGILQTVKVVDELVKVMGRHKPENIVIEMARENQTTQKGQKNSRERMKRIEEGIKELGSQILKEHPVENTQLQNEKLYLYYLQNGRDMYVDQELDINRLSDYDVDHIVPQSFLKDDSIDNKVLTRSDKARGKSDNVPSEEVVKKMKNYWRQLLNAKLITQRKFDNLTKAERGGLSELDKAGFIKRQLVETRQITKHVAQILDSRMNTKYDENDKLIREVKVITLKSKLVSDFRKDFQFYKVREINNYHHAHDAYLNAVVGTALIKKYPKLESEFVYGDYKVYDVRKMIAKSEQEIGKATAKYFFYSNIMNFFKTEITLANGEIRKRPLIETNGETGEIVWDKGRDFATVRKVLSMPQVNIVKKTEVQTGGFSKESILPKRNSDKLIARKKDWDPKKYGGFDSPTVAYSVLVVAKVEKGKSKKLKSVKELLGITIMERSSFEKNPIDFLEAKGYKEVKKDLIIKLPKYSLFELENGRKRMLASAGELQKGNELALPSKYVNFLYLASHYEKLKGSPEDNEQKQLFVEQHKHYLDEIIEQISEFSKRVILADANLDKVLSAYNKHRDKPIREQAENIIHLFTLTNLGAPAAFKYFDTTIDRKRYTSTKEVLDATLIHQSITGLYETRIDLSQLGGDGGGGGPAPEAAAKGGTLNIEDEHRLHETSKEPDVSLGSTWLSDFPQAWAETGGMGLAVRQAPLIIPLKATSTPVSIKQYPMSQEARLGIKPHIQRLLDQGILVPCQSPWNTPLLPVKKPGTNDYRPVQDLREVNKRVEDIHPTVPNPYNLLSGLPPSHQWYTVLDLKDAFFCLRLHPTSQPLFAFEWRDPEMGISGQLTWTRLPQGFKNSPTLFNEALHRDLADFRIQHPDLILLQYVDDLLLAATSELDCQQGTRALLQTLGNLGYRASAKKAQICQKQVKYLGYLLKEGQRWLTEARKETVMGQPTPKTPRQLREFLGTAGFCRLWIPGFAEMAAPLYPLTKPGTLFNWGPDQQKAYQEIKQALLTAPALGLPDLTKPFELFVDEKQGYAKGVLTQKLGPWRRPVAYLSKKLDPVAAGWPPCLRMVAAIAVLTKDAGKLTMGQPLVILAPHAVEALVKQPPDRWLSNARMTHYQALLLDTDRVQFGPVVALNPATLLPLPEEGLQHNCLDILAEAHGTRPDLTDQPLPDADHTWYTDGSSLLQEGQRKAGAAVTTETEVIWAKALPAGTSAQRAELIALTQALKMAEGKKLNVYTDSRYAFATAHIHGEIYRRRGWLTSEGKEIKNKDEILALLKALFLPKRLSIIHCPGHQKGHSAEARGNRMADQAARKAAITETPDTSTLLAGKRTADGSEFEKRTADGSEFESPKKKAKVE

SEQ ID NO: 4535 - protein, 2096 aa, synthetic construct
MPAAKRVKLDGGDKKYSIGLDIGTNSVGWAVITDEYKVPSKKFKVLGNTDRHSIKKNLIGALLFDSGETAEATRLKRTARRRYTRRKNRICYLQEIFSNEMAKVDDSFFHRLEESFLVEEDKKHERHPIFGNIVDEVAYHEKYPTIYHLRKKLVDSTDKADLRLIYLALAHMIKFRGHFLIEGDLNPDNSDVDKLFIQLVQTYNQLFEENPINASGVDAKAILSARLSKSRRLENLIAQLPGEKKNGLFGNLIALSLGLTPNFKSNFDLAEDAKLQLSKDTYDDDLDNLLAQIGDQYADLFLAAKNLSDAILLSDILRVNTEITKAPLSASMIKRYDEHHQDLTLLKALVRQQLPEKYKEIFFDQSKNGYAGYIDGGASQEEFYKFIKPILEKMDGTEELLVKLNREDLLRKQRTFDNGSIPHQIHLGELHAILRRQEDFYPFLKDNREKIEKILTFRIPYYVGPLARGNSRFAWMTRKSEETITPWNFEEVVDKGASAQSFIERMTNFDKNLPNEKVLPKHSLLYEYFTVYNELTKVKYVTEGMRKPAFLSGEQKKAIVDLLFKTNRKVTVKQLKEDYFKKIECFDSVEISGVEDRFNASLGTYHDLLKIIKDKDFLDNEENEDILEDIVLTLTLFEDREMIEERLKTYAHLFDDKVMKQLKRRRYTGWGRLSRKLINGIRDKQSGKTILDFLKSDGFANRNFMQLIHDDSLTFKEDIQKAQVSGQGDSLHEHIANLAGSPAIKKGILQTVKVVDELVKVMGRHKPENIVIEMARENQTTQKGQKNSRERMKRIEEGIKELGSQILKEHPVENTQLQNEKLYLYYLQNGRDMYVDQELDINRLSDYDVDHIVPQSFLKDDSIDNKVLTRSDKARGKSDNVPSEEVVKKMKNYWRQLLNAKLITQRKFDNLTKAERGGLSELDKAGFIKRQLVETRQITKHVAQILDSRMNTKYDENDKLIREVKVITLKSKLVSDFRKDFQFYKVREINNYHHAHDAYLNAVVGTALIKKYPKLESEFVYGDYKVYDVRKMIAKSEQEIGKATAKYFFYSNIMNFFKTEITLANGEIRKRPLIETNGETGEIVWDKGRDFATVRKVLSMPQVNIVKKTEVQTGGFSKESILPKRNSDKLIARKKDWDPKKYGGFDSPTVAYSVLVVAKVEKGKSKKLKSVKELLGITIMERSSFEKNPIDFLEAKGYKEVKKDLIIKLPKYSLFELENGRKRMLASAGELQKGNELALPSKYVNFLYLASHYEKLKGSPEDNEQKQLFVEQHKHYLDEIIEQISEFSKRVILADANLDKVLSAYNKHRDKPIREQAENIIHLFTLTNLGAPAAFKYFDTTIDRKRYTSTKEVLDATLIHQSITGLYETRIDLSQLGGDGGEAAAKGGGPAPGGTLNIEDEHRLHETSKEPDVSLGSTWLSDFPQAWAETGGMGLAVRQAPLIIPLKATSTPVSIKQYPMSQEARLGIKPHIQRLLDQGILVPCQSPWNTPLLPVKKPGTNDYRPVQDLREVNKRVEDIHPTVPNPYNLLSGLPPSHQWYTVLDLKDAFFCLRLHPTSQPLFAFEWRDPEMGISGQLTWTRLPQGFKNSPTLFNEALHRDLADFRIQHPDLILLQYVDDLLLAATSELDCQQGTRALLQTLGNLGYRASAKKAQICQKQVKYLGYLLKEGQRWLTEARKETVMGQPTPKTPRQLREFLGTAGFCRLWIPGFAEMAAPLYPLTKPGTLFNWGPDQQKAYQEIKQALLTAPALGLPDLTKPFELFVDEKQGYAKGVLTQKLGPWRRPVAYLSKKLDPVAAGWPPCLRMVAAIAVLTKDAGKLTMGQPLVILAPHAVEALVKQPPDRWLSNARMTHYQALLLDTDRVQFGPVVALNPATLLPLPEEGLQHNCLDILAEAHGTRPDLTDQPLPDADHTWYTDGSSLLQEGQRKAGAAVTTETEVIWAKALPAGTSAQRAELIALTQALKMAEGKKLNVYTDSRYAFATAHIHGEIYRRRGWLTSEGKEIKNKDEILALLKALFLPKRLSIIHCPGHQKGHSAEARGNRMADQAARKAAITETPDTSTLLAGKRTADGSEFEKRTADGSEFESPKKKAKVE

SEQ ID NO: 4536 - protein, 2096 aa, synthetic construct
MPAAKRVKLDGGDKKYSIGLDIGTNSVGWAVITDEYKVPSKKFKVLGNTDRHSIKKNLIGALLFDSGETAEATRLKRTARRRYTRRKNRICYLQEIFSNEMAKVDDSFFHRLEESFLVEEDKKHERHPIFGNIVDEVAYHEKYPTIYHLRKKLVDSTDKADLRLIYLALAHMIKFRGHFLIEGDLNPDNSDVDKLFIQLVQTYNQLFEENPINASGVDAKAILSARLSKSRRLENLIAQLPGEKKNGLFGNLIALSLGLTPNFKSNFDLAEDAKLQLSKDTYDDDLDNLLAQIGDQYADLFLAAKNLSDAILLSDILRVNTEITKAPLSASMIKRYDEHHQDLTLLKALVRQQLPEKYKEIFFDQSKNGYAGYIDGGASQEEFYKFIKPILEKMDGTEELLVKLNREDLLRKQRTFDNGSIPHQIHLGELHAILRRQEDFYPFLKDNREKIEKILTFRIPYYVGPLARGNSRFAWMTRKSEETITPWNFEEVVDKGASAQSFIERMTNFDKNLPNEKVLPKHSLLYEYFTVYNELTKVKYVTEGMRKPAFLSGEQKKAIVDLLFKTNRKVTVKQLKEDYFKKIECFDSVEISGVEDRFNASLGTYHDLLKIIKDKDFLDNEENEDILEDIVLTLTLFEDREMIEERLKTYAHLFDDKVMKQLKRRRYTGWGRLSRKLINGIRDKQSGKTILDFLKSDGFANRNFMQLIHDDSLTFKEDIQKAQVSGQGDSLHEHIANLAGSPAIKKGILQTVKVVDELVKVMGRHKPENIVIEMARENQTTQKGQKNSRERMKRIEEGIKELGSQILKEHPVENTQLQNEKLYLYYLQNGRDMYVDQELDINRLSDYDVDHIVPQSFLKDDSIDNKVLTRSDKARGKSDNVPSEEVVKKMKNYWRQLLNAKLITQRKFDNLTKAERGGLSELDKAGFIKRQLVETRQITKHVAQILDSRMNTKYDENDKLIREVKVITLKSKLVSDFRKDFQFYKVREINNYHHAHDAYLNAVVGTALIKKYPKLESEFVYGDYKVYDVRKMIAKSEQEIGKATAKYFFYSNIMNFFKTEITLANGEIRKRPLIETNGETGEIVWDKGRDFATVRKVLSMPQVNIVKKTEVQTGGFSKESILPKRNSDKLIARKKDWDPKKYGGFDSPTVAYSVLVVAKVEKGKSKKLKSVKELLGITIMERSSFEKNPIDFLEAKGYKEVKKDLIIKLPKYSLFELENGRKRMLASAGELQKGNELALPSKYVNFLYLASHYEKLKGSPEDNEQKQLFVEQHKHYLDEIIEQISEFSKRVILADANLDKVLSAYNKHRDKPIREQAENIIHLFTLTNLGAPAAFKYFDTTIDRKRYTSTKEVLDATLIHQSITGLYETRIDLSQLGGDGGEAAAKPAPGGGGGTLNIEDEYRLHETSKEPDVSLGSTWLSDFPQAWAETGGMGLAVRQAPLIIPLKATSTPVSIKQYPMSQEARLGIKPHIQRLLDQGILVPCQSPWNTPLLPVKKPGTNDYRPVQDLREVNKRVEDIHPTVPNPYNLLSGLPPSHQWYTVLDLKDAFFCLRLHPTSQPLFAFEWRDPEMGISGQLTWTRLPQGFKNSPTLFNEALHRDLAGFRIQHPDLILLQYVDDLLLAATSELDCQQGTRALLQTLGDLGYRASAKKAQICQKQVKYLGYLLKEGQRWLTEARKETVMGQPIPKTPRQLREFLGKAGFCRLFIPGFAEMAAPLYPLTKPGTLFNWGPDQQKAFQEIKQALLTAPALGLPDLTKPFELFVDEKQGYAKGVLTQKLGPWRRPVAYLSKKLDPVAAGWPPCLRMVAAIAVLTKDAGKLTMGQPLVILAPHAVEALVKQPPDRWLSNARMTHYQALLLDTDRVQFGPVVALNPATLLPLPEEGLQHDCLDILAEAHGTRSDLMDQPLPDADHTWYTDGSSFLQEGQRKAGAAVTTETEVIWARALPAGTSAQRAELIALTQALKMAEGKKLNVYTDSRYAFATAHIHGEIYRRRGWLTSEGKEIKNKDEILALLKALFLPKRLSIIHCPGHQKGNSAEARGNRMADQAAREVATRETPETSTLLAGKRTADGSEFEKRTADGSEFESPKKKAKVE

SEQ ID NO: 4537 - protein, 2127 aa, synthetic construct
MPAAKRVKLDGGDKKYSIGLDIGTNSVGWAVITDEYKVPSKKFKVLGNTDRHSIKKNLIGALLFDSGETAEATRLKRTARRRYTRRKNRICYLQEIFSNEMAKVDDSFFHRLEESFLVEEDKKHERHPIFGNIVDEVAYHEKYPTIYHLRKKLVDSTDKADLRLIYLALAHMIKFRGHFLIEGDLNPDNSDVDKLFIQLVQTYNQLFEENPINASGVDAKAILSARLSKSRRLENLIAQLPGEKKNGLFGNLIALSLGLTPNFKSNFDLAEDAKLQLSKDTYDDDLDNLLAQIGDQYADLFLAAKNLSDAILLSDILRVNTEITKAPLSASMIKRYDEHHQDLTLLKALVRQQLPEKYKEIFFDQSKNGYAGYIDGGASQEEFYKFIKPILEKMDGTEELLVKLNREDLLRKQRTFDNGSIPHQIHLGELHAILRRQEDFYPFLKDNREKIEKILTFRIPYYVGPLARGNSRFAWMTRKSEETITPWNFEEVVDKGASAQSFIERMTNFDKNLPNEKVLPKHSLLYEYFTVYNELTKVKYVTEGMRKPAFLSGEQKKAIVDLLFKTNRKVTVKQLKEDYFKKIECFDSVEISGVEDRFNASLGTYHDLLKIIKDKDFLDNEENEDILEDIVLTLTLFEDREMIEERLKTYAHLFDDKVMKQLKRRRYTGWGRLSRKLINGIRDKQSGKTILDFLKSDGFANRNFMQLIHDDSLTFKEDIQKAQVSGQGDSLHEHIANLAGSPAIKKGILQTVKVVDELVKVMGRHKPENIVIEMARENQTTQKGQKNSRERMKRIEEGIKELGSQILKEHPVENTQLQNEKLYLYYLQNGRDMYVDQELDINRLSDYDVDHIVPQSFLKDDSIDNKVLTRSDKARGKSDNVPSEEVVKKMKNYWRQLLNAKLITQRKFDNLTKAERGGLSELDKAGFIKRQLVETRQITKHVAQILDSRMNTKYDENDKLIREVKVITLKSKLVSDFRKDFQFYKVREINNYHHAHDAYLNAVVGTALIKKYPKLESEFVYGDYKVYDVRKMIAKSEQEIGKATAKYFFYSNIMNFFKTEITLANGEIRKRPLIETNGETGEIVWDKGRDFATVRKVLSMPQVNIVKKTEVQTGGFSKESILPKRNSDKLIARKKDWDPKKYGGFDSPTVAYSVLVVAKVEKGKSKKLKSVKELLGITIMERSSFEKNPIDFLEAKGYKEVKKDLIIKLPKYSLFELENGRKRMLASAGELQKGNELALPSKYVNFLYLASHYEKLKGSPEDNEQKQLFVEQHKHYLDEIIEQISEFSKRVILADANLDKVLSAYNKHRDKPIREQAENIIHLFTLTNLGAPAAFKYFDTTIDRKRYTSTKEVLDATLIHQSITGLYETRIDLSQLGGDGGPAPEAAAKGGGGGLLGRDLLTKLKAQIQFSTEGPQVTWEDRPAMCLVLNLEEEYRLHEKPVPPSIDPSWLQLFPMVWAEKAGMGLANQVPPVVVELKSDASPVAVRQYPMSKEAREGIRPHIQRFLDLGILVPCQSPWNTPLLPVKKPGTNDYRPVQDLREVNKRVQDIHPTVPNPYNLLSSLPPSHTWYSVLDLKDAFFCLKLHPNSQPLFAFEWRDPEKGNTGQLTWTRLPQGFKNSPTLFNEALHRDLASFRALNPQVVMLQYVDDLLVAAPTYRDCKEGTRRLLQELSKLGYRVSAKKAQLCREEVTYLGYLLKGGKRWLTPARKATVMKIPTPTTPRQVREFLGTAGFCRLWIPGFASLAAPLYPLTRPKVPFTWTEAHQEAFGRIKEALLSAPALALPDLTKPFALYVDEKEGVARGVLTQTLGPWRRPVAYLSKKLDPVASGWPTCLKAIAAVALLLKDADKLTLGQNVLVIAPHNLESIVRQPPDRWMTNARMTHYQSLLLNERVSFAPPAILNPATLLPVESDDTPIHICSEILAEETGTRPDLRDQPLPGVPAWYTDGSSFIMDGRRQAGAAIVDNKRTVWASNLPEGTSAQKAELIALTQALRLAEGKSINIYTDSRYAFATAHVHGAIYKQRGWLTSAGKDIKNKEEILALLEAIHLPKRVAIIHCPGHQRGTDPVATGNRKADEAAKQAAQSTRILTETTKNAGKRTADGSEFEKRTADGSEFESPKKKAKVE

SEQ ID NO: 4538 - protein, 2096 aa, synthetic construct
MPAAKRVKLDGGDKKYSIGLDIGTNSVGWAVITDEYKVPSKKFKVLGNTDRHSIKKNLIGALLFDSGETAEATRLKRTARRRYTRRKNRICYLQEIFSNEMAKVDDSFFHRLEESFLVEEDKKHERHPIFGNIVDEVAYHEKYPTIYHLRKKLVDSTDKADLRLIYLALAHMIKFRGHFLIEGDLNPDNSDVDKLFIQLVQTYNQLFEENPINASGVDAKAILSARLSKSRRLENLIAQLPGEKKNGLFGNLIALSLGLTPNFKSNFDLAEDAKLQLSKDTYDDDLDNLLAQIGDQYADLFLAAKNLSDAILLSDILRVNTEITKAPLSASMIKRYDEHHQDLTLLKALVRQQLPEKYKEIFFDQSKNGYAGYIDGGASQEEFYKFIKPILEKMDGTEELLVKLNREDLLRKQRTFDNGSIPHQIHLGELHAILRRQEDFYPFLKDNREKIEKILTFRIPYYVGPLARGNSRFAWMTRKSEETITPWNFEEVVDKGASAQSFIERMTNFDKNLPNEKVLPKHSLLYEYFTVYNELTKVKYVTEGMRKPAFLSGEQKKAIVDLLFKTNRKVTVKQLKEDYFKKIECFDSVEISGVEDRFNASLGTYHDLLKIIKDKDFLDNEENEDILEDIVLTLTLFEDREMIEERLKTYAHLFDDKVMKQLKRRRYTGWGRLSRKLINGIRDKQSGKTILDFLKSDGFANRNFMQLIHDDSLTFKEDIQKAQVSGQGDSLHEHIANLAGSPAIKKGILQTVKVVDELVKVMGRHKPENIVIEMARENQTTQKGQKNSRERMKRIEEGIKELGSQILKEHPVENTQLQNEKLYLYYLQNGRDMYVDQELDINRLSDYDVDHIVPQSFLKDDSIDNKVLTRSDKARGKSDNVPSEEVVKKMKNYWRQLLNAKLITQRKFDNLTKAERGGLSELDKAGFIKRQLVETRQITKHVAQILDSRMNTKYDENDKLIREVKVITLKSKLVSDFRKDFQFYKVREINNYHHAHDAYLNAVVGTALIKKYPKLESEFVYGDYKVYDVRKMIAKSEQEIGKATAKYFFYSNIMNFFKTEITLANGEIRKRPLIETNGETGEIVWDKGRDFATVRKVLSMPQVNIVKKTEVQTGGFSKESILPKRNSDKLIARKKDWDPKKYGGFDSPTVAYSVLVVAKVEKGKSKKLKSVKELLGITIMERSSFEKNPIDFLEAKGYKEVKKDLIIKLPKYSLFELENGRKRMLASAGELQKGNELALPSKYVNFLYLASHYEKLKGSPEDNEQKQLFVEQHKHYLDEIIEQISEFSKRVILADANLDKVLSAYNKHRDKPIREQAENIIHLFTLTNLGAPAAFKYFDTTIDRKRYTSTKEVLDATLIHQSITGLYETRIDLSQLGGDGGGSSEAAAKPAPGGTLNIEDEYRLHETSKEPDVPLGSTWLSDFPQAWAETGGMGLAVRQAPLIIPLKATSTPVSIKQYPMSQEARLGIKPHIQRLLDQGILVPCQSPWNTPLLPVKKPGTNDYRPVQDLREVNKRVEDIHPTVPNPYNLLSGLPPSHQWYTVLDLKDAFFCLRLHPTSQPLFAFEWRDPEMGISGQLTWTRLPQGFKNSPTLFNEALHRDLADFRIQHPDLILLQYVDDLLLAATSEQDCQRGTRALLQTLGNLGYRASAKKAQICQKQVKYLGYLLKEGQRWLTEARKETVMGQPTPKTPRQLREFLGTAGFCRLWIPGFAEMAAPLYPLTKPGTLFNWGPDQQKAYQEIKQALLTAPALGLPDLTKPFELFVDEKQGYAKGVLTQKLGPWRRPVAYLSKKLDPVAAGWPPCLRMVAAIAVLTKDAGKLTMGQPLVILAPHAVEALVKQPPDRWLSNARMTHYQAMLLDTDRVQFGPVVALNPATLLPLPEKEAPHDCLEILAETHGTRPDLTDQPIPDADYTWYTDGSSFLQEGQRRAGAAVTTETEVIWARALPAGTSAQRAELIALTQALKMAEGKKLNVYTDSRYAFATAHVHGEIYRRRGWLTSEGREIKNKNEILALLKALFLPKRLSIIHCPGHQKGNSAEARGNRMADQAAREAAMKAVLETSTLLAGKRTADGSEFEKRTADGSEFESPKKKAKVE

SEQ ID NO: 4539 - protein, 2098 aa, synthetic construct
MPAAKRVKLDGGDKKYSIGLDIGTNSVGWAVITDEYKVPSKKFKVLGNTDRHSIKKNLIGALLFDSGETAEATRLKRTARRRYTRRKNRICYLQEIFSNEMAKVDDSFFHRLEESFLVEEDKKHERHPIFGNIVDEVAYHEKYPTIYHLRKKLVDSTDKADLRLIYLALAHMIKFRGHFLIEGDLNPDNSDVDKLFIQLVQTYNQLFEENPINASGVDAKAILSARLSKSRRLENLIAQLPGEKKNGLFGNLIALSLGLTPNFKSNFDLAEDAKLQLSKDTYDDDLDNLLAQIGDQYADLFLAAKNLSDAILLSDILRVNTEITKAPLSASMIKRYDEHHQDLTLLKALVRQQLPEKYKEIFFDQSKNGYAGYIDGGASQEEFYKFIKPILEKMDGTEELLVKLNREDLLRKQRTFDNGSIPHQIHLGELHAILRRQEDFYPFLKDNREKIEKILTFRIPYYVGPLARGNSRFAWMTRKSEETITPWNFEEVVDKGASAQSFIERMTNFDKNLPNEKVLPKHSLLYEYFTVYNELTKVKYVTEGMRKPAFLSGEQKKAIVDLLFKTNRKVTVKQLKEDYFKKIECFDSVEISGVEDRFNASLGTYHDLLKIIKDKDFLDNEENEDILEDIVLTLTLFEDREMIEERLKTYAHLFDDKVMKQLKRRRYTGWGRLSRKLINGIRDKQSGKTILDFLKSDGFANRNFMQLIHDDSLTFKEDIQKAQVSGQGDSLHEHIANLAGSPAIKKGILQTVKVVDELVKVMGRHKPENIVIEMARENQTTQKGQKNSRERMKRIEEGIKELGSQILKEHPVENTQLQNEKLYLYYLQNGRDMYVDQELDINRLSDYDVDHIVPQSFLKDDSIDNKVLTRSDKARGKSDNVPSEEVVKKMKNYWRQLLNAKLITQRKFDNLTKAERGGLSELDKAGFIKRQLVETRQITKHVAQILDSRMNTKYDENDKLIREVKVITLKSKLVSDFRKDFQFYKVREINNYHHAHDAYLNAVVGTALIKKYPKLESEFVYGDYKVYDVRKMIAKSEQEIGKATAKYFFYSNIMNFFKTEITLANGEIRKRPLIETNGETGEIVWDKGRDFATVRKVLSMPQVNIVKKTEVQTGGFSKESILPKRNSDKLIARKKDWDPKKYGGFDSPTVAYSVLVVAKVEKGKSKKLKSVKELLGITIMERSSFEKNPIDFLEAKGYKEVKKDLIIKLPKYSLFELENGRKRMLASAGELQKGNELALPSKYVNFLYLASHYEKLKGSPEDNEQKQLFVEQHKHYLDEIIEQISEFSKRVILADANLDKVLSAYNKHRDKPIREQAENIIHLFTLTNLGAPAAFKYFDTTIDRKRYTSTKEVLDATLIHQSITGLYETRIDLSQLGGDGGGSSPAPEAAAKGGTAPLEEEYRLFLEAPIQNVTLLEQWKREIPKVWAEINPPGLASTQAPIHVQLLSTALPVRVRQYPITLEAKRSLRETIRKFRAAGILRPVHSPWNTPLLPVRKSGTSEYRMVQDLREVNKRVETIHPTVPNPYTLLSLLPPDRIWYSVLDLKDAFFCIPLAPESQLIFAFEWADAEEGESGQLTWTRLPQGFKNSPTLFNEALNRDLQGFRLDHPSVSLLQYVDDLLIAADTQAACLSATRDLLMTLAELGYRVSGKKAQLCQEEVTYLGFKIHKGSRSLSNSRTQAILQIPVPKTKRQVREFLGKIGYCRLFIPGFAELAQPLYAATRPGNDPLVWGEKEEEAFQSLKLALTQPPALALPSLDKPFQLFVEETSGAAKGVLTQALGPWKRPVAYLSKRLDPVAAGWPRCLRAIAAAALLTREASKLTFGQDIEITSSHNLESLLRSPPDKWLTNARITQYQVLLLDPPRVRFKQTAALNPATLLPETDDTLPIHHCLDTLDSLTSTRPDLTDQPLAQAEATLFTDGSSYIRDGKRYAGAAVVTLDSVIWAEPLPIGTSAQKAELIALTKALEWSKDKSVNIYTDSRYAFATLHVHGMIYRERGWLTAGGKAIKNAPEILALLTAVWLPKRVAVMHCKGHQKDDAPTSTGNRRADEVAREVAIRPLSTQATISAGKRTADGSEFEKRTADGSEFESPKKKAKVE

SEQ ID NO: 4540 - protein, 2131 aa, synthetic construct
MPAAKRVKLDGGDKKYSIGLDIGTNSVGWAVITDEYKVPSKKFKVLGNTDRHSIKKNLIGALLFDSGETAEATRLKRTARRRYTRRKNRICYLQEIFSNEMAKVDDSFFHRLEESFLVEEDKKHERHPIFGNIVDEVAYHEKYPTIYHLRKKLVDSTDKADLRLIYLALAHMIKFRGHFLIEGDLNPDNSDVDKLFIQLVQTYNQLFEENPINASGVDAKAILSARLSKSRRLENLIAQLPGEKKNGLFGNLIALSLGLTPNFKSNFDLAEDAKLQLSKDTYDDDLDNLLAQIGDQYADLFLAAKNLSDAILLSDILRVNTEITKAPLSASMIKRYDEHHQDLTLLKALVRQQLPEKYKEIFFDQSKNGYAGYIDGGASQEEFYKFIKPILEKMDGTEELLVKLNREDLLRKQRTFDNGSIPHQIHLGELHAILRRQEDFYPFLKDNREKIEKILTFRIPYYVGPLARGNSRFAWMTRKSEETITPWNFEEVVDKGASAQSFIERMTNFDKNLPNEKVLPKHSLLYEYFTVYNELTKVKYVTEGMRKPAFLSGEQKKAIVDLLFKTNRKVTVKQLKEDYFKKIECFDSVEISGVEDRFNASLGTYHDLLKIIKDKDFLDNEENEDILEDIVLTLTLFEDREMIEERLKTYAHLFDDKVMKQLKRRRYTGWGRLSRKLINGIRDKQSGKTILDFLKSDGFANRNFMQLIHDDSLTFKEDIQKAQVSGQGDSLHEHIANLAGSPAIKKGILQTVKVVDELVKVMGRHKPENIVIEMARENQTTQKGQKNSRERMKRIEEGIKELGSQILKEHPVENTQLQNEKLYLYYLQNGRDMYVDQELDINRLSDYDVDHIVPQSFLKDDSIDNKVLTRSDKARGKSDNVPSEEVVKKMKNYWRQLLNAKLITQRKFDNLTKAERGGLSELDKAGFIKRQLVETRQITKHVAQILDSRMNTKYDENDKLIREVKVITLKSKLVSDFRKDFQFYKVREINNYHHAHDAYLNAVVGTALIKKYPKLESEFVYGDYKVYDVRKMIAKSEQEIGKATAKYFFYSNIMNFFKTEITLANGEIRKRPLIETNGETGEIVWDKGRDFATVRKVLSMPQVNIVKKTEVQTGGFSKESILPKRNSDKLIARKKDWDPKKYGGFDSPTVAYSVLVVAKVEKGKSKKLKSVKELLGITIMERSSFEKNPIDFLEAKGYKEVKKDLIIKLPKYSLFELENGRKRMLASAGELQKGNELALPSKYVNFLYLASHYEKLKGSPEDNEQKQLFVEQHKHYLDEIIEQISEFSKRVILADANLDKVLSAYNKHRDKPIREQAENIIHLFTLTNLGAPAAFKYFDTTIDRKRYTSTKEVLDATLIHQSITGLYETRIDLSQLGGDGGAEAAAKEAAAKEAAAKEAAAKALEAEAAAKEAAAKEAAAKEAAAKAGGTLNIEDEYRLHETSKGPDVPLGSTWLSDFPQAWAETGGMGLAVRQAPLIIPLKATSTPVSIKQYPMSQEARLGIKPHIQRLLDQGILVPCQSPWNTPLLPVKKPGTNDYRPVQDLREVNKRVEDIHPTVPNPYNLLSGLPPSHQWYTVLDLKDAFFCLRLHPTSQSLFAFEWRDPEMGISGQLTWTRLPQGFKNSPTLFNEALHRDLADFRIQHPDLILLQYVDDLLLAATSELDCQQGTRALLQTLGDLGYRASAKKAQICQKQVKYLGYLLKEGQRWLTEARKETVMGQPTPKTPRQLREFLGTAGFCRLWIPGFAEMAAPLYPLTKPGTLFEWGPDQQKAYQEIKQALLTAPALGLPDLTKPFELFVDEKQGYAKGVLTQKLGPWRRPVAYLSKKLDPVAAGWPPCLRMVAAIAVLTKDAGKLTMGQPLVILAPHAVEALVKQPPDRWLSNARMTHYQALLLDTDRVQFGPIVALNPATLLPLPEEGLQHDCLDILAEAHGTRPDLTDQPLPDADHTWYTDGSSFLQEGQRKAGAAVTTETEVVWAKALPAGTSAQRAELIALTQALKMAEGKKLNVYTDSRYAFATAHIHGEIYRRRGWLTSEGKEIKNKDEILALLKALFLPKRLSIIHCPGHQKGNRAEARGNRMADQAAREVATRETPETSTLLAGKRTADGSEFEKRTADGSEFESPKKKAKVE

SEQ ID NO: 4541 - protein, 2122 aa, synthetic construct
MPAAKRVKLDGGDKKYSIGLDIGTNSVGWAVITDEYKVPSKKFKVLGNTDRHSIKKNLIGALLFDSGETAEATRLKRTARRRYTRRKNRICYLQEIFSNEMAKVDDSFFHRLEESFLVEEDKKHERHPIFGNIVDEVAYHEKYPTIYHLRKKLVDSTDKADLRLIYLALAHMIKFRGHFLIEGDLNPDNSDVDKLFIQLVQTYNQLFEENPINASGVDAKAILSARLSKSRRLENLIAQLPGEKKNGLFGNLIALSLGLTPNFKSNFDLAEDAKLQLSKDTYDDDLDNLLAQIGDQYADLFLAAKNLSDAILLSDILRVNTEITKAPLSASMIKRYDEHHQDLTLLKALVRQQLPEKYKEIFFDQSKNGYAGYIDGGASQEEFYKFIKPILEKMDGTEELLVKLNREDLLRKQRTFDNGSIPHQIHLGELHAILRRQEDFYPFLKDNREKIEKILTFRIPYYVGPLARGNSRFAWMTRKSEETITPWNFEEVVDKGASAQSFIERMTNFDKNLPNEKVLPKHSLLYEYFTVYNELTKVKYVTEGMRKPAFLSGEQKKAIVDLLFKTNRKVTVKQLKEDYFKKIECFDSVEISGVEDRFNASLGTYHDLLKIIKDKDFLDNEENEDILEDIVLTLTLFEDREMIEERLKTYAHLFDDKVMKQLKRRRYTGWGRLSRKLINGIRDKQSGKTILDFLKSDGFANRNFMQLIHDDSLTFKEDIQKAQVSGQGDSLHEHIANLAGSPAIKKGILQTVKVVDELVKVMGRHKPENIVIEMARENQTTQKGQKNSRERMKRIEEGIKELGSQILKEHPVENTQLQNEKLYLYYLQNGRDMYVDQELDINRLSDYDVDHIVPQSFLKDDSIDNKVLTRSDKARGKSDNVPSEEVVKKMKNYWRQLLNAKLITQRKFDNLTKAERGGLSELDKAGFIKRQLVETRQITKHVAQILDSRMNTKYDENDKLIREVKVITLKSKLVSDFRKDFQFYKVREINNYHHAHDAYLNAVVGTALIKKYPKLESEFVYGDYKVYDVRKMIAKSEQEIGKATAKYFFYSNIMNFFKTEITLANGEIRKRPLIETNGETGEIVWDKGRDFATVRKVLSMPQVNIVKKTEVQTGGFSKESILPKRNSDKLIARKKDWDPKKYGGFDSPTVAYSVLVVAKVEKGKSKKLKSVKELLGITIMERSSFEKNPIDFLEAKGYKEVKKDLIIKLPKYSLFELENGRKRMLASAGELQKGNELALPSKYVNFLYLASHYEKLKGSPEDNEQKQLFVEQHKHYLDEIIEQISEFSKRVILADANLDKVLSAYNKHRDKPIREQAENIIHLFTLTNLGAPAAFKYFDTTIDRKRYTSTKEVLDATLIHQSITGLYETRIDLSQLGGDGGAEAAAKEAAAKEAAAKEAAAKALEAEAAAKEAAAKEAAAKEAAAKAGGIPWLMKKPLQLTTLVPLQEYEERLLKQTMLTGSYKEKLQSLFLKYDALWQHWENQVGHRRIKPHHIATGTVNPRPQKQYPINPKAKASIQTVINDLLKQGVLIQQNSIMNTPVYPVPKPDGKWRMVLDYREVNKTIPLIAAQNQHSAGILSSIFRGKYKTTLDLSNGFWAHSITPESYWLTAFTWLGQQYCWTRLPQGFLNSPALFNADVVDLLKEVPNVQVYVDDIYISHDDPREHLEQLEKVFSLLLNAGYVVSLKKSEIAQHEVEFLGFNITKEGRGLTETFKQKLLNITPPRDLKQLQSILGKLNFARNFIPNFSELVKPLYNIIATAPGKYITWTTDNSQQLQNIISMLNSAENLEERNPEVRLIMKVNTSPSAGYIRFYNEFAKRPIMYLNYVYTKAEVKFTNTEKLLTTIHKGLIKALDLGMGQEILVYSPIVSMTKIQKTPLPERKALPIRWITWMSYLEDPRIQFHYDKTLPELQQVPTVTDDIIAKIKHPSEFSMVFYTDGSAIKHPNVNKSHNAGMGIAQVQFKPEFTVINTWSIPLGDHTAQLAEVAAVEFACKKALKIDGPVLIVTDSFYVAESVNKELPYWQSNGFFNNKKKPLKHVSKWKSIADCIQLKPDIIIIHEKGHQPTASTFHTEGNNLADKLATQGSYVVNAGKRTADGSEFEKRTADGSEFESPKKKAKVE

SEQ ID NO: 4542-4600 - skipped (59 entries)

SEQ ID NO: 4601 - DNA, 16 bp, synthetic construct
  source 1..16: mol_type = other DNA
gcgcgctcgctcgctc

SEQ ID NO: 4602-4643 - skipped (42 entries)

SEQ ID NO: 4644 - protein, 9 aa, synthetic construct
PAAKRVKLD

SEQ ID NO: 4645-4648 - skipped (4 entries)

SEQ ID NO: 4649 - protein, 29 aa, synthetic construct
KRTADGSEFEKRTADGSEFESPKKKAKVE

SEQ ID NO: 4650 - protein, 10 aa, synthetic construct
KRTADGSEFE

SEQ ID NO: 4651 - protein, 19 aa, synthetic construct
KRTADGSEFESPKKKAKVE

SEQ ID NO: 4652-5001 - skipped (350 entries)

SEQ ID NO: 5002 - protein, 672 aa, Murine leukemia virus
TLNIEDEYRLHETSKEPDVSLGSTWLSDFPQAWAETGGMGLAVRQAPLIIPLKATSTPVSIKQYPMSQEARLGIKPHIQRLLDQGILVPCQSPWNTPLLPVKKPGTNDYRPVQDLREVNKRVEDIHPTVPNPYNLLSGLPPSHQWYTVLDLKDAFFCLRLHPTSQPLFAFEWRDPEMGISGQLTWTRLPQGFKNSPTLFDEALHRDLADFRIQHPDLILLQYVDDLLLAATSELDCQQGTRALLQTLGNLGYRASAKKAQICQKQVKYLGYLLKEGQRWLTEARKETVMGQPTPKTPRQLREFLGTAGFCRLWIPGFAEMAAPLYPLTKTGTLFNWGPDQQKAYQEIKQALLTAPALGLPDLTKPFELFVDEKQGYAKGVLTQKLGPWRRPVAYLSKKLDPVAAGWPPCLRMVAAIAVLTKDAGKLTMGQPLVILAPHAVEALVKQPPDRWLSNARMTHYQALLLDTDRVQFGPVVALNPATLLPLPEEGLQHNCLDILAEAHGTRPDLTDQPLPDADHTWYTDGSSLLQEGQRKAGAAVTTETEVIWAKALPAGTSAQRAELIALTQALKMAEGKKLNVYTDSRYAFATAHIHGEIYRRRGLLTSEGKEIKNKDEILALLKALFLPKRLSIIHCPGHQKGHSAEARGNRMADQAARKAAITETPDTSTLLI

SEQ ID NO: 5003 - protein, 671 aa, Murine leukemia virus
TLNIEDEHRLHETSKEPDVSLGSTWLSDFPQAWAETGGMGLAVRQAPLIIPLKATSTPVSIKQYPMSQEARLGIKPHIQRLLDQGILVPCQSPWNTPLLPVKKPGTNDYRPVQDLREVNKRVEDIHPTVPNPYNLLSGLPPSHQWYTVLDLKDAFFCLRLHPTSQPLFAFEWRDPEMGISGQLTWTRLPQGFKNSPTLFDEALHRDLADFRIQHPDLILLQYVDDLLLAATSELDCQQGTRALLQTLGNLGYRASAKKAQICQKQVKYLGYLLKEGQRWLTEARKETVMGQPTPKTPRQLREFLGTAGFCRLWIPGFAEMAAPLYPLTKTGTLFNWGPDQQKAYQEIKQALLTAPALGLPDLTKPFELFVDEKQGYAKGVLTQKLGPWRRPVAYLSKKLDPVAAGWPPCLRMVAAIAVLTKDAGKLTMGQPLVILAPHAVEALVKQPPDRWLSNARMTHYQALLLDTDRVQFGPVVALNPATLLPLPEEGLQHNCLDILAEAHGTRPDLTDQPLPDADHTWYTDGSSLLQEGQRKAGAAVTTETEVIWAKALPAGTSAQRAELIALTQALKMAEGKKLNVYTDSRYAFATAHIHGEIYRRRGLLTSEGKEIKNKDEILALLKALFLPKRLSIIHCPGHQKGHSAEARGNRMADQAARKAAITETPDTSTLL

SEQ ID NO: 5004 - protein, 660 aa, Murine leukemia virus
TLNIEDEHRLHETSKEPDVSLGSTWLSDFPQAWAETGGMGLAVRQAPLIIPLKATSTPVSIKQYPMSQEARLGIKPHIQRLLDQGILVPCQSPWNTPLLPVKKPGTNDYRPVQDLREVNKRVEDIHPTVPNPYNLLSGLPPSHQWYTVLDLKDAFFCLRLHPTSQPLFAFEWRDPEMGISGQLTWTRLPQGFKNSPTLFDEALHRDLADFRIQHPDLILLQYVDDLLLAATSELDCQQGTRALLQTLGNLGYRASAKKAQICQKQVKYLGYLLKEGQRWLTEARKETVMGQPTPKTPRQLREFLGTAGFCRLWIPGFAEMAAPLYPLTKTGTLFNWGPDQQKAYQEIKQALLTAPALGLPDLTKPFELFVDEKQGYAKGVLTQKLGPWRRPVAYLSKKLDPVAAGWPPCLRMVAAIAVLTKDAGKLTMGQPLVILAPHAVEALVKQPPDRWLSNARMTHYQALLLDTDRVQFGPVVALNPATLLPLPEEGLQHNCLDILAEAHGTRPDLTDQPLPDADHTWYTDGSSLLQEGQRKAGAAVTTETEVIWAKALPAGTSAQRAELIALTQALKMAEGKKLNVYTDSRYAFATAHIHGEIYRRRGLLTSEGKEIKNKDEILALLKALFLPKRLSIIHCPGHQKGHSAEARGNRMADQAARKAA

SEQ ID NO: 5005 - protein, 672 aa, synthetic construct
TLNIEDEYRLHETSKEPDVSLGSTWLSDFPQAWAETGGMGLAVRQAPLIIPLKATSTPVSIKQYPMSQEARLGIKPHIQRLLDQGILVPCQSPWNTPLLPVKKPGTNDYRPVQDLREVNKRVEDIHPTVPNPYNLLSGLPPSHQWYTVLDLKDAFFCLRLHPTSQPLFAFEWRDPEMGISGQLTWTRLPQGFKNSPTLFNEALHRDLADFRIQHPDLILLQYVDDLLLAATSELDCQQGTRALLQTLGNLGYRASAKKAQICQKQVKYLGYLLKEGQRWLTEARKETVMGQPTPKTPRQLREFLGKAGFCRLFIPGFAEMAAPLYPLTKPGTLFNWGPDQQKAYQEIKQALLTAPALGLPDLTKPFELFVDEKQGYAKGVLTQKLGPWRRPVAYLSKKLDPVAAGWPPCLRMVAAIAVLTKDAGKLTMGQPLVILAPHAVEALVKQPPDRWLSNARMTHYQALLLDTDRVQFGPVVALNPATLLPLPEEGLQHNCLDILAEAHGTRPDLTDQPLPDADHTWYTDGSSLLQEGQRKAGAAVTTETEVIWAKALPAGTSAQRAELIALTQALKMAEGKKLNVYTDSRYAFATAHIHGEIYRRRGWLTSEGKEIKNKDEILALLKALFLPKRLSIIHCPGHQKGHSAEARGNRMADQAARKAAITETPDTSTLLI

SEQ ID NO: 5006 - protein, 33 aa, synthetic construct
SGGSSGGSSGSETPGTSESATPESSGGSSGGSS

SEQ ID NO: 5007 - protein, 1369 aa, unidentified
SMDKKYSIGLAIGTNSVGWAVITDDYKVPSKKFKVLGNTDRHSIKKNLIGALLFDSGETAEATRLKRTARRRYTRRKNRICYLQEIFSNEMAKVDDSFFHRLEESFLVEEDKKHERHPIFGNIVDEVAYHEKYPTIYHLRKKLVDSTDKADLRLIYLALAHMIKFRGHFLIEGDLNPDNSDVDKLFIQLVQTYNQLFEENPINASGVDAKAILSARLSKSRRLENLIAQLPGEKKNGLFGNLIALSLGLTPNFKSNFDLAEDAKLQLSKDTYDDDLDNLLAQIGDQYADLFLAAKNLSDAILLSDILRVNTEITKAPLSASMIKRYDEHHQDLTLLKALVRQQLPEKYKEIFFDQSKNGYAGYIDGGASQEEFYKFIKPILEKMDGTEELLVKLNREDLLRKQRTFDNGSIPHQIHLGELHAILRRQEDFYPFLKDNREKIEKILTFRIPYYVGPLARGNSRFAWMTRKSEETITPWNFEEVVDKGASAQSFIERMTNFDKNLPNEKVLPKHSLLYEYFTVYNELTKVKYVTEGMRKPAFLSGEQKKAIVDLLFKTNRKVTVKQLKEDYFKKIECFDSVEISGVEDRFNASLGTYHDLLKIIKDKDFLDNEENEDILEDIVLTLTLFEDREMIEERLKTYAHLFDDKVMKQLKRRRYTGWGRLSRKLINGIRDKQSGKTILDFLKSDGFANRNFMQLIHDDSLTFKEDIQKAQVSGQGDSLHEHIANLAGSPAIKKGILQTVKVVDELVKVMGRHKPENIVIEMARENQTTQKGQKNSRERMKRIEEGIKELGSQILKEHPVENTQLQNEKLYLYYLQNGRDMYVDQELDINRLSDYDVDAIVPQSFLKDDSIDNKVLTRSDKNRGKSDNVPSEEVVKKMKNYWRQLLNAKLITQRKFDNLTKAERGGLSELDKAGFIKRQLVETRQITKHVAQILDSRMNTKYDENDKLIREVKVITLKSKLVSDFRKDFQFYKVREINNYHHAHDAYLNAVVGTALIKKYPKLESEFVYGDYKVYDVRKMIAKSEQEIGKATAKYFFYSNIMNFFKTEITLANGEIRKRPLIETNGETGEIVWDKGRDFATVRKVLSMPQVNIVKKTEVQTGGFSKESILPKRNSDKLIARKKDWDPKKYGGFDSPTVAYSVLVVAKVEKGKSKKLKSVKELLGITIMERSSFEKNPIDFLEAKGYKEVKKDLIIKLPKYSLFELENGRKRMLASAGELQKGNELALPSKYVNFLYLASHYEKLKGSPEDNEQKQLFVEQHKHYLDEIIEQISEFSKRVILADANLDKVLSAYNKHRDKPIREQAENIIHLFTLTNLGAPAAFKYFDTTIDRKRYTSTKEVLDATLIHQSITGLYETRIDLSQLGGD

SEQ ID NO: 5008 - DNA, 76 bp, synthetic construct
  source 1..76: mol_type = other DNA
gttttagagctagaaatagcaagttaaaataaggctagtccgttatcaacttgaaaaagtgggaccgagtcggtcc

SEQ ID NO: 5009 - protein, 30 aa, synthetic construct
MDSLLMNRRKFLYQFKNVRWAKGRRETYLC

SEQ ID NO: 5010 - protein, 28 aa, synthetic construct
PKKRKVEGADKRTADGSEFESPKKKRKV

SEQ ID NO: 5011 - protein, 22 aa, synthetic construct
RKSGKIAAIWKRPRKPKKKRKV

SEQ ID NO: 5012 - protein, 18 aa, synthetic construct
KRTADGSEFESPKKKRKV

SEQ ID NO: 5013 - protein, 17 aa, synthetic construct
KKTELQTTNAENKTKKL

SEQ ID NO: 5014 - protein, 19 aa, synthetic construct
KRGINDRNFWRGENGRKTR

SEQ ID NO: 5015 - protein, 16 aa, synthetic construct
KRPAATKKAGQAKKKK

SEQ ID NO: 5016 - protein, 29 aa, synthetic construct
PKKKRKVEGADKRTADGSEFESPKKKRKV

SEQ ID NO: 5017 - protein, 25 aa, synthetic construct
KRASSQALGTIPKRRSSSRFIKRKK

SEQ ID NO: 5018 - protein, 7 aa, synthetic construct
RKKRKKK

SEQ ID NO: 5019-5024 - skipped (6 entries)

SEQ ID NO: 5025 - protein, 4 aa, synthetic construct
SGGS

SEQ ID NO: 5026 - protein, 4 aa, synthetic construct
GGGS

SEQ ID NO: 5027 - protein, 5 aa, synthetic construct
GGGGS

SEQ ID NO: 5028 - protein, 5 aa, synthetic construct
EAAAK

SEQ ID NO: 5029 - DNA, 306 bp, synthetic construct
  source 1..306: mol_type = other DNA
tgcctgtcatacgaaaccgagatactgacagtagaatatggccttctgccaatcgggaagattgtggagaaacggatagaatgcacagtttactctgtcgataacaatggtaacatttatactcagccagttgcccagtggcacgaccggggagagcaggaagtattcgaatactgtctggaggatggaagtctcattagggccactaaggaccacaaatttatgacagtcgatggccagatgctgcctatagacgaaatctttgagcgagagttggacctcatgcgagttgacaaccttcctaat

SEQ ID NO: 5030 - protein, 102 aa, synthetic construct
CLSYETEILTVEYGLLPIGKIVEKRIECTVYSVDNNGNIYTQPVAQWHDRGEQEVFEYCLEDGSLIRATKDHKFMTVDGQMLPIDEIFERELDLMRVDNLPN

SEQ ID NO: 5031 - DNA, 108 bp, synthetic construct
  source 1..108: mol_type = other DNA
atgatcaagatagctacaaggaagtatcttggcaaacaaaacgtttatgatattggagtcgaaagagatcacaactttgctctgaagaacggattcatagcttctaat

SEQ ID NO: 5032 - protein, 36 aa, synthetic construct
MIKIATRKYLGKQNVYDIGVERDHNFALKNGFIASN

SEQ ID NO: 5033 - DNA, 303 bp, synthetic construct
  source 1..303: mol_type = other DNA
tgcctgtcttatgataccgagatacttaccgttgaatatggcttcttgcctattggaaagattgtcgaagagagaattgaatgcacagtatatactgtagacaagaatggtttcgtttacacacagcccattgctcaatggcacaatcgcggcgaacaagaagtatttgagtactgtctcgaggatggaagcatcatacgagcaactaaagatcataaattcatgaccactgacgggcagatgttgccaatagatgagatattcgagcggggcttggatctcaaacaagtggatggattgcca

SEQ ID NO: 5034 - protein, 101 aa, synthetic construct
CLSYDTEILTVEYGFLPIGKIVEERIECTVYTVDKNGFVYTQPIAQWHNRGEQEVFEYCLEDGSIIRATKDHKFMTTDGQMLPIDEIFERGLDLKQVDGLP

SEQ ID NO: 5035 - DNA, 159 bp, synthetic construct
  source 1..159: mol_type = other DNA
atgaagaggactgccgatggatcagagtttgaatctcccaagaagaagaggaaagtaaagataatatctcgaaaaagtcttggtacccaaaatgtctatgatattggagtggagaaagatcacaacttccttctcaagaacggtctcgtagccagcaac

SEQ ID NO: 5036 - protein, 53 aa, synthetic construct
MKRTADGSEFESPKKKRKVKIISRKSLGTQNVYDIGVEKDHNFLLKNGLVASN

SEQ ID NO: 5037-5101 - skipped (65 entries)

SEQ ID NO: 5102 - protein, 6 aa, synthetic construct
GGSGGS

SEQ ID NO: 5103 - protein, 9 aa, synthetic construct
GGSGGSGGS

SEQ ID NO: 5104 - protein, 12 aa, synthetic construct
GGSGGSGGSGGS

SEQ ID NO: 5105 - protein, 15 aa, synthetic construct
GGSGGSGGSGGSGGS

SEQ ID NO: 5106 - protein, 18 aa, synthetic construct
GGSGGSGGSGGSGGSGGS

SEQ ID NO: 5107 - protein, 5 aa, synthetic construct
GGGGS

SEQ ID NO: 5108 - protein, 10 aa, synthetic construct
GGGGSGGGGS

SEQ ID NO: 5109 - protein, 15 aa, synthetic construct
GGGGSGGGGSGGGGS

SEQ ID NO: 5110 - protein, 20 aa, synthetic construct
GGGGSGGGGSGGGGSGGGGS

SEQ ID NO: 5111 - protein, 25 aa, synthetic construct
GGGGSGGGGSGGGGSGGGGSGGGGS

SEQ ID NO: 5112 - protein, 30 aa, synthetic construct
GGGGSGGGGSGGGGSGGGGSGGGGSGGGGS

SEQ ID NO: 5113 - skipped

SEQ ID NO: 5114 - protein, 4 aa, synthetic construct
GGGG

SEQ ID NO: 5115 - protein, 5 aa, synthetic construct
GGGGG

SEQ ID NO: 5116 - protein, 6 aa, synthetic construct
GGGGGG

SEQ ID NO: 5117 - protein, 7 aa, synthetic construct
GGGGGGG

SEQ ID NO: 5118 - protein, 8 aa, synthetic construct
GGGGGGGG

SEQ ID NO: 5119 - skipped

SEQ ID NO: 5120 - protein, 6 aa, synthetic construct
GSSGSS

SEQ ID NO: 5121 - protein, 9 aa, synthetic construct
GSSGSSGSS

SEQ ID NO: 5122 - protein, 12 aa, synthetic construct
GSSGSSGSSGSS

SEQ ID NO: 5123 - protein, 15 aa, synthetic construct
GSSGSSGSSGSSGSS

SEQ ID NO: 5124 - protein, 18 aa, synthetic construct
GSSGSSGSSGSSGSSGSS

SEQ ID NO: 5125 - protein, 5 aa, synthetic construct
EAAAK

SEQ ID NO: 5126 - protein, 10 aa, synthetic construct
EAAAKEAAAK

SEQ ID NO: 5127 - protein, 15 aa, synthetic construct
EAAAKEAAAKEAAAK

SEQ ID NO: 5128 - protein, 20 aa, synthetic construct
EAAAKEAAAKEAAAKEAAAK

SEQ ID NO: 5129 - protein, 25 aa, synthetic construct
EAAAKEAAAKEAAAKEAAAKEAAAK

SEQ ID NO: 5130 - protein, 30 aa, synthetic construct
EAAAKEAAAKEAAAKEAAAKEAAAKEAAAK

SEQ ID NO: 5131 - skipped

SEQ ID NO: 5132 - protein, 5 aa, synthetic construct
PAPAP

SEQ ID NO: 5133 - protein, 7 aa, synthetic construct
PAPAPAP

SEQ ID NO: 5134 - protein, 9 aa, synthetic construct
PAPAPAPAP

SEQ ID NO: 5135 - protein, 11 aa, synthetic construct
PAPAPAPAPAP

SEQ ID NO: 5136 - protein, 13 aa, synthetic construct
PAPAPAPAPAPAP

SEQ ID NO: 5137 - protein, 6 aa, synthetic construct
GGSGGG

SEQ ID NO: 5138 - protein, 6 aa, synthetic construct
GGGGGS

SEQ ID NO: 5139 - protein, 6 aa, synthetic construct
GGSGSS

SEQ ID NO: 5140 - protein, 6 aa, synthetic construct
GSSGGS

SEQ ID NO: 5141 - protein, 8 aa, synthetic construct
GGSEAAAK

SEQ ID NO: 5142 - protein, 8 aa, synthetic construct
EAAAKGGS

SEQ ID NO: 5143 - protein, 6 aa, synthetic construct
GGSPAP

SEQ ID NO: 5144 - protein, 6 aa, synthetic construct
PAPGGS

SEQ ID NO: 5145 - protein, 6 aa, synthetic construct
GGGGSS

SEQ ID NO: 5146 - protein, 6 aa, synthetic construct
GSSGGG

SEQ ID NO: 5147 - protein, 8 aa, synthetic construct
GGGEAAAK

SEQ ID NO: 5148 - protein, 8 aa, synthetic construct
EAAAKGGG

SEQ ID NO: 5149 - protein, 6 aa, synthetic construct
GGGPAP

SEQ ID NO: 5150 - protein, 6 aa, synthetic construct
PAPGGG

SEQ ID NO: 5151 - protein, 8 aa, synthetic construct
GSSEAAAK

SEQ ID NO: 5152 - protein, 8 aa, synthetic construct
EAAAKGSS

SEQ ID NO: 5153 - protein, 6 aa, synthetic construct
GSSPAP

SEQ ID NO: 5154 - protein, 6 aa, synthetic construct
PAPGSS

SEQ ID NO: 5155 - protein, 8 aa, synthetic construct
EAAAKPAP

SEQ ID NO: 5156 - protein, 8 aa, synthetic construct
PAPEAAAK

SEQ ID NO: 5157 - protein, 9 aa, synthetic construct
GGSGGGGSS

SEQ ID NO: 5158 - protein, 9 aa, synthetic construct
GGSGSSGGG

SEQ ID NO: 5159 - protein, 9 aa, synthetic construct
GGGGGSGSS

SEQ ID NO: 5160 - protein, 9 aa, synthetic construct
GGGGSSGGS

SEQ ID NO: 5161 - protein, 9 aa, synthetic construct
GSSGGSGGG

SEQ ID NO: 5162 - protein, 9 aa, synthetic construct
GSSGGGGGS

SEQ ID NO: 5163 - protein, 11 aa, synthetic construct
GGSGGGEAAAK

SEQ ID NO: 5164 - protein, 11 aa, synthetic construct
GGSEAAAKGGG

SEQ ID NO: 5165 - protein, 11 aa, synthetic construct
GGGGGSEAAAK

SEQ ID NO: 5166 - protein, 11 aa, synthetic construct
GGGEAAAKGGS

SEQ ID NO: 5167 - protein, 11 aa, synthetic construct
EAAAKGGSGGG

SEQ ID NO: 5168 - protein, 11 aa, synthetic construct
EAAAKGGGGGS

SEQ ID NO: 5169 - protein, 9 aa, synthetic construct
GGSGGGPAP

SEQ ID NO: 5170 - protein, 9 aa, synthetic construct
GGSPAPGGG

SEQ ID NO: 5171 - protein, 9 aa, synthetic construct
GGGGGSPAP

SEQ ID NO: 5172 - protein, 9 aa, synthetic construct
GGGPAPGGS

SEQ ID NO: 5173 - protein, 9 aa, synthetic construct
PAPGGSGGG

SEQ ID NO: 5174 - protein, 9 aa, synthetic construct
PAPGGGGGS

SEQ ID NO: 5175 - protein, 11 aa, synthetic construct
GGSGSSEAAAK

SEQ ID NO: 5176 - protein, 11 aa, synthetic construct
GGSEAAAKGSS

SEQ ID NO: 5177 - protein, 11 aa, synthetic construct
GSSGGSEAAAK

SEQ ID NO: 5178 - protein, 11 aa, synthetic construct
GSSEAAAKGGS

SEQ ID NO: 5179 - protein, 11 aa, synthetic construct
EAAAKGGSGSS

SEQ ID NO: 5180 - protein, 11 aa, synthetic construct
EAAAKGSSGGS

SEQ ID NO: 5181 - protein, 9 aa, synthetic construct
GGSGSSPAP

SEQ ID NO: 5182 - protein, 9 aa, synthetic construct
GGSPAPGSS

SEQ ID NO: 5183 - protein, 9 aa, synthetic construct
GSSGGSPAP

SEQ ID NO: 5184 - protein, 9 aa, synthetic construct
GSSPAPGGS

SEQ ID NO: 5185 - protein, 9 aa, synthetic construct
PAPGGSGSS

SEQ ID NO: 5186 - protein, 9 aa, synthetic construct
PAPGSSGGS

SEQ ID NO: 5187 - protein, 11 aa, synthetic construct
GGSEAAAKPAP

SEQ ID NO: 5188 - protein, 11 aa, synthetic construct
GGSPAPEAAAK

SEQ ID NO: 5189 - protein, 11 aa, synthetic construct
EAAAKGGSPAP

SEQ ID NO: 5190 - protein, 11 aa, synthetic construct
EAAAKPAPGGS

SEQ ID NO: 5191 - protein, 11 aa, synthetic construct
PAPGGSEAAAK

SEQ ID NO: 5192 - protein, 11 aa, synthetic construct
PAPEAAAKGGS

SEQ ID NO: 5193 - protein, 11 aa, synthetic construct
GGGGSSEAAAK

SEQ ID NO: 5194 - protein, 11 aa, synthetic construct
GGGEAAAKGSS

SEQ ID NO: 5195 - protein, 11 aa, synthetic construct
GSSGGGEAAAK

SEQ ID NO: 5196 - protein, 11 aa, synthetic construct
GSSEAAAKGGG

SEQ ID NO: 5197 - protein, 11 aa, synthetic construct
EAAAKGGGGSS

SEQ ID NO: 5198 - protein, 11 aa, synthetic construct
EAAAKGSSGGG

SEQ ID NO: 5199 - protein, 9 aa, synthetic construct
GGGGSSPAP

SEQ ID NO: 5200 - protein, 9 aa, synthetic construct
GGGPAPGSS

SEQ ID NO: 5201 - protein, 9 aa, synthetic construct
GSSGGGPAP

SEQ ID NO: 5202 - protein, 9 aa, synthetic construct
GSSPAPGGG

SEQ ID NO: 5203 - protein, 9 aa, synthetic construct
PAPGGGGSS

SEQ ID NO: 5204 - protein, 9 aa, synthetic construct
PAPGSSGGG

SEQ ID NO: 5205 - protein, 11 aa, synthetic construct
GGGEAAAKPAP

SEQ ID NO: 5206 - protein, 11 aa, synthetic construct
GGGPAPEAAAK

SEQ ID NO: 5207 - protein, 11 aa, synthetic construct
EAAAKGGGPAP

SEQ ID NO: 5208 - protein, 11 aa, synthetic construct
EAAAKPAPGGG

SEQ ID NO: 5209 - protein, 11 aa, synthetic construct
PAPGGGEAAAK

SEQ ID NO: 5210 - protein, 11 aa, synthetic construct
PAPEAAAKGGG

SEQ ID NO: 5211 - protein, 11 aa, synthetic construct
GSSEAAAKPAP

SEQ ID NO: 5212 - protein, 11 aa, synthetic construct
GSSPAPEAAAK

SEQ ID NO: 5213 - protein, 11 aa, synthetic construct
EAAAKGSSPAP

SEQ ID NO: 5214 - protein, 11 aa, synthetic construct
EAAAKPAPGSS

SEQ ID NO: 5215 - protein, 11 aa, synthetic construct
PAPGSSEAAAK

SEQ ID NO: 5216 - protein, 11 aa, synthetic construct
PAPEAAAKGSS

SEQ ID NO: 5217 - protein, 46 aa, synthetic construct
AEAAAKEAAAKEAAAKEAAAKALEAEAAAKEAAAKEAAAKEAAAKA

SEQ ID NO: 5218 - protein, 15 aa, synthetic construct
GGGGSEAAAKGGGGS

SEQ ID NO: 5219 - protein, 15 aa, synthetic construct
EAAAKGGGGSEAAAK

SEQ ID NO: 5220 - protein, 16 aa, synthetic construct
SGSETPGTSESATPES

SEQ ID NO: 5221 - protein, 12 aa, synthetic construct
GSAGSAAGSGEF

SEQ ID NO: 5222 - protein, 33 aa, synthetic construct; identical to SEQ ID NO: 5006

SEQ ID NO: 5223 - protein, 30 aa, synthetic construct
AHFKISGEKRPSTDPGKKAKNPKKKKKKDP

SEQ ID NO: 5224 - protein, 12 aa, synthetic construct
AHRAKKMSKTHA

SEQ ID NO: 5225 - protein, 14 aa, synthetic construct
ASPEYVNLPINGNG

SEQ ID NO: 5226 - protein, 7 aa, synthetic construct
CTKRPRW

SEQ ID NO: 5227 - protein, 16 aa, synthetic construct
DKAKRVSRNKSEKKRR

SEQ ID NO: 5228 - protein, 15 aa, synthetic construct
EELRLKEELLKGIYA

SEQ ID NO: 5229 - protein, 16 aa, synthetic construct
EEQLRRRKNSRLNNTG

SEQ ID NO: 5230 - protein, 24 aa, synthetic construct
EVLKVIRTGKRKKKAWKRMVTKVC

SEQ ID NO: 5231 - protein, 15 aa, synthetic construct
HHHHHHHHHHHHQPH

SEQ ID NO: 5232 - protein, 17 aa, synthetic construct
HKKKHPDASVNFSEFSK

SEQ ID NO: 5233 - protein, 6 aa, synthetic construct
HKRTKK

SEQ ID NO: 5234 - protein, 29 aa, synthetic construct
IINGRKLKLKKSRRRSSQTSNNSFTSRRS

SEQ ID NO: 5235 - protein, 8 aa, synthetic construct
KAEQERRK

SEQ ID NO: 5236 - protein, 18 aa, synthetic construct
KEKRKRREELFIEQKKRK

SEQ ID NO: 5237 - protein, 14 aa, synthetic construct
KKGKDEWFSRGKKP

SEQ ID NO: 5238 - protein, 12 aa, synthetic construct
KKGPSVQKRKKT

SEQ ID NO: 5239 - protein, 16 aa, synthetic construct
KKKTVINDLLHYKKEK

SEQ ID NO: 5240 - protein, 17 aa, synthetic construct
KKNGGKGKNKPSAKIKK

SEQ ID NO: 5241 - protein, 13 aa, synthetic construct
KKPKWDDFKKKKK

SEQ ID NO: 5242 - protein, 6 aa, synthetic construct
KKRKKD

SEQ ID NO: 5243 - protein, 9 aa, synthetic construct
KKRRKRRRK

SEQ ID NO: 5244 - protein, 9 aa, synthetic construct
KKRRRRARK

SEQ ID NO: 5245 - protein, 7 aa, synthetic construct
KKSKRGR

SEQ ID NO: 5246 - protein, 8 aa, synthetic construct
KKSRKRGS

SEQ ID NO: 5247 - protein, 17 aa, synthetic construct
KKSTALSRELGKIMRRR

SEQ ID NO: 5248 - protein, 17 aa, synthetic construct
KKSYQDPEIIAHSRPRK

SEQ ID NO: 5249 - protein, 17 aa, synthetic construct
KKTGKNRKLKSKRVKTR

SEQ ID NO: 5250 - protein, 17 aa, synthetic construct
KKVSIAGQSGKLWRWKR

SEQ ID NO: 5251 - protein, 20 aa, synthetic construct
KKYENVVIKRSPRKRGRPRK

SEQ ID NO: 5252 - protein, 6 aa, synthetic construct
KNKKRK

SEQ ID NO: 5253 - protein, 6 aa, synthetic construct
KPKKKR

SEQ ID NO: 5254 - protein, 19 aa, synthetic construct
KRAMKDDSHGNSTSPKRRK

SEQ ID NO: 5255 - protein, 17 aa, synthetic construct
KRANSNLVAAYEKAKKK

SEQ ID NO: 5256 - protein, 22 aa, synthetic construct
KRASEDTTSGSPPKKSSAGPKR

SEQ ID NO: 5257 - protein, 16 aa, synthetic construct
KRFKRRWMVRKMKTKK

SEQ ID NO: 5258 - protein, 16 aa, synthetic construct
KRGLNSSFETSPKKVK

SEQ ID NO: 5259 - protein, 20 aa, synthetic construct
KRGNSSIGPNDLSKRKQRKK

SEQ ID NO: 5260 - protein, 23 aa, synthetic construct
KRIHSVSLSQSQIDPSKKVKRAK

SEQ ID NO: 5261 - protein, 15 aa, synthetic construct
KRKGKLKNKGSKRKK

SEQ ID NO: 5262 - protein, 13 aa, synthetic construct
KRRRRRRREKRKR

SEQ ID NO: 5263 - protein, 18 aa, synthetic construct
KRSNDRTYSPEEEKQRRA

SEQ ID NO: 5264 - protein, 21 aa, synthetic construct
KRTVATNGDASGAHRAKKMSK

SEQ ID NO: 5265 - protein, 20 aa, synthetic construct
KRVYNKGEDEQEHLPKGKKR

SEQ ID NO: 5266 - protein, 18 aa, synthetic construct
KSGKAPRRRAVSMDNSNK

SEQ ID NO: 5267 - protein, 19 aa, synthetic construct
KVNFLDMSLDDIIIYKELE

SEQ ID NO: 5268 - protein, 15 aa, synthetic construct
KVQHRIAKKTTRRRR

SEQ ID NO: 5269 - protein, 8 aa, synthetic construct
LSPSLSPL

SEQ ID NO: 5270 - protein, 30 aa, synthetic construct; identical to SEQ ID NO: 5009

SEQ ID NO: 5271 - protein, 52 aa, synthetic construct
MPQNEYIELHRKRYGYRLDYHEKKRKKESREAHERSKKAKKMIGLKAKLYHK

SEQ ID NO: 5272 - protein, 10 aa, synthetic construct
MVQLRPRASR

SEQ ID NO: 5273 - protein, 24 aa, synthetic construct
NNKLLAKRRKGGASPKDDPMDDIK

SEQ ID NO: 5274 - protein, 20 aa, synthetic construct
NYKRPMDGTYGPPAKRHEGE

SEQ ID NO: 5275 - protein, 19 aa, synthetic construct
PDTKRAKLDSSETTMVKKK

SEQ ID NO: 5276 - protein, 7 aa, synthetic construct
PEKRTKI

SEQ ID NO: 5277 - protein, 8 aa, synthetic construct
PGGRGKKK

SEQ ID NO: 5278 - protein, 18 aa, synthetic construct
PGKMDKGEHRQERRDRPY

SEQ ID NO: 5279 - protein, 11 aa, synthetic construct
PKKGDKYDKTD

SEQ ID NO: 5280 - protein, 7 aa, synthetic construct
PKKKSRK

SEQ ID NO: 5281 - protein, 7 aa, synthetic construct
PKKNKPE

SEQ ID NO: 5282 - protein, 7 aa, synthetic construct
PKKRAKV

SEQ ID NO: 5283 - protein, 9 aa, synthetic construct
PKPKKLKVE

SEQ ID NO: 5284 - protein, 7 aa, synthetic construct
PKRGRGR

SEQ ID NO: 5285 - protein, 9 aa, synthetic construct
PKRRLVDDA

SEQ ID NO: 5286 - protein, 7 aa, synthetic construct
PKRRRTY

SEQ ID NO: 5287 - protein, 6 aa, synthetic construct
PLFKRR

SEQ ID NO: 5288 - protein, 7 aa, synthetic construct
PLRKAKR

SEQ ID NO: 5289 - protein, 9 aa, synthetic construct
PPAKRKCIF

SEQ ID NO: 5290 - protein, 8 aa, synthetic construct
PPARRRRL

SEQ ID NO: 5291 - protein, 8 aa, synthetic construct
PPKKKRKV

SEQ ID NO: 5292 - protein, 10 aa, synthetic construct
PPNKRMKVKH

SEQ ID NO: 5293 - protein, 13 aa, synthetic construct
PPRIYPQLPSAPT

SEQ ID NO: 5294 - protein, 13 aa, synthetic construct
PQRSPFPKSSVKR

SEQ ID NO: 5295 - protein, 8 aa, synthetic construct
PRPRKVPR

SEQ ID NO: 5296 - protein, 9 aa, synthetic construct
PRRRVQRKR

SEQ ID NO: 5297 - protein, 7 aa, synthetic construct
PRRVRLK

SEQ ID NO: 5298 - protein, 7 aa, synthetic construct
PSRKRPR

SEQ ID NO: 5299 - protein, 8 aa, synthetic construct
PSSKKRKV

SEQ ID NO: 5300 - protein, 7 aa, synthetic construct
PTKKRVK

SEQ ID NO: 5301 - protein, 9 aa, synthetic construct
QRPGPYDRP

SEQ ID NO: 5302 - protein, 18 aa, synthetic construct
RGKGGKGLGKGGAKRHRK

SEQ ID NO: 5303 - protein, 24 aa, synthetic construct
RKAGKGGGGHKTTKKRSAKDEKVP

SEQ ID NO: 5304 - protein, 9 aa, synthetic construct
RKIKLKRAK

SEQ ID NO: 5305 - protein, 9 aa, synthetic construct
RKIKRKRAK

SEQ ID NO: 5306 - protein, 17 aa, synthetic construct
RKKEAPGPREELRSRGR

SEQ ID NO: 5307 - protein, 7 aa, synthetic construct
RKKRKGK

SEQ ID NO: 5308 - protein, 9 aa, synthetic construct
RKKRRQRRR

SEQ ID NO: 5309 - protein, 25 aa, synthetic construct
RKKSIPLSIKNLKRKHKRKKNKITR

SEQ ID NO: 5310 - protein, 20 aa, synthetic construct
RKLVKPKNTKMKTKLRTNPY

SEQ ID NO: 5311 - protein, 16 aa, synthetic construct
RKRLILSDKGQLDWKK

SEQ ID NO: 5312 - protein, 7 aa, synthetic construct
RKRLKSK

SEQ ID NO: 5313 - protein, 9 aa, synthetic construct
RKRRVRDNM

SEQ ID NO: 5314 - protein, 22 aa, synthetic construct
RKRSPKDKKEKDLDGAGKRRKT

SEQ ID NO: 5315 - protein, 22 aa, synthetic construct
RKRTPRVDGQTGENDMNKRRRK

SEQ ID NO: 5316 - protein, 10 aa, synthetic construct
RLPVRRRRRR

SEQ ID NO: 5317 - protein, 10 aa, synthetic construct
RLRFRKPKSK

SEQ ID NO: 5318 - protein, 6 aa, synthetic construct
RQQRKR

SEQ ID NO: 5319 - protein, 16 aa, synthetic construct
RRDLNSSFETSPKKVK

SEQ ID NO: 5320 - protein, 8 aa, synthetic construct
RRDRAKLR

SEQ ID NO: 5321 - protein, 8 aa, synthetic construct
RRGDGRRR

SEQ ID NO: 5322 - protein, 11 aa, synthetic construct
RRGRKRKAEKQ

SEQ ID NO: 5323 - protein, 6 aa, synthetic construct
RRKKRR

SEQ ID NO: 5324 - protein, 19 aa, synthetic construct
RRKRSKSEDMDSVESKRRR

SEQ ID NO: 5325 - protein, 6 aa, synthetic construct
RRKRSR

SEQ ID NO: 5326 - protein, 14 aa, synthetic construct
RRPKGKTLQKRKPK

SEQ ID NO: 5327 - protein, 18 aa, synthetic construct
RRRGFERFGPDNMGRKRK

SEQ ID NO: 5328 - protein, 15 aa, synthetic construct
RRRGKNKVAAQNCRK

SEQ ID NO: 5329 - protein, 6 aa, synthetic construct
RRRKRR

SEQ ID NO: 5330 - protein, 14 aa, synthetic construct
RRRQKQKGGASRRR

SEQ ID NO: 5331 - protein, 13 aa, synthetic construct
RRRREGPRARRRR

SEQ ID NO: 5332 - protein, 61 aa, synthetic construct
RRTIRLKLVYDKCDRSCKIQKKNRNKCQYCRFHKCLSVGMSHNAIRFGRMPRSEKAKLKAE

SEQ ID NO: 5333 - protein, 17 aa, synthetic construct
RRVPQRKEVSRCRKCRK

SEQ ID NO: 5334 - protein, 32 aa, synthetic construct
RVGGRRQAVECIEDLLNEPGQPLDLSCKRPRP

SEQ ID NO: 5335 - protein, 9 aa, synthetic construct
RVVKLRIAP

SEQ ID NO: 5336 - protein, 6 aa, synthetic construct
RVVRRR

SEQ ID NO: 5337 - protein, 12 aa, synthetic construct
SKRKTKISRKTR

SEQ ID NO: 5338 - protein, 16 aa, synthetic construct
SYVKTVPNRTRTYIKL

SEQ ID NO: 5339 - protein, 12 aa, synthetic construct
TGKNEAKKRKIA

SEQ ID NO: 5340 - protein, 30 aa, synthetic construct
TLSPASSPSSVSCPVIPASTDESPGSALNI

SEQ ID NO: 5341 - protein, 12 aa, synthetic construct
VSKKQRTGKKIH

SEQ ID NO: 5342 - protein, 9 aa, synthetic construct
SPKKKRKVE

SEQ ID NO: 5343 - protein, 19 aa, synthetic construct
KRTADGSEFESPKKKRKVE

SEQ ID NO: 5344 - protein, 9 aa, synthetic construct
PAAKRVKLD

SEQ ID NO: 5345 - protein, 7 aa, synthetic construct
PKKKRKV

SEQ ID NO: 5346 - protein, 30 aa, synthetic construct; identical to SEQ ID NO: 5009

SEQ ID NO: 5347 - protein, 11 aa, synthetic construct
SPKKKRKVEAS

SEQ ID NO: 5348 - protein, 16 aa, synthetic construct
MAPKKKRKVGIHRGVP

SEQ ID NO: 5349 - protein, 29 aa, synthetic construct
KRTADGSEFEKRTADGSEFESPKKKAKVE

SEQ ID NO: 5350 - protein, 10 aa, synthetic construct
KRTADGSEFE

SEQ ID NO: 5351 - protein, 19 aa, synthetic construct
KRTADGSEFESPKKKAKVE

SEQ ID NO: 5352-6000 - skipped (649 entries)

SEQ ID NO: 6001 - protein, 2090 aa, synthetic construct
MPAAKRVKLDGGDKKYSIGLDIGTNSVGWAVITDEYKVPSKKFKVLGNTDRHSIKKNLIGALLFDSGETAEATRLKRTARRRYTRRKNRICYLQEIFSNEMAKVDDSFFHRLEESFLVEEDKKHERHPIFGNIVDEVAYHEKYPTIYHLRKKLVDSTDKADLRLIYLALAHMIKFRGHFLIEGDLNPDNSDVDKLFIQLVQTYNQLFEENPINASGVDAKAILSARLSKSRRLENLIAQLPGEKKNGLFGNLIALSLGLTPNFKSNFDLAEDAKLQLSKDTYDDDLDNLLAQIGDQYADLFLAAKNLSDAILLSDILRVNTEITKAPLSASMIKRYDEHHQDLTLLKALVRQQLPEKYKEIFFDQSKNGYAGYIDGGASQEEFYKFIKPILEKMDGTEELLVKLNREDLLRKQRTFDNGSIPHQIHLGELHAILRRQEDFYPFLKDNREKIEKILTFRIPYYVGPLARGNSRFAWMTRKSEETITPWNFEEVVDKGASAQSFIERMTNFDKNLPNEKVLPKHSLLYEYFTVYNELTKVKYVTEGMRKPAFLSGEQKKAIVDLLFKTNRKVTVKQLKEDYFKKIECFDSVEISGVEDRFNASLGTYHDLLKIIKDKDFLDNEENEDILEDIVLTLTLFEDREMIEERLKTYAHLFDDKVMKQLKRRRYTGWGRLSRKLINGIRDKQSGKTILDFLKSDGFANRNFMQLIHDDSLTFKEDIQKAQVSGQGDSLHEHIANLAGSPAIKKGILQTVKVVDELVKVMGRHKPENIVIEMARENQTTQKGQKNSRERMKRIEEGIKELGSQILKEHPVENTQLQNEKLYLYYLQNGRDMYVDQELDINRLSDYDVDHIVPQSFLKDDSIDNKVLTRSDKARGKSDNVPSEEVVKKMKNYWRQLLNAKLITQRKFDNLTKAERGGLSELDKAGFIKRQLVETRQITKHVAQILDSRMNTKYDENDKLIREVKVITLKSKLVSDFRKDFQFYKVREINNYHHAHDAYLNAVVGTALIKKYPKLESEFVYGDYKVYDVRKMIAKSEQEIGKATAKYFFYSNIMNFFKTEITLANGEIRKRPLIETNGETGEIVWDKGRDFATVRKVLSMPQVNIVKKTEVQTGGFSKESILPKRNSDKLIARKKDWDPKKYGGFDSPTVAYSVLVVAKVEKGKSKKLKSVKELLGITIMERSSFEKNPIDFLEAKGYKEVKKDLIIKLPKYSLFELENGRKRMLASAGELQKGNELALPSKYVNFLYLASHYEKLKGSPEDNEQKQLFVEQHKHYLDEIIEQISEFSKRVILADANLDKVLSAYNKHRDKPIREQAENIIHLFTLTNLGAPAAFKYFDTTIDRKRYTSTKEVLDATLIHQSITGLYETRIDLSQLGGDGGGGSGGTAPLEEEYRLFLEAPIQNVTLLEQWKREIPKVWAEINPPGLASTQAPIHVQLLSTALPVRVRQYPITLEAKRSLRETIRKFRAAGILRPVHSPWNTPLLPVRKSGTSEYRMVQDLREVNKRVETIHPTVPNPYTLLSLLPPDRIWYSVLDLKDAFFCIPLAPESQLIFAFEWADAEEGESGQLTWTRLPQGFKNSPTLFNEALNRDLQGFRLDHPSVSLLQYVDDLLIAADTQAACLSATRDLLMTLAELGYRVSGKKAQLCQEEVTYLGFKIHKGSRSLSNSRTQAILQIPVPKTKRQVREFLGKIGYCRLFIPGFAELAQPLYAATRPGNDPLVWGEKEEEAFQSLKLALTQPPALALPSLDKPFQLFVEETSGAAKGVLTQALGPWKRPVAYLSKRLDPVAAGWPRCLRAIAAAALLTREASKLTFGQDIEITSSHNLESLLRSPPDKWLTNARITQYQVLLLDPPRVRFKQTAALNPATLLPETDDTLPIHHCLDTLDSLTSTRPDLTDQPLAQAEATLFTDGSSYIRDGKRYAGAAVVTLDSVIWAEPLPIGTSAQKAELIALTKALEWSKDKSVNIYTDSRYAFATLHVHGMIYRERGWLTAGGKAIKNAPEILALLTAVWLPKRVAVMHCKGHQKDDAPTSTGNRRADEVAREVAIRPLSTQATISAGKRTADGSEFEKRTADGSEFESPKKKAKVE

SEQ ID NO: 6002 - protein, 2094 aa, synthetic construct
MPAAKRVKLDGGDKKYSIGLDIGTNSVGWAVITDEYKVPSKKFKVLGNTDRHSIKKNLIGALLFDSGETAEATRLKRTARRRYTRRKNRICYLQEIFSNEMAKVDDSFFHRLEESFLVEEDKKHERHPIFGNIVDEVAYHEKYPTIYHLRKKLVDSTDKADLRLIYLALAHMIKFRGHFLIEGDLNPDNSDVDKLFIQLVQTYNQLFEENPINASGVDAKAILSARLSKSRRLENLIAQLPGEKKNGLFGNLIALSLGLTPNFKSNFDLAEDAKLQLSKDTYDDDLDNLLAQIGDQYADLFLAAKNLSDAILLSDILRVNTEITKAPLSASMIKRYDEHHQDLTLLKALVRQQLPEKYKEIFFDQSKNGYAGYIDGGASQEEFYKFIKPILEKMDGTEELLVKLNREDLLRKQRTFDNGSIPHQIHLGELHAILRRQEDFYPFLKDNREKIEKILTFRIPYYVGPLARGNSRFAWMTRKSEETITPWNFEEVVDKGASAQSFIERMTNFDKNLPNEKVLPKHSLLYEYFTVYNELTKVKYVTEGMRKPAFLSGEQKKAIVDLLFKTNRKVTVKQLKEDYFKKIECFDSVEISGVEDRFNASLGTYHDLLKIIKDKDFLDNEENEDILEDIVLTLTLFEDREMIEERLKTYAHLFDDKVMKQLKRRRYTGWGRLSRKLINGIRDKQSGKTILDFLKSDGFANRNFMQLIHDDSLTFKEDIQKAQVSGQGDSLHEHIANLAGSPAIKKGILQTVKVVDELVKVMGRHKPENIVIEMARENQTTQKGQKNSRERMKRIEEGIKELGSQILKEHPVENTQLQNEKLYLYYLQNGRDMYVDQELDINRLSDYDVDHIVPQSFLKDDSIDNKVLTRSDKARGKSDNVPSEEVVKKMKNYWRQLLNAKLITQRKFDNLTKAERGGLSELDKAGFIKRQLVETRQITKHVAQILDSRMNTKYDENDKLIREVKVITLKSKLVSDFRKDFQFYKVREINNYHHAHDAYLNAVVGTALIKKYPKLESEFVYGDYKVYDVRKMIAKSEQEIGKATAKYFFYSNIMNFFKTEITLANGEIRKRPLIETNGETGEIVWDKGRDFATVRKVLSMPQVNIVKKTEVQTGGFSKESILPKRNSDKLIARKKDWDPKKYGGFDSPTVAYSVLVVAKVEKGKSKKLKSVKELLGITIMERSSFEKNPIDFLEAKGYKEVKKDLIIKLPKYSLFELENGRKRMLASAGELQKGNELALPSKYVNFLYLASHYEKLKGSPEDNEQKQLFVEQHKHYLDEIIEQISEFSKRVILADANLDKVLSAYNKHRDKPIREQAENIIHLFTLTNLGAPAAFKYFDTTIDRKRYTSTKEVLDATLIHQSITGLYETRIDLSQLGGDGGGGSGGTVSLQDEHRLFDIPVTTSLPDVWLQDFPQAWAETGGLGRAKCQAPIIIDLKPTAVPVSIKQYPMSLEAHMGIRQHIIKFLELGVLRPCRSPWNTPLLPVKKPGTQDYRPVQDLREINKRTVDIHPTVPNPYNLLSTLKPDYSWYTVLDLKDAFFCLPLAPQSQELFAFEWKDPERGISGQLTWTRLPQGFKNSPTLFDEALHRDLTDFRTQHPEVTLLQYVDDLLLAAPTKKACTQGTRHLLQELGEKGYRASAKKAQICQTKVTYLGYILSEGKRWLTPGRIETVARIPPPRNPREVREFLGTAGFCRLWIPGFAELAAPLYALTKESTPFTWQTEHQLAFEALKKALLSAPALGLPDTSKPFTLFLDERQGIAKGVLTQKLGPWKRPVAYLSKKLDPVAAGWPPCLRIMAATAMLVKDSAKLTLGQPLTVITPHTLEAIVRQPPDRWITNARLTHYQALLLDTDRVQFGPPVTLNPATLLPVPENQPSPHDCRQVLAETHGTREDLKDQELPDADHTWYTDGSSYLDSGTRRAGAAVVDGHNTIWAQSLPPGTSAQKAELIALTKALELSKGKKANIYTDSRYAFATAHTHGSIYERRGLLTSEGKEIKNKAEIIALLKALFLPQEVAIIHCPGHQKGQDPVAVGNRQADRVARQAAMAEVLTLATEPDNTSHITAGKRTADGSEFEKRTADGSEFESPKKKAKVE

SEQ ID NO: 6003 - protein, 2079 aa, synthetic construct
MPAAKRVKLDGGDKKYSIGLDIGTNSVGWAVITDEYKVPSKKFKVLGNTDRHSIKKNLIGALLFDSGETAEATRLKRTARRRYTRRKNRICYLQEIFSNEMAKVDDSFFHRLEESFLVEEDKKHERHPIFGNIVDEVAYHEKYPTIYHLRKKLVDSTDKADLRLIYLALAHMIKFRGHFLIEGDLNPDNSDVDKLFIQLVQTYNQLFEENPINASGVDAKAILSARLSKSRRLENLIAQLPGEKKNGLFGNLIALSLGLTPNFKSNFDLAEDAKLQLSKDTYDDDLDNLLAQIGDQYADLFLAAKNLSDAILLSDILRVNTEITKAPLSASMIKRYDEHHQDLTLLKALVRQQLPEKYKEIFFDQSKNGYAGYIDGGASQEEFYKFIKPILEKMDGTEELLVKLNREDLLRKQRTFDNGSIPHQIHLGELHAILRRQEDFYPFLKDNREKIEKILTFRIPYYVGPLARGNSRFAWMTRKSEETITPWNFEEVVDKGASAQSFIERMTNFDKNLPNEKVLPKHSLLYEYFTVYNELTKVKYVTEGMRKPAFLSGEQKKAIVDLLFKTNRKVTVKQLKEDYFKKIECFDSVEISGVEDRFNASLGTYHDLLKIIKDKDFLDNEENEDILEDIVLTLTLFEDREMIEERLKTYAHLFDDKVMKQLKRRRYTGWGRLSRKLINGIRDKQSGKTILDFLKSDGFANRNFMQLIHDDSLTFKEDIQKAQVSGQGDSLHEHIANLAGSPAIKKGILQTVKVVDELVKVMGRHKPENIVIEMARENQTTQKGQKNSRERMKRIEEGIKELGSQILKEHPVENTQLQNEKLYLYYLQNGRDMYVDQELDINRLSDYDVDHIVPQSFLKDDSIDNKVLTRSDKARGKSDNVPSEEVVKKMKNYWRQLLNAKLITQRKFDNLTKAERGGLSELDKAGFIKRQLVETRQITKHVAQILDSRMNTKYDENDKLIREVKVITLKSKLVSDFRKDFQFYKVREINNYHHAHDAYLNAVVGTALIKKYPKLESEFVYGDYKVYDVRKMIAKSEQEIGKATAKYFFYSNIMNFFKTEITLANGEIRKRPLIETNGETGEIVWDKGRDFATVRKVLSMPQVNIVKKTEVQTGGFSKESILPKRNSDKLIARKKDWDPKKYGGFDSPTVAYSVLVVAKVEKGKSKKLKSVKELLGITIMERSSFEKNPIDFLEAKGYKEVKKDLIIKLPKYSLFELENGRKRMLASAGELQKGNELALPSKYVNFLYLASHYEKLKGSPEDNEQKQLFVEQHKHYLDEIIEQISEFSKRVILADANLDKVLSAYNKHRDKPIREQAENIIHLFTLTNLGAPAAFKYFDTTIDRKRYTSTKEVLDATLIHQSITGLYETRIDLSQLGGDGGGGSGGVPWILKKPLELTIKLDLEEQQGTLLNNSILSKKGKEELKQLFEKYSALWQSWENQVGHRRIRPHKIATGTVKPTPQKQYHINPKAKPDIQIVINDLLKQGVLIQKESTMNTPVYPVPKPNGRWRMVLDYRAVNKVTPLIAVQNQHSYGILGSLFKGRYKTTIDLSNGFWAHPIVPEDYWITAFTWQGKQYCWTVLPQGFLNSPGLFTGDVVDLLQGIPNVEVYVDDVYISHDSEKEHLEYLDILFNRLKEAGYIISLKKSNIANSIVDFLGFQITNEGRGLTDTFKEKLENITAPTTLKQLQSILGLLNFARNFIPDFTELIAPLYALIPKSTKNYVPWQIEHSTTLETLITKLNGAEYLQGRKGDKTLIMKVNASYTTGYIRYYNEGEKKPISYVSIVFSKTELKFTELEKLLTTVHKGLLKALDLSMGQNIHVYSPIVSMQNIQKTPQTAKKALASRWLSWLSYLEDPRIRFFYDPQMPALKDLPAVDTGKDNKKHPSNFQHIFYTDGSAITSPTKEGHLNAGMGIVYFINKDGNLQKQQEWSISLGNHTAQFAEIAAFEFALKKCLPLGGNILVVTDSNYVAKAYNEELDVWASNGFVNNRKKPLKHISKWKSVADLKRLRPDVVVTHEPGHQKLDSSPHAYGNNLADQLATQASFKVHAGKRTADGSEFEKRTADGSEFESPKKKAKVE

SEQ ID NO: 6004 - protein, 2087 aa, synthetic construct
MPAAKRVKLDGGDKKYSIGLDIGTNSVGWAVITDEYKVPSKKFKVLGNTDRHSIKKNLIGALLFDSGETAEATRLKRTARRRYTRRKNRICYLQEIFSNEMAKVDDSFFHRLEESFLVEEDKKHERHPIFGNIVDEVAYHEKYPTIYHLRKKLVDSTDKADLRLIYLALAHMIKFRGHFLIEGDLNPDNSDVDKLFIQLVQTYNQLFEENPINASGVDAKAILSARLSKSRRLENLIAQLPGEKKNGLFGNLIALSLGLTPNFKSNFDLAEDAKLQLSKDTYDDDLDNLLAQIGDQYADLFLAAKNLSDAILLSDILRVNTEITKAPLSASMIKRYDEHHQDLTLLKALVRQQLPEKYKEIFFDQSKNGYAGYIDGGASQEEFYKFIKPILEKMDGTEELLVKLNREDLLRKQRTFDNGSIPHQIHLGELHAILRRQEDFYPFLKDNREKIEKILTFRIPYYVGPLARGNSRFAWMTRKSEETITPWNFEEVVDKGASAQSFIERMTNFDKNLPNEKVLPKHSLLYEYFTVYNELTKVKYVTEGMRKPAFLSGEQKKAIVDLLFKTNRKVTVKQLKEDYFKKIECFDSVEISGVEDRFNASLGTYHDLLKIIKDKDFLDNEENEDILEDIVLTLTLFEDREMIEERLKTYAHLFDDKVMKQLKRRRYTGWGRLSRKLINGIRDKQSGKTILDFLKSDGFANRNFMQLIHDDSLTFKEDIQKAQVSGQGDSLHEHIANLAGSPAIKKGILQTVKVVDELVKVMGRHKPENIVIEMARENQTTQKGQKNSRERMKRIEEGIKELGSQILKEHPVENTQLQNEKLYLYYLQNGRDMYVDQELDINRLSDYDVDHIVPQSFLKDDSIDNKVLTRSDKARGKSDNVPSEEVVKKMKNYWRQLLNAKLITQRKFDNLTKAERGGLSELDKAGFIKRQLVETRQITKHVAQILDSRMNTKYDENDKLIREVKVITLKSKLVSDFRKDFQFYKVREINNYHHAHDAYLNAVVGTALIKKYPKLESEFVYGDYKVYDVRKMIAKSEQEIGKATAKYFFYSNIMNFFKTEITLANGEIRKRPLIETNGETGEIVWDKGRDFATVRKVLSMPQVNIVKKTEVQTGGFSKESILPKRNSDKLIARKKDWDPKKYGGFDSPTVAYSVLVVAKVEKGKSKKLKSVKELLGITIMERSSFEKNPIDFLEAKGYKEVKKDLIIKLPKYSLFELENGRKRMLASAGELQKGNELALPSKYVNFLYLASHYEKLKGSPEDNEQKQLFVEQHKHYLDEIIEQISEFSKRVILADANLDKVLSAYNKHRDKPIREQAENIIHLFTLTNLGAPAAFKYFDTTIDRKRYTSTKEVLDATLIHQSITGLYETRIDLSQLGGDGGGGSGGTLQLEEEYRLFEPESTQKQEMDIWLKNFPQAWAETGGMGTAHCQAPVLIQLKATATPISIRQYPMPHEAYQGIKPHIRRMLDQGILKPCQSPWNTPLLPVKKPGTEDYRPVQDLREVNKRVEDIHPTVPNPYNLLSTLPPSHPWYTVLDLKDAFFCLRLHSESQLLFAFEWRDPEIGLSGQLTWTRLPQGFKNSPTLFNEALHSDLADFRVRYPALVLLQYVDDLLLAAATRTECLEGTKALLETLGNKGYRASAKKAQICLQEVTYLGYSLKDGQRWLTKARKEAILSIPVPKNSRQVREFLGKAGYCRLFIPGFAELAAPLYPLTRPGTLFQWGTEQQLAFEDIKKALLSSPALGLPDITKPFELFIDENSGFAKGVLVQKLGPWKRPVAYLSKKLDTVASGWPPCLRMVAAIAILVKDAGKLTLGQPLTILTSHPVEALVRQPPNKWLSNARMTHYQAMLLDAERVHFGPTVSLNPATLLPLPSGGNHHDCLQILAETHGTRPDLTDQPLPDADLTWYTDGSSFIRNGEREAGAAVTTESEVIWAAPLPPGTSAQRAELIALTQALKMAEGKKLTVYTDSRYAFATTHVHGEIYRRRGWLTSEGKEIKNKNEILALLEALFLPKRLSIIHCPGHQKGDSPQAKGNRLADDTAKKAATETHSSLTVLPAGKRTADGSEFEKRTADGSEFESPKKKAKVE

SEQ ID NO: 6005 - protein, 2079 aa, synthetic construct
MPAAKRVKLDGGDKKYSIGLDIGTNSVGWAVITDEYKVPSKKFKVLGNTDRHSIKKNLIGALLFDSGETAEATRLKRTARRRYTRRKNRICYLQEIFSNEMAKVDDSFFHRLEESFLVEEDKKHERHPIFGNIVDEVAYHEKYPTIYHLRKKLVDSTDKADLRLIYLALAHMIKFRGHFLIEGDLNPDNSDVDKLFIQLVQTYNQLFEENPINASGVDAKAILSARLSKSRRLENLIAQLPGEKKNGLFGNLIALSLGLTPNFKSNFDLAEDAKLQLSKDTYDDDLDNLLAQIGDQYADLFLAAKNLSDAILLSDILRVNTEITKAPLSASMIKRYDEHHQDLTLLKALVRQQLPEKYKEIFFDQSKNGYAGYIDGGASQEEFYKFIKPILEKMDGTEELLVKLNREDLLRKQRTFDNGSIPHQIHLGELHAILRRQEDFYPFLKDNREKIEKILTFRIPYYVGPLARGNSRFAWMTRKSEETITPWNFEEVVDKGASAQSFIERMTNFDKNLPNEKVLPKHSLLYEYFTVYNELTKVKYVTEGMRKPAFLSGEQKKAIVDLLFKTNRKVTVKQLKEDYFKKIECFDSVEISGVEDRFNASLGTYHDLLKIIKDKDFLDNEENEDILEDIVLTLTLFEDREMIEERLKTYAHLFDDKVMKQLKRRRYTGWGRLSRKLINGIRDKQSGKTILDFLKSDGFANRNFMQLIHDDSLTFKEDIQKAQVSGQGDSLHEHIANLAGSPAIKKGILQTVKVVDELVKVMGRHKPENIVIEMARENQTTQKGQKNSRERMKRIEEGIKELGSQILKEHPVENTQLQNEKLYLYYLQNGRDMYVDQELDINRLSDYDVDHIVPQSFLKDDSIDNKVLTRSDKARGKSDNVPSEEVVKKMKNYWRQLLNAKLITQRKFDNLTKAERGGLSELDKAGFIKRQLVETRQITKHVAQILDSRMNTKYDENDKLIREVKVITLKSKLVSDFRKDFQFYKVREINNYHHAHDAYLNAVVGTALIKKYPKLESEFVYGDYKVYDVRKMIAKSEQEIGKATAKYFFYSNIMNFFKTEITLANGEIRKRPLIETNGETGEIVWDKGRDFATVRKVLSMPQVNIVKKTEVQTGGFSKESILPKRNSDKLIARKKDWDPKKYGGFDSPTVAYSVLVVAKVEKGKSKKLKSVKELLGITIMERSSFEKNPIDFLEAKGYKEVKKDLIIKLPKYSLFELENGRKRMLASAGELQKGNELALPSKYVNFLYLASHYEKLKGSPEDNEQKQLFVEQHKHYLDEIIEQISEFSKRVILADANLDKVLSAYNKHRDKPIREQAENIIHLFTLTNLGAPAAFKYFDTTIDRKRYTSTKEVLDATLIHQSITGLYETRIDLSQLGGDGGGGSGGVPWLTQQPLQLTILVPLQEYQEKILSKTALPEDQKQQLKTLFVKYDNLWQHWENQVGHRKIRPHNIATGDYPPRPQKQYPINPKAKPSIQIVIDDLLKQGVLTPQNSTMNTPVYPVPKPDGRWRMVLDYREVNKTIPLTAAQNQHSAGILATIVRQKYKTTLDLANGFWAHPITPESYWLTAFTWQGKQYCWTRLPQGFLNSPALFNADVVDLLKEIPNVQVYVDDIYLSHDDPKEHVQQLEKVFQILLQAGYVVSLKKSEIGQKTVEFLGFNITKEGRGLTDTFKTKLLNITPPKDLKQLQSILGKLNFARNFIPNFAELVQPLYNLIAPAKGKYIEWSEENTKQLNMVIEALNTASNLEERLPEQRLVIKVNTSPSAGYVRYYNETGKKPIMYLNYVFSKAELKFSMLEKLLTTMHKALIKAMDLAMGQEILVYSPIVSMTKIQKTPLPERKALPIRWITWMTYLEDPRIQFHYDKTLPELKHIPDVYTSSQSPVKHPSQYEGVFYTDGSAIKSPDPTKSNNAGMGIVHATYKPEYQVLNQWSIPLGNHTAQMAEIAAVEFACKKALKIPGPVLVITDSFYVAESANKELPYWKSNGFVNNKKKPLKHISKWKSIAECLSMKPDITIQHEKGISLQIPVFILKGNALADKLATQGSYVVNAGKRTADGSEFEKRTADGSEFESPKKKAKVE

SEQ ID NO: 6006 - protein, 2210 aa, synthetic construct
MPAAKRVKLDGGDKKYSIGLDIGTNSVGWAVITDEYKVPSKKFKVLGNTDRHSIKKNLIGALLFDSGETAEATRLKRTARRRYTRRKNRICYLQEIFSNEMAKVDDSFFHRLEESFLVEEDKKHERHPIFGNIVDEVAYHEKYPTIYHLRKKLVDSTDKADLRLIYLALAHMIKFRGHFLIEGDLNPDNSDVDKLFIQLVQTYNQLFEENPINASGVDAKAILSARLSKSRRLENLIAQLPGEKKNGLFGNLIALSLGLTPNFKSNFDLAEDAKLQLSKDTYDDDLDNLLAQIGDQYADLFLAAKNLSDAILLSDILRVNTEITKAPLSASMIKRYDEHHQDLTLLKALVRQQLPEKYKEIFFDQSKNGYAGYIDGGASQEEFYKFIKPILEKMDGTEELLVKLNREDLLRKQRTFDNGSIPHQIHLGELHAILRRQEDFYPFLKDNREKIEKILTFRIPYYVGPLARGNSRFAWMTRKSEETITPWNFEEVVDKGASAQSFIERMTNFDKNLPNEKVLPKHSLLYEYFTVYNELTKVKYVTEGMRKPAFLSGEQKKAIVDLLFKTNRKVTVKQLKEDYFKKIECFDSVEISGVEDRFNASLGTYHDLLKIIKDKDFLDNEENEDILEDIVLTLTLFEDREMIEERLKTYAHLFDDKVMKQLKRRRYTGWGRLSRKLINGIRDKQSGKTILDFLKSDGFANRNFMQLIHDDSLTFKEDIQKAQVSGQGDSLHEHIANLAGSPAIKKGILQTVKVVDELVKVMGRHKPENIVIEMARENQTTQKGQKNSRERMKRIEEGIKELGSQILKEHPVENTQLQNEKLYLYYLQNGRDMYVDQELDINRLSDYDVDHIVPQSFLKDDSIDNKVLTRSDKARGKSDNVPSEEVVKKMKNYWRQLLNAKLITQRKFDNLTKAERGGLSELDKAGFIKRQLVETRQITKHVAQILDSRMNTKYDENDKLIREVKVITLKSKLVSDFRKDFQFYKVREINNYHHAHDAYLNAVVGTALIKKYPKLESEFVYGDYKVYDVRKMIAKSEQEIGKATAKYFFYSNIMNFFKTEITLANGEIRKRPLIETNGETGEIVWDKGRDFATVRKVLSMPQVNIVKKTEVQTGGFSKESILPKRNSDKLIARKKDWDPKKYGGFDSPTVAYSVLVVAKVEKGKSKKLKSVKELLGITIMERSSFEKNPIDFLEAKGYKEVKKDLIIKLPKYSLFELENGRKRMLASAGELQKGNELALPSKYVNFLYLASHYEKLKGSPEDNEQKQLFVEQHKHYLDEIIEQISEFSKRVILADANLDKVLSAYNKHRDKPIREQAENIIHLFTLTNLGAPAAFKYFDTTIDRKRYTSTKEVLDATLIHQSITGLYETRIDLSQLGGDGGGGSGGTLGDQGSRGSDPLPEPRVTLTVEGIPTEFLVNTGAEHSVLTKPMGKMGSKRTVVAGATGSKVYPWTTKRLLKIGQKQVTHSFLVIPECPAPLLGRDLLTKLKAQIQFSTEGPQVTWEDRPAMCLVLNLEEEYRLHEKPVPPSIDPSWLQLFPMVWAEKAGMGLANQVPPVVVELKSDASPVAVRQYPMSKEAREGIRPHIQRFLDLGILVPCQSPWNTPLLPVKKPGTNDYRPVQDLREVNKRVQDIHPTVPNPYNLLSSLPPSHTWYSVLDLKDAFFCLKLHPNSQPLFAFEWRDPEKGNTGQLTWTRLPQGFKNSPTLFDEALHRDLASFRALNPQVVMLQYVDDLLVAAPTYRDCKEGTRRLLQELSKLGYRVSAKKAQLCREEVTYLGYLLKGGKRWLTPARKATVMKIPTPTTPRQVREFLGTAGFCRLWIPGFASLAAPLYPLTREKVPFTWTEAHQEAFGRIKEALLSAPALALPDLTKPFALYVDEKEGVARGVLTQTLGPWRRPVAYLSKKLDPVASGWPTCLKAIAAVALLLKDADKLTLGQNVLVIAPHNLESIVRQPPDRWMTNARMTHYQSLLLNERVSFAPPAILNPATLLPVESDDTPIHICSEILAEETGTRPDLRDQPLPGVPAWYTDGSSFIMDGRRQAGAAIVDNKRTVWASNLPEGTSAQKAELIALTQALRLAEGKSINIYTDSRYAFATAHVHGAIYKQRGLLTSAGKDIKNKEEILALLEAIHLPKRVAIIHCPGHQRGTDPVATGNRKADEAAKQAAQSTRILTETTKNAGKRTADGSEFEKRTADGSEFESPKKKAKVE

SEQ ID NO: 6007 - protein, 2210 aa, synthetic construct
MPAAKRVKLDGGDKKYSIGLDIGTNSVGWAVITDEYKVPSKKFKVLGNTDRHSIKKNLIGALLFDSGETAEATRLKRTARRRYTRRKNRICYLQEIFSNEMAKVDDSFFHRLEESFLVEEDKKHERHPIFGNIVDEVAYHEKYPTIYHLRKKLVDSTDKADLRLIYLALAHMIKFRGHFLIEGDLNPDNSDVDKLFIQLVQTYNQLFEENPINASGVDAKAILSARLSKSRRLENLIAQLPGEKKNGLFGNLIALSLGLTPNFKSNFDLAEDAKLQLSKDTYDDDLDNLLAQIGDQYADLFLAAKNLSDAILLSDILRVNTEITKAPLSASMIKRYDEHHQDLTLLKALVRQQLPEKYKEIFFDQSKNGYAGYIDGGASQEEFYKFIKPILEKMDGTEELLVKLNREDLLRKQRTFDNGSIPHQIHLGELHAILRRQEDFYPFLKDNREKIEKILTFRIPYYVGPLARGNSRFAWMTRKSEETITPWNFEEVVDKGASAQSFIERMTNFDKNLPNEKVLPKHSLLYEYFTVYNELTKVKYVTEGMRKPAFLSGEQKKAIVDLLFKTNRKVTVKQLKEDYFKKIECFDSVEISGVEDRFNASLGTYHDLLKIIKDKDFLDNEENEDILEDIVLTLTLFEDREMIEERLKTYAHLFDDKVMKQLKRRRYTGWGRLSRKLINGIRDKQSGKTILDFLKSDGFANRNFMQLIHDDSLTFKEDIQKAQVSGQGDSLHEHIANLAGSPAIKKGILQTVKVVDELVKVMGRHKPENIVIEMARENQTTQKGQKNSRERMKRIEEGIKELGSQILKEHPVENTQLQNEKLYLYYLQNGRDMYVDQELDINRLSDYDVDHIVPQSFLKDDSIDNKVLTRSDKARGKSDNVPSEEVVKKMKNYWRQLLNAKLITQRKFDNLTKAERGGLSELDKAGFIKRQLVETRQITKHVAQILDSRMNTKYDENDKLIREVKVITLKSKLVSDFRKDFQFYKVREINNYHHAHDAYLNAVVGTALIKKYPKLESEFVYGDYKVYDVRKMIAKSEQEIGKATAKYFFYSNIMNFFKTEITLANGEIRKRPLIETNGETGEIVWDKGRDFATVRKVLSMPQVNIVKKTEVQTGGFSKESILPKRNSDKLIARKKDWDPKKYGGFDSPTVAYSVLVVAKVEKGKSKKLKSVKELLGITIMERSSFEKNPIDFLEAKGYKEVKKDLIIKLPKYSLFELENGRKRMLASAGELQKGNELALPSKYVNFLYLASHYEKLKGSPEDNEQKQLFVEQHKHYLDEIIEQISEFSKRVILADANLDKVLSAYNKHRDKPIREQAENIIHLFTLTNLGAPAAFKYFDTTIDRKRYTSTKEVLDATLIHQSITGLYETRIDLSQLGGDGGGGSGGTLGDQGSRGSDPLPEPRVTLTVEGIPTEFLVNTGAEHSVLTKPMGKMGSKRTVVAGATGSKVYPWTTKRLLKIGQKQVTHSFLVIPECPAPLLGRDLLTKLKAQIQFSTEGPQVTWEDRPAMCLVLNLEEEYRLHEKPVPPSIDPSWLQLFPMVWAEKAGMGLANQVPPVVVELKSDASPVAVRQYPMSKEAREGIRPHIQRFLDLGILVPCQSPWNTPLLPVKKPGTNDYRPVQDLREVNKRVQDIHPTVPNPYNLLSSLPPSHTWYSVLDLKDAFFCLKLHPNSQPLFAFEWRDPEKGNTGQLTWTRLPQGFKNSPTLFNEALHRDLASFRALNPQVVMLQYVDDLLVAAPTYRDCKEGTRRLLQELSKLGYRVSAKKAQLCREEVTYLGYLLKGGKRWLTPARKATVMKIPTPTTPRQVREFLGTAGFCRLWIPGFASLAAPLYPLTRPKVPFTWTEAHQEAFGRIKEALLSAPALALPDLTKPFALYVDEKEGVARGVLTQTLGPWRRPVAYLSKKLDPVASGWPTCLKAIAAVALLLKDADKLTLGQNVLVIAPHNLESIVRQPPDRWMTNARMTHYQSLLLNERVSFAPPAILNPATLLPVESDDTPIHICSEILAEETGTRPDLRDQPLPGVPAWYTDGSSFIMDGRRQAGAAIVDNKRTVWASNLPEGTSAQKAELIALTQALRLAEGKSINIYTDSRYAFATAHVHGAIYKQRGWLTSAGKDIKNKEEILALLEAIHLPKRVAIIHCPGHQRGTDPVATGNRKADEAAKQAAQSTRILTETTKNAGKRTADGSEFEKRTADGSEFESPKKKAKVE

SEQ ID NO: 6008 - protein, 2088 aa, synthetic construct
MPAAKRVKLDGGDKKYSIGLDIGTNSVGWAVITDEYKVPSKKFKVLGNTDRHSIKKNLIGALLFDSGETAEATRLKRTARRRYTRRKNRICYLQEIFSNEMAKVDDSFFHRLEESFLVEEDKKHERHPIFGNIVDEVAYHEKYPTIYHLRKKLVDSTDKADLRLIYLALAHMIKFRGHFLIEGDLNPDNSDVDKLFIQLVQTYNQLFEENPINASGVDAKAILSARLSKSRRLENLIAQLPGEKKNGLFGNLIALSLGLTPNFKSNFDLAEDAKLQLSKDTYDDDLDNLLAQIGDQYADLFLAAKNLSDAILLSDILRVNTEITKAPLSASMIKRYDEHHQDLTLLKALVRQQLPEKYKEIFFDQSKNGYAGYIDGGASQEEFYKFIKPILEKMDGTEELLVKLNREDLLRKQRTFDNGSIPHQIHLGELHAILRRQEDFYPFLKDNREKIEKILTFRIPYYVGPLARGNSRFAWMTRKSEETITPWNFEEVVDKGASAQSFIERMTNFDKNLPNEKVLPKHSLLYEYFTVYNELTKVKYVTEGMRKPAFLSGEQKKAIVDLLFKTNRKVTVKQLKEDYFKKIECFDSVEISGVEDRFNASLGTYHDLLKIIKDKDFLDNEENEDILEDIVLTLTLFEDREMIEERLKTYAHLFDDKVMKQLKRRRYTGWGRLSRKLINGIRDKQSGKTILDFLKSDGFANRNFMQLIHDDSLTFKEDIQKAQVSGQGDSLHEHIANLAGSPAIKKGILQTVKVVDELVKVMGRHKPENIVIEMARENQTTQKGQKNSRERMKRIEEGIKELGSQILKEHPVENTQLQNEKLYLYYLQNGRDMYVDQELDINRLSDYDVDHIVPQSFLKDDSIDNKVLTRSDKARGKSDNVPSEEVVKKMKNYWRQLLNAKLITQRKFDNLTKAERGGLSELDKAGFIKRQLVETRQITKHVAQILDSRMNTKYDENDKLIREVKVITLKSKLVSDFRKDFQFYKVREINNYHHAHDAYLNAVVGTALIKKYPKLESEFVYGDYKVYDVRKMIAKSEQEIGKATAKYFFYSNIMNFFKTEITLANGEIRKRPLIETNGETGEIVWDKGRDFATVRKVLSMPQVNIVKKTEVQTGGFSKESILPKRNSDKLIARKKDWDPKKYGGFDSPTVAYSVLVVAKVEKGKSKKLKSVKELLGITIMERSSFEKNPIDFLEAKGYKEVKKDLIIKLPKYSLFELENGRKRMLASAGELQKGNELALPSKYVNFLYLASHYEKLKGSPEDNEQKQLFVEQHKHYLDEIIEQISEFSKRVILADANLDKVLSAYNKHRDKPIREQAENIIHLFTLTNLGAPAAFKYFDTTIDRKRYTSTKEVLDATLIHQSITGLYETRIDLSQLGGDGGGGSGGTLNLEDEYRLYETSAEPEVSPGSTWLSDFPQAWAETGGMGLAVRQAPLIIPLKATSTPVSIKQYPMSQEAKLGIKPHIQRLLDQGILVPCQSPWNTPLLPVKKPGTNDYRPVQDLREVNKRVEDIHPTVPNPYNLLSGLPPSHRWYTVLDLKDAFFCLRLHPTSQPLFAFEWRDPGMGISGQLTWTRLPQGFKNSPTLFNEALHRDLADFRIQHPDLILLQYVDDILLAATSELDCQQGTRALLLTLGNLGYRASAKKAQLCQKQVKYLGYLLKEGQRWLTEARKETVMGQPTPKTPRQLREFLGKAGFCRLFIPGFAEMAAPLYPLTKPGTLFNWGPDQQKAYQEIKQALLTAPALGLPDLTKPFELFVDEKQGYAKGVLTQKLGPWRRPVAYLSKKLDPVAAGWPPCLRMVAAIAVLRKDAGKLTMGQPLVILAPHAVEALVKQPPDRWLSNARMTHYQAMLLDTDRVQFGPVVALNPATLLPLPEEGAPHDCLEILAETHGTRPDLTDQPIPDADHTWYTDGSSFLQEGQRKAGAAVTTETEVIWARALPAGTSAQRAELIALTQALKMAEGKRLNVYTDSRYAFATAHIHGEIYRRRGWLTSEGREIKNKSEILALLKALFLPKRLSIIHCLGHQKGDSAEARGNRLADQAAREAAIKTPPDTSTLLAGKRTADGSEFEKRTADGSEFESPKKKAKVE

SEQ ID NO: 6009 - protein, 2088 aa, synthetic construct
MPAAKRVKLDGGDKKYSIGLDIGTNSVGWAVITDEYKVPSKKFKVLGNTDRHSIKKNLIGALLFDSGETAEATRLKRTARRRYTRRKNRICYLQEIFSNEMAKVDDSFFHRLEESFLVEEDKKHERHPIFGNIVDEVAYHEKYPTIYHLRKKLVDSTDKADLRLIYLALAHMIKFRGHFLIEGDLNPDNSDVDKLFIQLVQTYNQLFEENPINASGVDAKAILSARLSKSRRLENLIAQLPGEKKNGLFGNLIALSLGLTPNFKSNFDLAEDAKLQLSKDTYDDDLDNLLAQIGDQYADLFLAAKNLSDAILLSDILRVNTEITKAPLSASMIKRYDEHHQDLTLLKALVRQQLPEKYKEIFFDQSKNGYAGYIDGGASQEEFYKFIKPILEKMDGTEELLVKLNREDLLRKQRTFDNGSIPHQIHLGELHAILRRQEDFYPFLKDNREKIEKILTFRIPYYVGPLARGNSRFAWMTRKSEETITPWNFEEVVDKGASAQSFIERMTNFDKNLPNEKVLPKHSLLYEYFTVYNELTKVKYVTEGMRKPAFLSGEQKKAIVDLLFKTNRKVTVKQLKEDYFKKIECFDSVEISGVEDRFNASLGTYHDLLKIIKDKDFLDNEENEDILEDIVLTLTLFEDREMIEERLKTYAHLFDDKVMKQLKRRRYTGWGRLSRKLINGIRDKQSGKTILDFLKSDGFANRNFMQLIHDDSLTFKEDIQKAQVSGQGDSLHEHIANLAGSPAIKKGILQTVKVVDELVKVMGRHKPENIVIEMARENQTTQKGQKNSRERMKRIEEGIKELGSQILKEHPVENTQLQNEKLYLYYLQNGRDMYVDQELDINRLSDYDVDHIVPQSFLKDDSIDNKVLTRSDKARGKSDNVPSEEVVKKMKNYWRQLLNAKLITQRKFDNLTKAERGGLSELDKAGFIKRQLVETRQITKHVAQILDSRMNTKYDENDKLIREVKVITLKSKLVSDFRKDFQFYKVREINNYHHAHDAYLNAVVGTALIKKYPKLESEFVYGDYKVYDVRKMIAKSEQEIGKATAKYFFYSNIMNFFKTEITLANGEIRKRPLIETNGETGEIVWDKGRDFATVRKVLSMPQVNIVKKTEVQTGGFSKESILPKRNSDKLIARKKDWDPKKYGGFDSPTVAYSVLVVAKVEKGKSKKLKSVKELLGITIMERSSFEKNPIDFLEAKGYKEVKKDLIIKLPKYSLFELENGRKRMLASAGELQKGNELALPSKYVNFLYLASHYEKLKGSPEDNEQKQLFVEQHKHYLDEIIEQISEFSKRVILADANLDKVLSAYNKHRDKPIREQAENIIHLFTLTNLGAPAAFKYFDTTIDRKRYTSTKEVLDATLIHQSITGLYETRIDLSQLGGDGGGGSGGTLGIEDEYRLHETSTEPDVSLGSTWLSDFPQAWAETGGMGLAVRQAPLIIPLKATSTPVSIQQYPMSHEARLGIKPHIQRLLDQGILVPCQSPWNTPLLPVKKPGTNDYRPVQDLREVNKRVEDIHPTVPNPYNLLSGLPPSHQWYTVLDLKDAFFCLRLHPTSQPLFAFEWRDPGMGISGQLTWTRLPQGFKNSPTLFNEALHRDLADFRIQHPDLILLQYVDDILLAATSELDCQQGTRALLQTLGDLGYRASAKKAQICQKQVKYLGYLLREGQRWLTEARKETVMGQPVPKTPRQLREFLGTAGFCRLWIPGFAEMAAPLYPLTKPGTLFSWGPDQQKAYQEIKQALLTAPALGLPDLTKPFELFVDEKQGYAKGVLTQKLGPWRRPVAYLSKKLDPVAAGWPPCLRMVAAIAVLTKDAGKLTMGQPLVILAPHAVEALVKQPPDRWLSNARMTHYQAMLLDTDRVQFGPVVALNPATLLPLPEEGAPHDCLEILAETHGTRPDLTDQPIPDADHTWYTDGSSFLQEGQRKAGAAVTTETEVIWAGALPAGTSAQRAELIALTQALKMAEGKRLNVYTDSRYAFATAHIHGEIYRRRGWLTSEGREIKNKSEILALLKALFLPKRLSIIHCLGHQKGDSAEARGNRLADQAAREAAIKTPPDTSTLLAGKRTADGSEFEKRTADGSEFESPKKKAKVE

SEQ ID NO: 6010 - protein, 2088 aa, synthetic construct
MPAAKRVKLDGGDKKYSIGLDIGTNSVGWAVITDEYKVPSKKFKVLGNTDRHSIKKNLIGALLFDSGETAEATRLKRTARRRYTRRKNRICYLQEIFSNEMAKVDDSFFHRLEESFLVEEDKKHERHPIFGNIVDEVAYHEKYPTIYHLRKKLVDSTDKADLRLIYLALAHMIKFRGHFLIEGDLNPDNSDVDKLFIQLVQTYNQLFEENPINASGVDAKAILSARLSKSRRLENLIAQLPGEKKNGLFGNLIALSLGLTPNFKSNFDLAEDAKLQLSKDTYDDDLDNLLAQIGDQYADLFLAAKNLSDAILLSDILRVNTEITKAPLSASMIKRYDEHHQDLTLLKALVRQQLPEKYKEIFFDQSKNGYAGYIDGGASQEEFYKFIKPILEKMDGTEELLVKLNREDLLRKQRTFDNGSIPHQIHLGELHAILRRQEDFYPFLKDNREKIEKILTFRIPYYVGPLARGNSRFAWMTRKSEETITPWNFEEVVDKGASAQSFIERMTNFDKNLPNEKVLPKHSLLYEYFTVYNELTKVKYVTEGMRKPAFLSGEQKKAIVDLLFKTNRKVTVKQLKEDYFKKIECFDSVEISGVEDRFNASLGTYHDLLKIIKDKDFLDNEENEDILEDIVLTLTLFEDREMIEERLKTYAHLFDDKVMKQLKRRRYTGWGRLSRKLINGIRDKQSGKTILDFLKSDGFANRNFMQLIHDDSLTFKEDIQKAQVSGQGDSLHEHIANLAGSPAIKKGILQTVKVVDELVKVMGRHKPENIVIEMARENQTTQKGQKNSRERMKRIEEGIKELGSQILKEHPVENTQLQNEKLYLYYLQNGRDMYVDQELDINRLSDYDVDHIVPQSFLKDDSIDNKVLTRSDKARGKSDNVPSEEVVKKMKNYWRQLLNAKLITQRKFDNLTKAERGGLSELDKAGFIKRQLVETRQITKHVAQILDSRMNTKYDENDKLIREVKVITLKSKLVSDFRKDFQFYKVREINNYHHAHDAYLNAVVGTALIKKYPKLESEFVYGDYKVYDVRKMIAKSEQEIGKATAKYFFYSNIMNFFKTEITLANGEIRKRPLIETNGETGEIVWDKGRDFATVRKVLSMPQVNIVKKTEVQTGGFSKESILPKRNSDKLIARKKDWDPKKYGGFDSPTVAYSVLVVAKVEKGKSKKLKSVKELLGITIMERSSFEKNPIDFLEAKGYKEVKKDLIIKLPKYSLFELENGRKRMLASAGELQKGNELALPSKYVNFLYLASHYEKLKGSPEDNEQKQLFVEQHKHYLDEIIEQISEFSKRVILADANLDKVLSAYNKHRDKPIREQAENIIHLFTLTNLGAPAAFKYFDTTIDRKRYTSTKEVLDATLIHQSITGLYETRIDLSQLGGDGGGGSGGTLNIEDEYRLHETSKEPDVSLGSTWLSDFPQAWAETGGMGLAVRQAPLIIPLKATSTPVSIKQYPMSQEARLGIKPHIQRLLDQGILVPCQSPWNTPLLPVKKPGTNDYRPVQDLREVNKRVEDIHPTVPNPYNLLSGLPPSHQWYTVLDLKDAFFCLRLHPTSQPLFAFEWRDPEMGISGQLTWTRLPQGFKNSPTLFNEALHRDLAGFRIQHPDLILLQYVDDLLLAATSELDCQQGTRALLQTLGDLGYRASAKKAQICQKQVKYLGYLLKEGQRWLTEARKETVMGQPIPKTPRQLREFLGTAGFCRLWIPGFAEMAAPLYPLTKPGTLFNWGPDQQKAFQEIKQALLTAPALGLPDLTKPFELFVDEKQGYAKGVLTQKLGPWRRPVAYLSKKLDPVAAGWPPCLRMVAAIAVLTKDAGKLTMGQPLVILAPHAVEALVKQPPDRWLSNARMTHYQALLLDTDRVQFGPVVALNPATLLPLPEEGLQHDCLDILAEAHGTRSDLMDQPLPDADHTWYTDGSSFLQEGQRKAGAAVTTETEVIWARALPAGTSAQRAELIALTQALKMAEGKKLNVYTDSRYAFATAHIHGEIYRRRGWLTSEGKEIKNKDEILALLKALFLPKRLSIIHCPGHQKGNSAEARGNRMADQAAREVATRETPETSTLLAGKRTADGSEFEKRTADGSEFESPKKKAKVE

SEQ ID NO: 6011 - protein, 2088 aa, synthetic construct
MPAAKRVKLDGGDKKYSIGLDIGTNSVGWAVITDEYKVPSKKFKVLGNTDRHSIKKNLIGALLFDSGETAEATRLKRTARRRYTRRKNRICYLQEIFSNEMAKVDDSFFHRLEESFLVEEDKKHERHPIFGNIVDEVAYHEKYPTIYHLRKKLVDSTDKADLRLIYLALAHMIKFRGHFLIEGDLNPDNSDVDKLFIQLVQTYNQLFEENPINASGVDAKAILSARLSKSRRLENLIAQLPGEKKNGLFGNLIALSLGLTPNFKSNFDLAEDAKLQLSKDTYDDDLDNLLAQIGDQYADLFLAAKNLSDAILLSDILRVNTEITKAPLSASMIKRYDEHHQDLTLLKALVRQQLPEKYKEIFFDQSKNGYAGYIDGGASQEEFYKFIKPILEKMDGTEELLVKLNREDLLRKQRTFDNGSIPHQIHLGELHAILRRQEDFYPFLKDNREKIEKILTFRIPYYVGPLARGNSRFAWMTRKSEETITPWNFEEVVDKGASAQSFIERMTNFDKNLPNEKVLPKHSLLYEYFTVYNELTKVKYVTEGMRKPAFLSGEQKKAIVDLLFKTNRKVTVKQLKEDYFKKIECFDSVEISGVEDRFNASLGTYHDLLKIIKDKDFLDNEENEDILEDIVLTLTLFEDREMIEERLKTYAHLFDDKVMKQLKRRRYTGWGRLSRKLINGIRDKQSGKTILDFLKSDGFANRNFMQLIHDDSLTFKEDIQKAQVSGQGDSLHEHIANLAGSPAIKKGILQTVKVVDELVKVMGRHKPENIVIEMARENQTTQKGQKNSRERMKRIEEGIKELGSQILKEHPVENTQLQNEKLYLYYLQNGRDMYVDQELDINRLSDYDVDHIVPQSFLKDDSIDNKVLTRSDKARGKSDNVPSEEVVKKMKNYWRQLLNAKLITQRKFDNLTKAERGGLSELDKAGFIKRQLVETRQITKHVAQILDSRMNTKYDENDKLIREVKVITLKSKLVSDFRKDFQFYKVREINNYHHAHDAYLNAVVGTALIKKYPKLESEFVYGDYKVYDVRKMIAKSEQEIGKATAKYFFYSNIMNFFKTEITLANGEIRKRPLIETNGETGEIVWDKGRDFATVRKVLSMPQVNIVKKTEVQTGGFSKESILPKRNSDKLIARKKDWDPKKYGGFDSPTVAYSVLVVAKVEKGKSKKLKSVKELLGITIMERSSFEKNPIDFLEAKGYKEVKKDLIIKLPKYSLFELENGRKRMLASAGELQKGNELALPSKYVNFLYLASHYEKLKGSPEDNEQKQLFVEQHKHYLDEIIEQISEFSKRVILADANLDKVLSAYNKHRDKPIREQAENIIHLFTLTNLGAPAAFKYFDTTIDRKRYTSTKEVLDATLIHQSITGLYETRIDLSQLGGDGGGGSGGTLNIEDEYRLHETSKGPDVPLGSTWLSDFPQAWAETGGMGLAVRQAPLIIPLKATSTPVSIKQYPMSQEARLGIKPHIQRLLDQGILVPCQSPWNTPLLPVKKPGTNDYRPVQDLREVNKRVEDIHPTVPNPYNLLSGLPPSHQWYTVLDLKDAFFCLRLHPTSQSLFAFEWRDPEMGISGQLTWTRLPQGFKNSPTLFNEALHRDLADFRIQHPDLILLQYVDDLLLAATSELDCQQGTRALLQTLGDLGYRASAKKAQICQKQVKYLGYLLKEGQRWLTEARKETVMGQPTPKTPRQLREFLGTAGFCRLWIPGFAEMAAPLYPLTKPGTLFEWGPDQQKAYQEIKQALLTAPALGLPDLTKPFELFVDEKQGYAKGVLTQKLGPWRRPVAYLSKKLDPVAAGWPPCLRMVAAIAVLTKDAGKLTMGQPLVILAPHAVEALVKQPPDRWLSNARMTHYQALLLDTDRVQFGPIVALNPATLLPLPEEGLQHDCLDILAEAHGTRPDLTDQPLPDADHTWYTDGSSFLQEGQRKAGAAVTTETEVVWAKALPAGTSAQRAELIALTQALKMAEGKKLNVYTDSRYAFATAHIHGEIYRRRGWLTSEGKEIKNKDEILALLKALFLPKRLSIIHCPGHQKGNRAEARGNRMADQAAREVATRETPETSTLLAGKRTADGSEFEKRTADGSEFESPKKKAKVE

SEQ ID NO: 6012 - protein, 2088 aa, synthetic construct
MPAAKRVKLDGGDKKYSIGLDIGTNSVGWAVITDEYKVPSKKFKVLGNTDRHSIKKNLIGALLFDSGETAEATRLKRTARRRYTRRKNRICYLQEIFSNEMAKVDDSFFHRLEESFLVEEDKKHERHPIFGNIVDEVAYHEKYPTIYHLRKKLVDSTDKADLRLIYLALAHMIKFRGHFLIEGDLNPDNSDVDKLFIQLVQTYNQLFEENPINASGVDAKAILSARLSKSRRLENLIAQLPGEKKNGLFGNLIALSLGLTPNFKSNFDLAEDAKLQLSKDTYDDDLDNLLAQIGDQYADLFLAAKNLSDAILLSDILRVNTEITKAPLSASMIKRYDEHHQDLTLLKALVRQQLPEKYKEIFFDQSKNGYAGYIDGGASQEEFYKFIKPILEKMDGTEELLVKLNREDLLRKQRTFDNGSIPHQIHLGELHAILRRQEDFYPFLKDNREKIEKILTFRIPYYVGPLARGNSRFAWMTRKSEETITPWNFEEVVDKGASAQSFIERMTNFDKNLPNEKVLPKHSLLYEYFTVYNELTKVKYVTEGMRKPAFLSGEQKKAIVDLLFKTNRKVTVKQLKEDYFKKIECFDSVEISGVEDRFNASLGTYHDLLKIIKDKDFLDNEENEDILEDIVLTLTLFEDREMIEERLKTYAHLFDDKVMKQLKRRRYTGWGRLSRKLINGIRDKQSGKTILDFLKSDGFANRNFMQLIHDDSLTFKEDIQKAQVSGQGDSLHEHIANLAGSPAIKKGILQTVKVVDELVKVMGRHKPENIVIEMARENQTTQKGQKNSRERMKRIEEGIKELGSQILKEHPVENTQLQNEKLYLYYLQNGRDMYVDQELDINRLSDYDVDHIVPQSFLKDDSIDNKVLTRSDKARGKSDNVPSEEVVKKMKNYWRQLLNAKLITQRKFDNLTKAERGGLSELDKAGFIKRQLVETRQITKHVAQILDSRMNTKYDENDKLIREVKVITLKSKLVSDFRKDFQFYKVREINNYHHAHDAYLNAVVGTALIKKYPKLESEFVYGDYKVYDVRKMIAKSEQEIGKATAKYFFYSNIMNFFKTEITLANGEIRKRPLIETNGETGEIVWDKGRDFATVRKVLSMPQVNIVKKTEVQTGGFSKESILPKRNSDKLIARKKDWDPKKYGGFDSPTVAYSVLVVAKVEKGKSKKLKSVKELLGITIMERSSFEKNPIDFLEAKGYKEVKKDLIIKLPKYSLFELENGRKRMLASAGELQKGNELALPSKYVNFLYLASHYEKLKGSPEDNEQKQLFVEQHKHYLDEIIEQISEFSKRVILADANLDKVLSAYNKHRDKPIREQAENIIHLFTLTNLGAPAAFKYFDTTIDRKRYTSTKEVLDATLIHQSITGLYETRIDLSQLGGDGGGGSGGTLNIEDEYRLHETSKGPDVPLGSTWLSDFPQAWAETGGMGLAVRQAPLIIPLKATSTPVSIKQYPMSQEARLGIKPHIQRLLDQGILVPCQSPWNTPLLPVKKPGTNDYRPVQDLREVNKRVEDIHPTVPNPYNLLSGLPPSHQWYTVLDLKDAFFCLRLHPTSQSLFAFEWRDPEMGISGQLTWTRLPQGFKNSPTLFNEALHRDLADFRIQHPDLILLQYVDDLLLAATSELDCQQGTRALLQTLGDLGYRASAKKAQICQKQVKYLGYLLKEGQRWLTEARKETVMGQPTPKTPRQLREFLGKAGFCRLFIPGFAEMAAPLYPLTKPGTLFEWGPDQQKAYQEIKQALLTAPALGLPDLTKPFELFVDEKQGYAKGVLTQKLGPWRRPVAYLSKKLDPVAAGWPPCLRMVAAIAVLTKDAGKLTMGQPLVILAPHAVEALVKQPPDRWLSNARMTHYQALLLDTDRVQFGPIVALNPATLLPLPEEGLQHDCLDILAEAHGTRPDLTDQPLPDADHTWYTDGSSFLQEGQRKAGAAVTTETEVVWAKALPAGTSAQRAELIALTQALKMAEGKKLNVYTDSRYAFATAHIHGEIYRRRGWLTSEGKEIKNKDEILALLKALFLPKRLSIIHCPGHQKGNRAEARGNRMADQAAREVATRETPETSTLLAGKRTADGSEFEKRTADGSEFESPKKKAKVE

SEQ ID NO: 6013 - protein, 2086 aa, synthetic construct
MPAAKRVKLDGGDKKYSIGLDIGTNSVGWAVITDEYKVPSKKFKVLGNTDRHSIKKNLIGALLFDSGETAEATRLKRTARRRYTRRKNRICYLQEIFSNEMAKVDDSFFHRLEESFLVEEDKKHERHPIFGNIVDEVAYHEKYPTIYHLRKKLVDSTDKADLRLIYLALAHMIKFRGHFLIEGDLNPDNSDVDKLFIQLVQTYNQLFEENPINASGVDAKAILSARLSKSRRLENLIAQLPGEKKNGLFGNLIALSLGLTPNFKSNFDLAEDAKLQLSKDTYDDDLDNLLAQIGDQYADLFLAAKNLSDAILLSDILRVNTEITKAPLSASMIKRYDEHHQDLTLLKALVRQQLPEKYKEIFFDQSKNGYAGYIDGGASQEEFYKFIKPILEKMDGTEELLVKLNREDLLRKQRTFDNGSIPHQIHLGELHAILRRQEDFYPFLKDNREKIEKILTFRIPYYVGPLARGNSRFAWMTRKSEETITPWNFEEVVDKGASAQSFIERMTNFDKNLPNEKVLPKHSLLYEYFTVYNELTKVKYVTEGMRKPAFLSGEQKKAIVDLLFKTNRKVTVKQLKEDYFKKIECFDSVEISGVEDRFNASLGTYHDLLKIIKDKDFLDNEENEDILEDIVLTLTLFEDREMIEERLKTYAHLFDDKVMKQLKRRRYTGWGRLSRKLINGIRDKQSGKTILDFLKSDGFANRNFMQLIHDDSLTFKEDIQKAQVSGQGDSLHEHIANLAGSPAIKKGILQTVKVVDELVKVMGRHKPENIVIEMARENQTTQKGQKNSRERMKRIEEGIKELGSQILKEHPVENTQLQNEKLYLYYLQNGRDMYVDQELDINRLSDYDVDHIVPQSFLKDDSIDNKVLTRSDKARGKSDNVPSEEVVKKMKNYWRQLLNAKLITQRKFDNLTKAERGGLSELDKAGFIKRQLVETRQITKHVAQILDSRMNTKYDENDKLIREVKVITLKSKLVSDFRKDFQFYKVREINNYHHAHDAYLNAVVGTALIKKYPKLESEFVYGDYKVYDVRKMIAKSEQEIGKATAKYFFYSNIMNFFKTEITLANGEIRKRPLIETNGETGEIVWDKGRDFATVRKVLSMPQVNIVKKTEVQTGGFSKESILPKRNSDKLIARKKDWDPKKYGGFDSPTVAYSVLVVAKVEKGKSKKLKSVKELLGITIMERSSFEKNPIDFLEAKGYKEVKKDLIIKLPKYSLFELENGRKRMLASAGELQKGNELALPSKYVNFLYLASHYEKLKGSPEDNEQKQLFVEQHKHYLDEIIEQISEFSKRVILADANLDKVLSAYNKHRDKPIREQAENIIHLFTLTNLGAPAAFKYFDTTIDRKRYTSTKEVLDATLIHQSITGLYETRIDLSQLGGDGGGGSGGVLNLEEEYRLHEKPVPSSIDPSWLQLFPTVWAERAGMGLANQVPPVVVELRSGASPVAVRQYPMSKEAREGIRPHIQRFLDLGVLVPCQSPWNTPLLPVKKPGTNDYRPVQDLREINKRVQDIHPTVPNPYNLLSSLPPSHTWYSVLDLKDAFFCLKLHPNSQPLFAFEWRDPEKGNTGQLTWTRLPQGFKNSPTLFNEALHRDLAPFRALNPQVVLLQYVDDLLVAAPTYRDCKEGTQKLLQELSKLGYRVSAKKAQLCQKEVTYLGYLLKEGKRWLTPARKATVMKIPPPTTPRQVREFLGKAGFCRLFIPGFASLAAPLYPLTKPSIPFIWTEEHQKAFDRIKEALLSAPALALPDLTKPFTLYVDERAGVARGVLTQTLGPWRRPVAYLSKKLDPVASGWPTCLKAVAAVALLLKDADKLTLGQNVTVIASHSLESIVRQPPDRWMTNARMTHYQSLLLNERVSFAPPAVLNPATLLPVESEATPVHRCSEILAEETGTRRDLKDQPLPGVPAWYTDGSSFIAEGKRRAGAAIVDGKRTVWASSLPEGTSAQKAELVALTQALRLAEGKDINIYTDSRYAFATAHIHGAIYKQRGWLTSAGKDIKNKEEILALLEAIHLPKRVAIIHCPGHQKGNDPVATGNRRADEAAKQAALSTRVLAETTKPAGKRTADGSEFEKRTADGSEFESPKKKAKVE

SEQ ID NO: 6014 - protein, 2088 aa, synthetic construct
MPAAKRVKLDGGDKKYSIGLDIGTNSVGWAVITDEYKVPSKKFKVLGNTDRHSIKKNLIGALLFDSGETAEATRLKRTARRRYTRRKNRICYLQEIFSNEMAKVDDSFFHRLEESFLVEEDKKHERHPIFGNIVDEVAYHEKYPTIYHLRKKLVDSTDKADLRLIYLALAHMIKFRGHFLIEGDLNPDNSDVDKLFIQLVQTYNQLFEENPINASGVDAKAILSARLSKSRRLENLIAQLPGEKKNGLFGNLIALSLGLTPNFKSNFDLAEDAKLQLSKDTYDDDLDNLLAQIGDQYADLFLAAKNLSDAILLSDILRVNTEITKAPLSASMIKRYDEHHQDLTLLKALVRQQLPEKYKEIFFDQSKNGYAGYIDGGASQEEFYKFIKPILEKMDGTEELLVKLNREDLLRKQRTFDNGSIPHQIHLGELHAILRRQEDFYPFLKDNREKIEKILTFRIPYYVGPLARGNSRFAWMTRKSEETITPWNFEEVVDKGASAQSFIERMTNFDKNLPNEKVLPKHSLLYEYFTVYNELTKVKYVTEGMRKPAFLSGEQKKAIVDLLFKTNRKVTVKQLKEDYFKKIECFDSVEISGVEDRFNASLGTYHDLLKIIKDKDFLDNEENEDILEDIVLTLTLFEDREMIEERLKTYAHLFDDKVMKQLKRRRYTGWGRLSRKLINGIRDKQSGKTILDFLKSDGFANRNFMQLIHDDSLTFKEDIQKAQVSGQGDSLHEHIANLAGSPAIKKGILQTVKVVDELVKVMGRHKPENIVIEMARENQTTQKGQKNSRERMKRIEEGIKELGSQILKEHPVENTQLQNEKLYLYYLQNGRDMYVDQELDINRLSDYDVDHIVPQSFLKDDSIDNKVLTRSDKARGKSDNVPSEEVVKKMKNYWRQLLNAKLITQRKFDNLTKAERGGLSELDKAGFIKRQLVETRQITKHVAQILDSRMNTKYDENDKLIREVKVITLKSKLVSDFRKDFQFYKVREINNYHHAHDAYLNAVVGTALIKKYPKLESEFVYGDYKVYDVRKMIAKSEQEIGKATAKYFFYSNIMNFFKTEITLANGEIRKRPLIETNGETGEIVWDKGRDFATVRKVLSMPQVNIVKKTEVQTGGFSKESILPKRNSDKLIARKKDWDPKKYGGFDSPTVAYSVLVVAKVEKGKSKKLKSVKELLGITIMERSSFEKNPIDFLEAKGYKEVKKDLIIKLPKYSLFELENGRKRMLASAGELQKGNELALPSKYVNFLYLASHYEKLKGSPEDNEQKQLFVEQHKHYLDEIIEQISEFSKRVILADANLDKVLSAYNKHRDKPIREQAENIIHLFTLTNLGAPAAFKYFDTTIDRKRYTSTKEVLDATLIHQSITGLYETRIDLSQLGGDGGGGSGGTLNIEDEYRLHETSKEPDVPLGSTWLSDFPQAWAETGGMGLAVRQAPLIIPLKATSTPVSIKQYPMSQEARLGIKPHIQRLLDQGILVPCQSPWNTPLLPVKKPGTNDYRPVQDLREVNKRVEDIHPTVPNPYNLLSGLPPSHQWYTVLDLKDAFFCLRLHPTSQPLFAFEWRDPEMGISGQLTWTRLPQGFKNSPTLFNEALHRDLADFRIQHPDLILLQYVDDLLLAATSEQDCQRGTRALLQTLGNLGYRASAKKAQICQKQVKYLGYLLKEGQRWLTEARKETVMGQPTPKTPRQLREFLGKAGFCRLFIPGFAEMAAPLYPLTKPGTLFNWGPDQQKAYQEIKQALLTAPALGLPDLTKPFELFVDEKQGYAKGVLTQKLGPWRRPVAYLSKKLDPVAAGWPPCLRMVAAIAVLTKDAGKLTMGQPLVILAPHAVEALVKQPPDRWLSNARMTHYQAMLLDTDRVQFGPVVALNPATLLPLPEKEAPHDCLEILAETHGTRPDLTDQPIPDADYTWYTDGSSFLQEGQRRAGAAVTTETEVIWARALPAGTSAQRAELIALTQALKMAEGKKLNVYTDSRYAFATAHVHGEIYRRRGWLTSEGREIKNKNEILALLKALFLPKRLSIIHCPGHQKGNSAEARGNRMADQAAREAAMKAVLETSTLLAGKRTADGSEFEKRTADGSEFESPKKKAKVE

SEQ ID NO: 6015 - protein, 2093 aa, synthetic construct
MPAAKRVKLDGGDKKYSIGLDIGTNSVGWAVITDEYKVPSKKFKVLGNTDRHSIKKNLIGALLFDSGETAEATRLKRTARRRYTRRKNRICYLQEIFSNEMAKVDDSFFHRLEESFLVEEDKKHERHPIFGNIVDEVAYHEKYPTIYHLRKKLVDSTDKADLRLIYLALAHMIKFRGHFLIEGDLNPDNSDVDKLFIQLVQTYNQLFEENPINASGVDAKAILSARLSKSRRLENLIAQLPGEKKNGLFGNLIALSLGLTPNFKSNFDLAEDAKLQLSKDTYDDDLDNLLAQIGDQYADLFLAAKNLSDAILLSDILRVNTEITKAPLSASMIKRYDEHHQDLTLLKALVRQQLPEKYKEIFFDQSKNGYAGYIDGGASQEEFYKFIKPILEKMDGTEELLVKLNREDLLRKQRTFDNGSIPHQIHLGELHAILRRQEDFYPFLKDNREKIEKILTFRIPYYVGPLARGNSRFAWMTRKSEETITPWNFEEVVDKGASAQSFIERMTNFDKNLPNEKVLPKHSLLYEYFTVYNELTKVKYVTEGMRKPAFLSGEQKKAIVDLLFKTNRKVTVKQLKEDYFKKIECFDSVEISGVEDRFNASLGTYHDLLKIIKDKDFLDNEENEDILEDIVLTLTLFEDREMIEERLKTYAHLFDDKVMKQLKRRRYTGWGRLSRKLINGIRDKQSGKTILDFLKSDGFANRNFMQLIHDDSLTFKEDIQKAQVSGQGDSLHEHIANLAGSPAIKKGILQTVKVVDELVKVMGRHKPENIVIEMARENQTTQKGQKNSRERMKRIEEGIKELGSQILKEHPVENTQLQNEKLYLYYLQNGRDMYVDQELDINRLSDYDVDHIVPQSFLKDDSIDNKVLTRSDKARGKSDNVPSEEVVKKMKNYWRQLLNAKLITQRKFDNLTKAERGGLSELDKAGFIKRQLVETRQITKHVAQILDSRMNTKYDENDKLIREVKVITLKSKLVSDFRKDFQFYKVREINNYHHAHDAYLNAVVGTALIKKYPKLESEFVYGDYKVYDVRKMIAKSEQEIGKATAKYFFYSNIMNFFKTEITLANGEIRKRPLIETNGETGEIVWDKGRDFATVRKVLSMPQVNIVKKTEVQTGGFSKESILPKRNSDKLIARKKDWDPKKYGGFDSPTVAYSVLVVAKVEKGKSKKLKSVKELLGITIMERSSFEKNPIDFLEAKGYKEVKKDLIIKLPKYSLFELENGRKRMLASAGELQKGNELALPSKYVNFLYLASHYEKLKGSPEDNEQKQLFVEQHKHYLDEIIEQISEFSKRVILADANLDKVLSAYNKHRDKPIREQAENIIHLFTLTNLGAPAAFKYFDTTIDRKRYTSTKEVLDATLIHQSITGLYETRIDLSQLGGDGGGGSGGSGGTAPLEEEYRLFLEAPIQNVTLLEQWKREIPKVWAEINPPGLASTQAPIHVQLLSTALPVRVRQYPITLEAKRSLRETIRKFRAAGILRPVHSPWNTPLLPVRKSGTSEYRMVQDLREVNKRVETIHPTVPNPYTLLSLLPPDRIWYSVLDLKDAFFCIPLAPESQLIFAFEWADAEEGESGQLTWTRLPQGFKNSPTLFNEALNRDLQGFRLDHPSVSLLQYVDDLLIAADTQAACLSATRDLLMTLAELGYRVSGKKAQLCQEEVTYLGFKIHKGSRSLSNSRTQAILQIPVPKTKRQVREFLGTIGYCRLWIPGFAELAQPLYAATRPGNDPLVWGEKEEEAFQSLKLALTQPPALALPSLDKPFQLFVEETSGAAKGVLTQALGPWKRPVAYLSKRLDPVAAGWPRCLRAIAAAALLTREASKLTFGQDIEITSSHNLESLLRSPPDKWLTNARITQYQVLLLDPPRVRFKQTAALNPATLLPETDDTLPIHHCLDTLDSLTSTRPDLTDQPLAQAEATLFTDGSSYIRDGKRYAGAAVVTLDSVIWAEPLPIGTSAQKAELIALTKALEWSKDKSVNIYTDSRYAFATLHVHGMIYRERGWLTAGGKAIKNAPEILALLTAVWLPKRVAVMHCKGHQKDDAPTSTGNRRADEVAREVAIRPLSTQATISAGKRTADGSEFEKRTADGSEFESPKKKAKVE

SEQ ID NO: 6016 - protein, 2082 aa, synthetic construct
MPAAKRVKLDGGDKKYSIGLDIGTNSVGWAVITDEYKVPSKKFKVLGNTDRHSIKKNLIGALLFDSGETAEATRLKRTARRRYTRRKNRICYLQEIFSNEMAKVDDSFFHRLEESFLVEEDKKHERHPIFGNIVDEVAYHEKYPTIYHLRKKLVDSTDKADLRLIYLALAHMIKFRGHFLIEGDLNPDNSDVDKLFIQLVQTYNQLFEENPINASGVDAKAILSARLSKSRRLENLIAQLPGEKKNGLFGNLIALSLGLTPNFKSNFDLAEDAKLQLSKDTYDDDLDNLLAQIGDQYADLFLAAKNLSDAILLSDILRVNTEITKAPLSASMIKRYDEHHQDLTLLKALVRQQLPEKYKEIFFDQSKNGYAGYIDGGASQEEFYKFIKPILEKMDGTEELLVKLNREDLLRKQRTFDNGSIPHQIHLGELHAILRRQEDFYPFLKDNREKIEKILTFRIPYYVGPLARGNSRFAWMTRKSEETITPWNFEEVVDKGASAQSFIERMTNFDKNLPNEKVLPKHSLLYEYFTVYNELTKVKYVTEGMRKPAFLSGEQKKAIVDLLFKTNRKVTVKQLKEDYFKKIECFDSVEISGVEDRFNASLGTYHDLLKIIKDKDFLDNEENEDILEDIVLTLTLFEDREMIEERLKTYAHLFDDKVMKQLKRRRYTGWGRLSRKLINGIRDKQSGKTILDFLKSDGFANRNFMQLIHDDSLTFKEDIQKAQVSGQGDSLHEHIANLAGSPAIKKGILQTVKVVDELVKVMGRHKPENIVIEMARENQTTQKGQKNSRERMKRIEEGIKELGSQILKEHPVENTQLQNEKLYLYYLQNGRDMYVDQELDINRLSDYDVDHIVPQSFLKDDSIDNKVLTRSDKARGKSDNVPSEEVVKKMKNYWRQLLNAKLITQRKFDNLTKAERGGLSELDKAGFIKRQLVETRQITKHVAQILDSRMNTKYDENDKLIREVKVITLKSKLVSDFRKDFQFYKVREINNYHHAHDAYLNAVVGTALIKKYPKLESEFVYGDYKVYDVRKMIAKSEQEIGKATAKYFFYSNIMNFFKTEITLANGEIRKRPLIETNGETGEIVWDKGRDFATVRKVLSMPQVNIVKKTEVQTGGFSKESILPKRNSDKLIARKKDWDPKKYGGFDSPTVAYSVLVVAKVEKGKSKKLKSVKELLGITIMERSSFEKNPIDFLEAKGYKEVKKDLIIKLPKYSLFELENGRKRMLASAGELQKGNELALPSKYVNFLYLASHYEKLKGSPEDNEQKQLFVEQHKHYLDEIIEQISEFSKRVILADANLDKVLSAYNKHRDKPIREQAENIIHLFTLTNLGAPAAFKYFDTTIDRKRYTSTKEVLDATLIHQSITGLYETRIDLSQLGGDGGGGSGGSGGVPWILKKPLELTIKLDLEEQQGTLLNNSILSKKGKEELKQLFEKYSALWQSWENQVGHRRIRPHKIATGTVKPTPQKQYHINPKAKPDIQIVINDLLKQGVLIQKESTMNTPVYPVPKPNGRWRMVLDYRAVNKVTPLIAVQNQHSYGILGSLFKGRYKTTIDLSNGFWAHPIVPEDYWITAFTWQGKQYCWTVLPQGFLNSPGLFNGDVVDLLQGIPNVEVYVDDVYISHDSEKEHLEYLDILFNRLKEAGYIISLKKSNIANSIVDFLGFQITNEGRGLTDTFKEKLENITAPTTLKQLQSILGKLNFARNFIPDFTELIAPLYALIPKSPKNYVPWQIEHSTTLETLITKLNGAEYLQGRKGDKTLIMKVNASYTTGYIRYYNEGEKKPISYVSIVFSKTELKFTELEKLLTTVHKGLLKALDLSMGQNIHVYSPIVSMQNIQKTPQTAKKALASRWLSWLSYLEDPRIRFFYDPQMPALKDLPAVDTGKDNKKHPSNFQHIFYTDGSAITSPTKEGHLNAGMGIVYFINKDGNLQKQQEWSISLGNHTAQFAEIAAFEFALKKCLPLGGNILVVTDSNYVAKAYNEELDVWASNGFVNNRKKPLKHISKWKSVADLKRLRPDVVVTHEPGHQKLDSSPHAYGNNLADQLATQASFKVHAGKRTADGSEFEKRTADGSEFESPKKKAKVE

SEQ ID NO: 6017 - protein, 2090 aa, synthetic construct
MPAAKRVKLDGGDKKYSIGLDIGTNSVGWAVITDEYKVPSKKFKVLGNTDRHSIKKNLIGALLFDSGETAEATRLKRTARRRYTRRKNRICYLQEIFSNEMAKVDDSFFHRLEESFLVEEDKKHERHPIFGNIVDEVAYHEKYPTIYHLRKKLVDSTDKADLRLIYLALAHMIKFRGHFLIEGDLNPDNSDVDKLFIQLVQTYNQLFEENPINASGVDAKAILSARLSKSRRLENLIAQLPGEKKNGLFGNLIALSLGLTPNFKSNFDLAEDAKLQLSKDTYDDDLDNLLAQIGDQYADLFLAAKNLSDAILLSDILRVNTEITKAPLSASMIKRYDEHHQDLTLLKALVRQQLPEKYKEIFFDQSKNGYAGYIDGGASQEEFYKFIKPILEKMDGTEELLVKLNREDLLRKQRTFDNGSIPHQIHLGELHAILRRQEDFYPFLKDNREKIEKILTFRIPYYVGPLARGNSRFAWMTRKSEETITPWNFEEVVDKGASAQSFIERMTNFDKNLPNEKVLPKHSLLYEYFTVYNELTKVKYVTEGMRKPAFLSGEQKKAIVDLLFKTNRKVTVKQLKEDYFKKIECFDSVEISGVEDRFNASLGTYHDLLKIIKDKDFLDNEENEDILEDIVLTLTLFEDREMIEERLKTYAHLFDDKVMKQLKRRRYTGWGRLSRKLINGIRDKQSGKTILDFLKSDGFANRNFMQLIHDDSLTFKEDIQKAQVSGQGDSLHEHIANLAGSPAIKKGILQTVKVVDELVKVMGRHKPENIVIEMARENQTTQKGQKNSRERMKRIEEGIKELGSQILKEHPVENTQLQNEKLYLYYLQNGRDMYVDQELDINRLSDYDVDHIVPQSFLKDDSIDNKVLTRSDKARGKSDNVPSEEVVKKMKNYWRQLLNAKLITQRKFDNLTKAERGGLSELDKAGFIKRQLVETRQITKHVAQILDSRMNTKYDENDKLIREVKVITLKSKLVSDFRKDFQFYKVREINNYHHAHDAYLNAVVGTALIKKYPKLESEFVYGDYKVYDVRKMIAKSEQEIGKATAKYFFYSNIMNFFKTEITLANGEIRKRPLIETNGETGEIVWDKGRDFATVRKVLSMPQVNIVKKTEVQTGGFSKESILPKRNSDKLIARKKDWDPKKYGGFDSPTVAYSVLVVAKVEKGKSKKLKSVKELLGITIMERSSFEKNPIDFLEAKGYKEVKKDLIIKLPKYSLFELENGRKRMLASAGELQKGNELALPSKYVNFLYLASHYEKLKGSPEDNEQKQLFVEQHKHYLDEIIEQISEFSKRVILADANLDKVLSAYNKHRDKPIREQAENIIHLFTLTNLGAPAAFKYFDTTIDRKRYTSTKEVLDATLIHQSITGLYETRIDLSQLGGDGGGGSGGSGGTLQLEEEYRLFEPESTQKQEMDIWLKNFPQAWAETGGMGTAHCQAPVLIQLKATATPISIRQYPMPHEAYQGIKPHIRRMLDQGILKPCQSPWNTPLLPVKKPGTEDYRPVQDLREVNKRVEDIHPTVPNPYNLLSTLPPSHPWYTVLDLKDAFFCLRLHSESQLLFAFEWRDPEIGLSGQLTWTRLPQGFKNSPTLFNEALHSDLADFRVRYPALVLLQYVDDLLLAAATRTECLEGTKALLETLGNKGYRASAKKAQICLQEVTYLGYSLKDGQRWLTKARKEAILSIPVPKNSRQVREFLGKAGYCRLFIPGFAELAAPLYPLTRPGTLFQWGTEQQLAFEDIKKALLSSPALGLPDITKPFELFIDENSGFAKGVLVQKLGPWKRPVAYLSKKLDTVASGWPPCLRMVAAIAILVKDAGKLTLGQPLTILTSHPVEALVRQPPNKWLSNARMTHYQAMLLDAERVHFGPTVSLNPATLLPLPSGGNHHDCLQILAETHGTRPDLTDQPLPDADLTWYTDGSSFIRNGEREAGAAVTTESEVIWAAPLPPGTSAQRAELIALTQALKMAEGKKLTVYTDSRYAFATTHVHGEIYRRRGWLTSEGKEIKNKNEILALLEALFLPKRLSIIHCPGHQKGDSPQAKGNRLADDTAKKAATETHSSLTVLPAGKRTADGSEFEKRTADGSEFESPKKKAKVE

SEQ ID NO: 6018 - protein, 2171 aa, synthetic construct
MPAAKRVKLDGGDKKYSIGLDIGTNSVGWAVITDEYKVPSKKFKVLGNTDRHSIKKNLIGALLFDSGETAEATRLKRTARRRYTRRKNRICYLQEIFSNEMAKVDDSFFHRLEESFLVEEDKKHERHPIFGNIVDEVAYHEKYPTIYHLRKKLVDSTDKADLRLIYLALAHMIKFRGHFLIEGDLNPDNSDVDKLFIQLVQTYNQLFEENPINASGVDAKAILSARLSKSRRLENLIAQLPGEKKNGLFGNLIALSLGLTPNFKSNFDLAEDAKLQLSKDTYDDDLDNLLAQIGDQYADLFLAAKNLSDAILLSDILRVNTEITKAPLSASMIKRYDEHHQDLTLLKALVRQQLPEKYKEIFFDQSKNGYAGYIDGGASQEEFYKFIKPILEKMDGTEELLVKLNREDLLRKQRTFDNGSIPHQIHLGELHAILRRQEDFYPFLKDNREKIEKILTFRIPYYVGPLARGNSRFAWMTRKSEETITPWNFEEVVDKGASAQSFIERMTNFDKNLPNEKVLPKHSLLYEYFTVYNELTKVKYVTEGMRKPAFLSGEQKKAIVDLLFKTNRKVTVKQLKEDYFKKIECFDSVEISGVEDRFNASLGTYHDLLKIIKDKDFLDNEENEDILEDIVLTLTLFEDREMIEERLKTYAHLFDDKVMKQLKRRRYTGWGRLSRKLINGIRDKQSGKTILDFLKSDGFANRNFMQLIHDDSLTFKEDIQKAQVSGQGDSLHEHIANLAGSPAIKKGILQTVKVVDELVKVMGRHKPENIVIEMARENQTTQKGQKNSRERMKRIEEGIKELGSQILKEHPVENTQLQNEKLYLYYLQNGRDMYVDQELDINRLSDYDVDHIVPQSFLKDDSIDNKVLTRSDKARGKSDNVPSEEVVKKMKNYWRQLLNAKLITQRKFDNLTKAERGGLSELDKAGFIKRQLVETRQITKHVAQILDSRMNTKYDENDKLIREVKVITLKSKLVSDFRKDFQFYKVREINNYHHAHDAYLNAVVGTALIKKYPKLESEFVYGDYKVYDVRKMIAKSEQEIGKATAKYFFYSNIMNFFKTEITLANGEIRKRPLIETNGETGEIVWDKGRDFATVRKVLSMPQVNIVKKTEVQTGGFSKESILPKRNSDKLIARKKDWDPKKYGGFDSPTVAYSVLVVAKVEKGKSKKLKSVKELLGITIMERSSFEKNPIDFLEAKGYKEVKKDLIIKLPKYSLFELENGRKRMLASAGELQKGNELALPSKYVNFLYLASHYEKLKGSPEDNEQKQLFVEQHKHYLDEIIEQISEFSKRVILADANLDKVLSAYNKHRDKPIREQAENIIHLFTLTNLGAPAAFKYFDTTIDRKRYTSTKEVLDATLIHQSITGLYETRIDLSQLGGDGGGGSGGSGGMNPLQLLQPLPAEIKGTKLLAHWNSGATITCIPESFLEDEQPIKKTLIKTIHGEKQQNVYYVTFKVKGRKVEAEVIASPYEYILLSPTDVPWLTQQPLQLTILVPLQEYQEKILSKTALPEDQKQQLKTLFVKYDNLWQHWENQVGHRKIRPHNIATGDYPPRPQKQYPINPKAKPSIQIVIDDLLKQGVLTPQNSTMNTPVYPVPKPDGRWRMVLDYREVNKTIPLTAAQNQHSAGILATIVRQKYKTTLDLANGFWAHPITPESYWLTAFTWQGKQYCWTRLPQGFLNSPALFNADVVDLLKEIPNVQVYVDDIYLSHDDPKEHVQQLEKVFQILLQAGYVVSLKKSEIGQKTVEFLGFNITKEGRGLTDTFKTKLLNITPPKDLKQLQSILGLLNFARNFIPNFAELVQPLYNLIAPAKGKYIEWSEENTKQLNMVIEALNTASNLEERLPEQRLVIKVNTSPSAGYVRYYNETGKKPIMYLNYVFSKAELKFSMLEKLLTTMHKALIKAMDLAMGQEILVYSPIVSMTKIQKTPLPERKALPIRWITWMTYLEDPRIQFHYDKTLPELKHIPDVYTSSQSPVKHPSQYEGVFYTDGSAIKSPDPTKSNNAGMGIVHATYKPEYQVLNQWSIPLGNHTAQMAEIAAVEFACKKALKIPGPVLVITDSFYVAESANKELPYWKSNGFVNNKKKPLKHISKWKSIAECLSMKPDITIQHEKGISLQIPVFILKGNALADKLATQGSYVVNAGKRTADGSEFEKRTADGSEFESPKKKAKVE

SEQ ID NO: 6019 - protein, 2213 aa, synthetic construct
MPAAKRVKLDGGDKKYSIGLDIGTNSVGWAVITDEYKVPSKKFKVLGNTDRHSIKKNLIGALLFDSGETAEATRLKRTARRRYTRRKNRICYLQEIFSNEMAKVDDSFFHRLEESFLVEEDKKHERHPIFGNIVDEVAYHEKYPTIYHLRKKLVDSTDKADLRLIYLALAHMIKFRGHFLIEGDLNPDNSDVDKLFIQLVQTYNQLFEENPINASGVDAKAILSARLSKSRRLENLIAQLPGEKKNGLFGNLIALSLGLTPNFKSNFDLAEDAKLQLSKDTYDDDLDNLLAQIGDQYADLFLAAKNLSDAILLSDILRVNTEITKAPLSASMIKRYDEHHQDLTLLKALVRQQLPEKYKEIFFDQSKNGYAGYIDGGASQEEFYKFIKPILEKMDGTEELLVKLNREDLLRKQRTFDNGSIPHQIHLGELHAILRRQEDFYPFLKDNREKIEKILTFRIPYYVGPLARGNSRFAWMTRKSEETITPWNFEEVVDKGASAQSFIERMTNFDKNLPNEKVLPKHSLLYEYFTVYNELTKVKYVTEGMRKPAFLSGEQKKAIVDLLFKTNRKVTVKQLKEDYFKKIECFDSVEISGVEDRFNASLGTYHDLLKIIKDKDFLDNEENEDILEDIVLTLTLFEDREMIEERLKTYAHLFDDKVMKQLKRRRYTGWGRLSRKLINGIRDKQSGKTILDFLKSDGFANRNFMQLIHDDSLTFKEDIQKAQVSGQGDSLHEHIANLAGSPAIKKGILQTVKVVDELVKVMGRHKPENIVIEMARENQTTQKGQKNSRERMKRIEEGIKELGSQILKEHPVENTQLQNEKLYLYYLQNGRDMYVDQELDINRLSDYDVDHIVPQSFLKDDSIDNKVLTRSDKARGKSDNVPSEEVVKKMKNYWRQLLNAKLITQRKFDNLTKAERGGLSELDKAGFIKRQLVETRQITKHVAQILDSRMNTKYDENDKLIREVKVITLKSKLVSDFRKDFQFYKVREINNYHHAHDAYLNAVVGTALIKKYPKLESEFVYGDYKVYDVRKMIAKSEQEIGKATAKYFFYSNIMNFFKTEITLANGEIRKRPLIETNGETGEIVWDKGRDFATVRKVLSMPQVNIVKKTEVQTGGFSKESILPKRNSDKLIARKKDWDPKKYGGFDSPTVAYSVLVVAKVEKGKSKKLKSVKELLGITIMERSSFEKNPIDFLEAKGYKEVKKDLIIKLPKYSLFELENGRKRMLASAGELQKGNELALPSKYVNFLYLASHYEKLKGSPEDNEQKQLFVEQHKHYLDEIIEQISEFSKRVILADANLDKVLSAYNKHRDKPIREQAENIIHLFTLTNLGAPAAFKYFDTTIDRKRYTSTKEVLDATLIHQSITGLYETRIDLSQLGGDGGGGSGGSGGTLGDQGSRGSDPLPEPRVTLTVEGIPTEFLVNTGAEHSVLTKPMGKMGSKRTVVAGATGSKVYPWTTKRLLKIGQKQVTHSFLVIPECPAPLLGRDLLTKLKAQIQFSTEGPQVTWEDRPAMCLVLNLEEEYRLHEKPVPPSIDPSWLQLFPMVWAEKAGMGLANQVPPVVVELKSDASPVAVRQYPMSKEAREGIRPHIQRFLDLGILVPCQSPWNTPLLPVKKPGTNDYRPVQDLREVNKRVQDIHPTVPNPYNLLSSLPPSHTWYSVLDLKDAFFCLKLHPNSQPLFAFEWRDPEKGNTGQLTWTRLPQGFKNSPTLFDEALHRDLASFRALNPQVVMLQYVDDLLVAAPTYRDCKEGTRRLLQELSKLGYRVSAKKAQLCREEVTYLGYLLKGGKRWLTPARKATVMKIPTPTTPRQVREFLGTAGFCRLWIPGFASLAAPLYPLTREKVPFTWTEAHQEAFGRIKEALLSAPALALPDLTKPFALYVDEKEGVARGVLTQTLGPWRRPVAYLSKKLDPVASGWPTCLKAIAAVALLLKDADKLTLGQNVLVIAPHNLESIVRQPPDRWMTNARMTHYQSLLLNERVSFAPPAILNPATLLPVESDDTPIHICSEILAEETGTRPDLRDQPLPGVPAWYTDGSSFIMDGRRQAGAAIVDNKRTVWASNLPEGTSAQKAELIALTQALRLAEGKSINIYTDSRYAFATAHVHGAIYKQRGLLTSAGKDIKNKEEILALLEAIHLPKRVAIIHCPGHQRGTDPVATGNRKADEAAKQAAQSTRILTETTKNAGKRTADGSEFEKRTADGSEFESPKKKAKVE

SEQ ID NO: 6020 - protein, 2122 aa, synthetic construct
MPAAKRVKLDGGDKKYSIGLDIGTNSVGWAVITDEYKVPSKKFKVLGNTDRHSIKKNLIGALLFDSGETAEATRLKRTARRRYTRRKNRICYLQEIFSNEMAKVDDSFFHRLEESFLVEEDKKHERHPIFGNIVDEVAYHEKYPTIYHLRKKLVDSTDKADLRLIYLALAHMIKFRGHFLIEGDLNPDNSDVDKLFIQLVQTYNQLFEENPINASGVDAKAILSARLSKSRRLENLIAQLPGEKKNGLFGNLIALSLGLTPNFKSNFDLAEDAKLQLSKDTYDDDLDNLLAQIGDQYADLFLAAKNLSDAILLSDILRVNTEITKAPLSASMIKRYDEHHQDLTLLKALVRQQLPEKYKEIFFDQSKNGYAGYIDGGASQEEFYKFIKPILEKMDGTEELLVKLNREDLLRKQRTFDNGSIPHQIHLGELHAILRRQEDFYPFLKDNREKIEKILTFRIPYYVGPLARGNSRFAWMTRKSEETITPWNFEEVVDKGASAQSFIERMTNFDKNLPNEKVLPKHSLLYEYFTVYNELTKVKYVTEGMRKPAFLSGEQKKAIVDLLFKTNRKVTVKQLKEDYFKKIECFDSVEISGVEDRFNASLGTYHDLLKIIKDKDFLDNEENEDILEDIVLTLTLFEDREMIEERLKTYAHLFDDKVMKQLKRRRYTGWGRLSRKLINGIRDKQSGKTILDFLKSDGFANRNFMQLIHDDSLTFKEDIQKAQVSGQGDSLHEHIANLAGSPAIKKGILQTVKVVDELVKVMGRHKPENIVIEMARENQTTQKGQKNSRERMKRIEEGIKELGSQILKEHPVENTQLQNEKLYLYYLQNGRDMYVDQELDINRLSDYDVDHIVPQSFLKDDSIDNKVLTRSDKARGKSDNVPSEEVVKKMKNYWRQLLNAKLITQRKFDNLTKAERGGLSELDKAGFIKRQLVETRQITKHVAQILDSRMNTKYDENDKLIREVKVITLKSKLVSDFRKDFQFYKVREINNYHHAHDAYLNAVVGTALIKKYPKLESEFVYGDYKVYDVRKMIAKSEQEIGKATAKYFFYSNIMNFFKTEITLANGEIRKRPLIETNGETGEIVWDKGRDFATVRKVLSMPQVNIVKKTEVQTGGFSKESILPKRNSDKLIARKKDWDPKKYGGFDSPTVAYSVLVVAKVEKGKSKKLKSVKELLGITIMERSSFEKNPIDFLEAKGYKEVKKDLIIKLPKYSLFELENGRKRMLASAGELQKGNELALPSKYVNFLYLASHYEKLKGSPEDNEQKQLFVEQHKHYLDEIIEQISEFSKRVILADANLDKVLSAYNKHRDKPIREQAENIIHLFTLTNLGAPAAFKYFDTTIDRKRYTSTKEVLDATLIHQSITGLYETRIDLSQLGGDGGGGSGGSGGLLGRDLLTKLKAQIQFSTEGPQVTWEDRPAMCLVLNLEEEYRLHEKPVPPSIDPSWLQLFPMVWAEKAGMGLANQVPPVVVELKSDASPVAVRQYPMSKEAREGIRPHIQRFLDLGILVPCQSPWNTPLLPVKKPGTNDYRPVQDLREVNKRVQDIHPTVPNPYNLLSSLPPSHTWYSVLDLKDAFFCLKLHPNSQPLFAFEWRDPEKGNTGQLTWTRLPQGFKNSPTLFDEALHRDLASFRALNPQVVMLQYVDDLLVAAPTYRDCKEGTRRLLQELSKLGYRVSAKKAQLCREEVTYLGYLLKGGKRWLTPARKATVMKIPTPTTPRQVREFLGTAGFCRLWIPGFASLAAPLYPLTREKVPFTWTEAHQEAFGRIKEALLSAPALALPDLTKPFALYVDEKEGVARGVLTQTLGPWRRPVAYLSKKLDPVASGWPTCLKAIAAVALLLKDADKLTLGQNVLVIAPHNLESIVRQPPDRWMTNARMTHYQSLLLNERVSFAPPAILNPATLLPVESDDTPIHICSEILAEETGTRPDLRDQPLPGVPAWYTDGSSFIMDGRRQAGAAIVDNKRTVWASNLPEGTSAQKAELIALTQALRLAEGKSINIYTDSRYAFATAHVHGAIYKQRGLLTSAGKDIKNKEEILALLEAIHLPKRVAIIHCPGHQRGTDPVATGNRKADEAAKQAAQSTRILTETTKNAGKRTADGSEFEKRTADGSEFESPKKKAKVE

SEQ ID NO: 6021 - protein, 2213 aa, synthetic construct
MPAAKRVKLDGGDKKYSIGLDIGTNSVGWAVITDEYKVPSKKFKVLGNTDRHSIKKNLIGALLFDSGETAEATRLKRTARRRYTRRKNRICYLQEIFSNEMAKVDDSFFHRLEESFLVEEDKKHERHPIFGNIVDEVAYHEKYPTIYHLRKKLVDSTDKADLRLIYLALAHMIKFRGHFLIEGDLNPDNSDVDKLFIQLVQTYNQLFEENPINASGVDAKAILSARLSKSRRLENLIAQLPGEKKNGLFGNLIALSLGLTPNFKSNFDLAEDAKLQLSKDTYDDDLDNLLAQIGDQYADLFLAAKNLSDAILLSDILRVNTEITKAPLSASMIKRYDEHHQDLTLLKALVRQQLPEKYKEIFFDQSKNGYAGYIDGGASQEEFYKFIKPILEKMDGTEELLVKLNREDLLRKQRTFDNGSIPHQIHLGELHAILRRQEDFYPFLKDNREKIEKILTFRIPYYVGPLARGNSRFAWMTRKSEETITPWNFEEVVDKGASAQSFIERMTNFDKNLPNEKVLPKHSLLYEYFTVYNELTKVKYVTEGMRKPAFLSGEQKKAIVDLLFKTNRKVTVKQLKEDYFKKIECFDSVEISGVEDRFNASLGTYHDLLKIIKDKDFLDNEENEDILEDIVLTLTLFEDREMIEERLKTYAHLFDDKVMKQLKRRRYTGWGRLSRKLINGIRDKQSGKTILDFLKSDGFANRNFMQLIHDDSLTFKEDIQKAQVSGQGDSLHEHIANLAGSPAIKKGILQTVKVVDELVKVMGRHKPENIVIEMARENQTTQKGQKNSRERMKRIEEGIKELGSQILKEHPVENTQLQNEKLYLYYLQNGRDMYVDQELDINRLSDYDVDHIVPQSFLKDDSIDNKVLTRSDKARGKSDNVPSEEVVKKMKNYWRQLLNAKLITQRKFDNLTKAERGGLSELDKAGFIKRQLVETRQITKHVAQILDSRMNTKYDENDKLIREVKVITLKSKLVSDFRKDFQFYKVREINNYHHAHDAYLNAVVGTALIKKYPKLESEFVYGDYKVYDVRKMIAKSEQEIGKATAKYFFYSNIMNFFKTEITLANGEIRKRPLIETNGETGEIVWDKGRDFATVRKVLSMPQVNIVKKTEVQTGGFSKESILPKRNSDKLIARKKDWDPKKYGGFDSPTVAYSVLVVAKVEKGKSKKLKSVKELLGITIMERSSFEKNPIDFLEAKGYKEVKKDLIIKLPKYSLFELENGRKRMLASAGELQKGNELALPSKYVNFLYLASHYEKLKGSPEDNEQKQLFVEQHKHYLDEIIEQISEFSKRVILADANLDKVLSAYNKHRDKPIREQAENIIHLFTLTNLGAPAAFKYFDTTIDRKRYTSTKEVLDATLIHQSITGLYETRIDLSQLGGDGGGGSGGSGGTLGDQGSRGSDPLPEPRVTLTVEGIPTEFLVNTGAEHSVLTKPMGKMGSKRTVVAGATGSKVYPWTTKRLLKIGQKQVTHSFLVIPECPAPLLGRDLLTKLKAQIQFSTEGPQVTWEDRPAMCLVLNLEEEYRLHEKPVPPSIDPSWLQLFPMVWAEKAGMGLANQVPPVVVELKSDASPVAVRQYPMSKEAREGIRPHIQRFLDLGILVPCQSPWNTPLLPVKKPGTNDYRPVQDLREVNKRVQDIHPTVPNPYNLLSSLPPSHTWYSVLDLKDAFFCLKLHPNSQPLFAFEWRDPEKGNTGQLTWTRLPQGFKNSPTLFNEALHRDLASFRALNPQVVMLQYVDDLLVAAPTYRDCKEGTRRLLQELSKLGYRVSAKKAQLCREEVTYLGYLLKGGKRWLTPARKATVMKIPTPTTPRQVREFLGTAGFCRLWIPGFASLAAPLYPLTRPKVPFTWTEAHQEAFGRIKEALLSAPALALPDLTKPFALYVDEKEGVARGVLTQTLGPWRRPVAYLSKKLDPVASGWPTCLKAIAAVALLLKDADKLTLGQNVLVIAPHNLESIVRQPPDRWMTNARMTHYQSLLLNERVSFAPPAILNPATLLPVESDDTPIHICSEILAEETGTRPDLRDQPLPGVPAWYTDGSSFIMDGRRQAGAAIVDNKRTVWASNLPEGTSAQKAELIALTQALRLAEGKSINIYTDSRYAFATAHVHGAIYKQRGWLTSAGKDIKNKEEILALLEAIHLPKRVAIIHCPGHQRGTDPVATGNRKADEAAKQAAQSTRILTETTKNAGKRTADGSEFEKRTADGSEFESPKKKAKVE

SEQ ID NO: 6022 - protein, 2091 aa, synthetic construct
MPAAKRVKLDGGDKKYSIGLDIGTNSVGWAVITDEYKVPSKKFKVLGNTDRHSIKKNLIGALLFDSGETAEATRLKRTARRRYTRRKNRICYLQEIFSNEMAKVDDSFFHRLEESFLVEEDKKHERHPIFGNIVDEVAYHEKYPTIYHLRKKLVDSTDKADLRLIYLALAHMIKFRGHFLIEGDLNPDNSDVDKLFIQLVQTYNQLFEENPINASGVDAKAILSARLSKSRRLENLIAQLPGEKKNGLFGNLIALSLGLTPNFKSNFDLAEDAKLQLSKDTYDDDLDNLLAQIGDQYADLFLAAKNLSDAILLSDILRVNTEITKAPLSASMIKRYDEHHQDLTLLKALVRQQLPEKYKEIFFDQSKNGYAGYIDGGASQEEFYKFIKPILEKMDGTEELLVKLNREDLLRKQRTFDNGSIPHQIHLGELHAILRRQEDFYPFLKDNREKIEKILTFRIPYYVGPLARGNSRFAWMTRKSEETITPWNFEEVVDKGASAQSFIERMTNFDKNLPNEKVLPKHSLLYEYFTVYNELTKVKYVTEGMRKPAFLSGEQKKAIVDLLFKTNRKVTVKQLKEDYFKKIECFDSVEISGVEDRFNASLGTYHDLLKIIKDKDFLDNEENEDILEDIVLTLTLFEDREMIEERLKTYAHLFDDKVMKQLKRRRYTGWGRLSRKLINGIRDKQSGKTILDFLKSDGFANRNFMQLIHDDSLTFKEDIQKAQVSGQGDSLHEHIANLAGSPAIKKGILQTVKVVDELVKVMGRHKPENIVIEMARENQTTQKGQKNSRERMKRIEEGIKELGSQILKEHPVENTQLQNEKLYLYYLQNGRDMYVDQELDINRLSDYDVDHIVPQSFLKDDSIDNKVLTRSDKARGKSDNVPSEEVVKKMKNYWRQLLNAKLITQRKFDNLTKAERGGLSELDKAGFIKRQLVETRQITKHVAQILDSRMNTKYDENDKLIREVKVITLKSKLVSDFRKDFQFYKVREINNYHHAHDAYLNAVVGTALIKKYPKLESEFVYGDYKVYDVRKMIAKSEQEIGKATAKYFFYSNIMNFFKTEITLANGEIRKRPLIETNGETGEIVWDKGRDFATVRKVLSMPQVNIVKKTEVQTGGFSKESILPKRNSDKLIARKKDWDPKKYGGFDSPTVAYSVLVVAKVEKGKSKKLKSVKELLGITIMERSSFEKNPIDFLEAKGYKEVKKDLIIKLPKYSLFELENGRKRMLASAGELQKGNELALPSKYVNFLYLASHYEKLKGSPEDNEQKQLFVEQHKHYLDEIIEQISEFSKRVILADANLDKVLSAYNKHRDKPIREQAENIIHLFTLTNLGAPAAFKYFDTTIDRKRYTSTKEVLDATLIHQSITGLYETRIDLSQLGGDGGGGSGGSGGLGIEDEYRLHETSTEPDVSLGSTWLSDFPQAWAETGGMGLAVRQAPLIIPLKATSTPVSIQQYPMSHEARLGIKPHIQRLLDQGILVPCQSPWNTPLLPVKKPGTNDYRPVQDLREVNKRVEDIHPTVPNPYNLLSGLPPSHQWYTVLDLKDAFFCLRLHPTSQPLFAFEWRDPGMGISGQLTWTRLPQGFKNSPTLFNEALHRDLADFRIQHPDLILLQYVDDILLAATSELDCQQGTRALLQTLGDLGYRASAKKAQICQKQVKYLGYLLREGQRWLTEARKETVMGQPVPKTPRQLREFLGKAGFCRLFIPGFAEMAAPLYPLTKPGTLFSWGPDQQKAYQEIKQALLTAPALGLPDLTKPFELFVDEKQGYAKGVLTQKLGPWRRPVAYLSKKLDPVAAGWPPCLRMVAAIAVLTKDAGKLTMGQPLVILAPHAVEALVKQPPDRWLSNARMTHYQAMLLDTDRVQFGPVVALNPATLLPLPEEGAPHDCLEILAETHGTRPDLTDQPIPDADHTWYTDGSSFLQEGQRKAGAAVTTETEVIWAGALPAGTSAQRAELIALTQALKMAEGKRLNVYTDSRYAFATAHIHGEIYRRRGWLTSEGREIKNKSEILALLKALFLPKRLSIIHCLGHQKGDSAEARGNRLADQAAREAAIKTPPDTSTLLIAGKRTADGSEFEKRTADGSEFESPKKKAKVE

SEQ ID NO: 6023 - protein, 2091 aa, synthetic construct
MPAAKRVKLDGGDKKYSIGLDIGTNSVGWAVITDEYKVPSKKFKVLGNTDRHSIKKNLIGALLFDSGETAEATRLKRTARRRYTRRKNRICYLQEIFSNEMAKVDDSFFHRLEESFLVEEDKKHERHPIFGNIVDEVAYHEKYPTIYHLRKKLVDSTDKADLRLIYLALAHMIKFRGHFLIEGDLNPDNSDVDKLFIQLVQTYNQLFEENPINASGVDAKAILSARLSKSRRLENLIAQLPGEKKNGLFGNLIALSLGLTPNFKSNFDLAEDAKLQLSKDTYDDDLDNLLAQIGDQYADLFLAAKNLSDAILLSDILRVNTEITKAPLSASMIKRYDEHHQDLTLLKALVRQQLPEKYKEIFFDQSKNGYAGYIDGGASQEEFYKFIKPILEKMDGTEELLVKLNREDLLRKQRTFDNGSIPHQIHLGELHAILRRQEDFYPFLKDNREKIEKILTFRIPYYVGPLARGNSRFAWMTRKSEETITPWNFEEVVDKGASAQSFIERMTNFDKNLPNEKVLPKHSLLYEYFTVYNELTKVKYVTEGMRKPAFLSGEQKKAIVDLLFKTNRKVTVKQLKEDYFKKIECFDSVEISGVEDRFNASLGTYHDLLKIIKDKDFLDNEENEDILEDIVLTLTLFEDREMIEERLKTYAHLFDDKVMKQLKRRRYTGWGRLSRKLINGIRDKQSGKTILDFLKSDGFANRNFMQLIHDDSLTFKEDIQKAQVSGQGDSLHEHIANLAGSPAIKKGILQTVKVVDELVKVMGRHKPENIVIEMARENQTTQKGQKNSRERMKRIEEGIKELGSQILKEHPVENTQLQNEKLYLYYLQNGRDMYVDQELDINRLSDYDVDHIVPQSFLKDDSIDNKVLTRSDKARGKSDNVPSEEVVKKMKNYWRQLLNAKLITQRKFDNLTKAERGGLSELDKAGFIKRQLVETRQITKHVAQILDSRMNTKYDENDKLIREVKVITLKSKLVSDFRKDFQFYKVREINNYHHAHDAYLNAVVGTALIKKYPKLESEFVYGDYKVYDVRKMIAKSEQEIGKATAKYFFYSNIMNFFKTEITLANGEIRKRPLIETNGETGEIVWDKGRDFATVRKVLSMPQVNIVKKTEVQTGGFSKESILPKRNSDKLIARKKDWDPKKYGGFDSPTVAYSVLVVAKVEKGKSKKLKSVKELLGITIMERSSFEKNPIDFLEAKGYKEVKKDLIIKLPKYSLFELENGRKRMLASAGELQKGNELALPSKYVNFLYLASHYEKLKGSPEDNEQKQLFVEQHKHYLDEIIEQISEFSKRVILADANLDKVLSAYNKHRDKPIREQAENIIHLFTLTNLGAPAAFKYFDTTIDRKRYTSTKEVLDATLIHQSITGLYETRIDLSQLGGDGGGGSGGSGGTLGIEDEYRLHETSTEPDVSLGSTWLSDFPQAWAETGGMGLAVRQAPLIIPLKATSTPVSIQQYPMSHEARLGIKPHIQRLLDQGILVPCQSPWNTPLLPVKKPGTNDYRPVQDLREVNKRVEDIHPTVPNPYNLLSGLPPSHQWYTVLDLKDAFFCLRLHPTSQPLFAFEWRDPGMGISGQLTWTRLPQGFKNSPTLFNEALHRDLADFRIQHPDLILLQYVDDILLAATSELDCQQGTRALLQTLGDLGYRASAKKAQICQKQVKYLGYLLREGQRWLTEARKETVMGQPVPKTPRQLREFLGTAGFCRLWIPGFAEMAAPLYPLTKPGTLFSWGPDQQKAYQEIKQALLTAPALGLPDLTKPFELFVDEKQGYAKGVLTQKLGPWRRPVAYLSKKLDPVAAGWPPCLRMVAAIAVLTKDAGKLTMGQPLVILAPHAVEALVKQPPDRWLSNARMTHYQAMLLDTDRVQFGPVVALNPATLLPLPEEGAPHDCLEILAETHGTRPDLTDQPIPDADHTWYTDGSSFLQEGQRKAGAAVTTETEVIWAGALPAGTSAQRAELIALTQALKMAEGKRLNVYTDSRYAFATAHIHGEIYRRRGWLTSEGREIKNKSEILALLKALFLPKRLSIIHCLGHQKGDSAEARGNRLADQAAREAAIKTPPDTSTLLAGKRTADGSEFEKRTADGSEFESPKKKAKVE

SEQ ID NO: 6024 - protein, 2091 aa, synthetic construct
MPAAKRVKLDGGDKKYSIGLDIGTNSVGWAVITDEYKVPSKKFKVLGNTDRHSIKKNLIGALLFDSGETAEATRLKRTARRRYTRRKNRICYLQEIFSNEMAKVDDSFFHRLEESFLVEEDKKHERHPIFGNIVDEVAYHEKYPTIYHLRKKLVDSTDKADLRLIYLALAHMIKFRGHFLIEGDLNPDNSDVDKLFIQLVQTYNQLFEENPINASGVDAKAILSARLSKSRRLENLIAQLPGEKKNGLFGNLIALSLGLTPNFKSNFDLAEDAKLQLSKDTYDDDLDNLLAQIGDQYADLFLAAKNLSDAILLSDILRVNTEITKAPLSASMIKRYDEHHQDLTLLKALVRQQLPEKYKEIFFDQSKNGYAGYIDGGASQEEFYKFIKPILEKMDGTEELLVKLNREDLLRKQRTFDNGSIPHQIHLGELHAILRRQEDFYPFLKDNREKIEKILTFRIPYYVGPLARGNSRFAWMTRKSEETITPWNFEEVVDKGASAQSFIERMTNFDKNLPNEKVLPKHSLLYEYFTVYNELTKVKYVTEGMRKPAFLSGEQKKAIVDLLFKTNRKVTVKQLKEDYFKKIECFDSVEISGVEDRFNASLGTYHDLLKIIKDKDFLDNEENEDILEDIVLTLTLFEDREMIEERLKTYAHLFDDKVMKQLKRRRYTGWGRLSRKLINGIRDKQSGKTILDFLKSDGFANRNFMQLIHDDSLTFKEDIQKAQVSGQGDSLHEHIANLAGSPAIKKGILQTVKVVDELVKVMGRHKPENIVIEMARENQTTQKGQKNSRERMKRIEEGIKELGSQILKEHPVENTQLQNEKLYLYYLQNGRDMYVDQELDINRLSDYDVDHIVPQSFLKDDSIDNKVLTRSDKARGKSDNVPSEEVVKKMKNYWRQLLNAKLITQRKFDNLTKAERGGLSELDKAGFIKRQLVETRQITKHVAQILDSRMNTKYDENDKLIREVKVITLKSKLVSDFRKDFQFYKVREINNYHHAHDAYLNAVVGTALIKKYPKLESEFVYGDYKVYDVRKMIAKSEQEIGKATAKYFFYSNIMNFFKTEITLANGEIRKRPLIETNGETGEIVWDKGRDFATVRKVLSMPQVNIVKKTEVQTGGFSKESILPKRNSDKLIARKKDWDPKKYGGFDSPTVAYSVLVVAKVEKGKSKKLKSVKELLGITIMERSSFEKNPIDFLEAKGYKEVKKDLIIKLPKYSLFELENGRKRMLASAGELQKGNELALPSKYVNFLYLASHYEKLKGSPEDNEQKQLFVEQHKHYLDEIIEQISEFSKRVILADANLDKVLSAYNKHRDKPIREQAENIIHLFTLTNLGAPAAFKYFDTTIDRKRYTSTKEVLDATLIHQSITGLYETRIDLSQLGGDGGGGSGGSGGTLNIEDEYRLHETSKEPDVSLGSTWLSDFPQAWAETGGMGLAVRQAPLIIPLKATSTPVSIKQYPMSQEARLGIKPHIQRLLDQGILVPCQSPWNTPLLPVKKPGTNDYRPVQDLREVNKRVEDIHPTVPNPYNLLSGLPPSHQWYTVLDLKDAFFCLRLHPTSQPLFAFEWRDPEMGISGQLTWTRLPQGFKNSPTLFNEALHRDLAGFRIQHPDLILLQYVDDLLLAATSELDCQQGTRALLQTLGDLGYRASAKKAQICQKQVKYLGYLLKEGQRWLTEARKETVMGQPIPKTPRQLREFLGTAGFCRLWIPGFAEMAAPLYPLTKPGTLFNWGPDQQKAFQEIKQALLTAPALGLPDLTKPFELFVDEKQGYAKGVLTQKLGPWRRPVAYLSKKLDPVAAGWPPCLRMVAAIAVLTKDAGKLTMGQPLVILAPHAVEALVKQPPDRWLSNARMTHYQALLLDTDRVQFGPVVALNPATLLPLPEEGLQHDCLDILAEAHGTRSDLMDQPLPDADHTWYTDGSSFLQEGQRKAGAAVTTETEVIWARALPAGTSAQRAELIALTQALKMAEGKKLNVYTDSRYAFATAHIHGEIYRRRGWLTSEGKEIKNKDEILALLKALFLPKRLSIIHCPGHQKGNSAEARGNRMADQAAREVATRETPETSTLLAGKRTADGSEFEKRTADGSEFESPKKKAKVE

SEQ ID NO: 6025 - protein, 2091 aa, synthetic construct
MPAAKRVKLDGGDKKYSIGLDIGTNSVGWAVITDEYKVPSKKFKVLGNTDRHSIKKNLIGALLFDSGETAEATRLKRTARRRYTRRKNRICYLQEIFSNEMAKVDDSFFHRLEESFLVEEDKKHERHPIFGNIVDEVAYHEKYPTIYHLRKKLVDSTDKADLRLIYLALAHMIKFRGHFLIEGDLNPDNSDVDKLFIQLVQTYNQLFEENPINASGVDAKAILSARLSKSRRLENLIAQLPGEKKNGLFGNLIALSLGLTPNFKSNFDLAEDAKLQLSKDTYDDDLDNLLAQIGDQYADLFLAAKNLSDAILLSDILRVNTEITKAPLSASMIKRYDEHHQDLTLLKALVRQQLPEKYKEIFFDQSKNGYAGYIDGGASQEEFYKFIKPILEKMDGTEELLVKLNREDLLRKQRTFDNGSIPHQIHLGELHAILRRQEDFYPFLKDNREKIEKILTFRIPYYVGPLARGNSRFAWMTRKSEETITPWNFEEVVDKGASAQSFIERMTNFDKNLPNEKVLPKHSLLYEYFTVYNELTKVKYVTEGMRKPAFLSGEQKKAIVDLLFKTNRKVTVKQLKEDYFKKIECFDSVEISGVEDRFNASLGTYHDLLKIIKDKDFLDNEENEDILEDIVLTLTLFEDREMIEERLKTYAHLFDDKVMKQLKRRRYTGWGRLSRKLINGIRDKQSGKTILDFLKSDGFANRNFMQLIHDDSLTFKEDIQKAQVSGQGDSLHEHIANLAGSPAIKKGILQTVKVVDELVKVMGRHKPENIVIEMARENQTTQKGQKNSRERMKRIEEGIKELGSQILKEHPVENTQLQNEKLYLYYLQNGRDMYVDQELDINRLSDYDVDHIVPQSFLKDDSIDNKVLTRSDKARGKSDNVPSEEVVKKMKNYWRQLLNAKLITQRKFDNLTKAERGGLSELDKAGFIKRQLVETRQITKHVAQILDSRMNTKYDENDKLIREVKVITLKSKLVSDFRKDFQFYKVREINNYHHAHDAYLNAVVGTALIKKYPKLESEFVYGDYKVYDVRKMIAKSEQEIGKATAKYFFYSNIMNFFKTEITLANGEIRKRPLIETNGETGEIVWDKGRDFATVRKVLSMPQVNIVKKTEVQTGGFSKESILPKRNSDKLIARKKDWDPKKYGGFDSPTVAYSVLVVAKVEKGKSKKLKSVKELLGITIMERSSFEKNPIDFLEAKGYKEVKKDLIIKLPKYSLFELENGRKRMLASAGELQKGNELALPSKYVNFLYLASHYEKLKGSPEDNEQKQLFVEQHKHYLDEIIEQISEFSKRVILADANLDKVLSAYNKHRDKPIREQAENIIHLFTLTNLGAPAAFKYFDTTIDRKRYTSTKEVLDATLIHQSITGLYETRIDLSQLGGDGGGGSGGSGGTLNIEDEHRLHETSKEPDVSLGSTWLSDFPQAWAETGGMGLAVRQAPLIIPLKATSTPVSIKQYPMSQEARLGIKPHIQRLLDQGILVPCQSPWNTPLLPVKKPGTNDYRPVQDLREVNKRVEDIHPTVPNPYNLLSGLPPSHQWYTVLDLKDAFFCLRLHPTSQPLFAFEWRDPEMGISGQLTWTRLPQGFKNSPTLFNEALHRDLADFRIQHPDLILLQYVDDLLLAATSELDCQQGTRALLQTLGNLGYRASAKKAQICQKQVKYLGYLLKEGQRWLTEARKETVMGQPTPKTPRQLREFLGTAGFCRLWIPGFAEMAAPLYPLTKPGTLFNWGPDQQKAYQEIKQALLTAPALGLPDLTKPFELFVDEKQGYAKGVLTQKLGPWRRPVAYLSKKLDPVAAGWPPCLRMVAAIAVLTKDAGKLTMGQPLVILAPHAVEALVKQPPDRWLSNARMTHYQALLLDTDRVQFGPVVALNPATLLPLPEEGLQHNCLDILAEAHGTRPDLTDQPLPDADHTWYTDGSSLLQEGQRKAGAAVTTETEVIWAKALPAGTSAQRAELIALTQALKMAEGKKLNVYTDSRYAFATAHIHGEIYRRRGWLTSEGKEIKNKDEILALLKALFLPKRLSIIHCPGHQKGHSAEARGNRMADQAARKAAITETPDTSTLLAGKRTADGSEFEKRTADGSEFESPKKKAKVE

SEQ ID NO: 6026 - protein, 2085 aa, synthetic construct
MPAAKRVKLDGGDKKYSIGLDIGTNSVGWAVITDEYKVPSKKFKVLGNTDRHSIKKNLIGALLFDSGETAEATRLKRTARRRYTRRKNRICYLQEIFSNEMAKVDDSFFHRLEESFLVEEDKKHERHPIFGNIVDEVAYHEKYPTIYHLRKKLVDSTDKADLRLIYLALAHMIKFRGHFLIEGDLNPDNSDVDKLFIQLVQTYNQLFEENPINASGVDAKAILSARLSKSRRLENLIAQLPGEKKNGLFGNLIALSLGLTPNFKSNFDLAEDAKLQLSKDTYDDDLDNLLAQIGDQYADLFLAAKNLSDAILLSDILRVNTEITKAPLSASMIKRYDEHHQDLTLLKALVRQQLPEKYKEIFFDQSKNGYAGYIDGGASQEEFYKFIKPILEKMDGTEELLVKLNREDLLRKQRTFDNGSIPHQIHLGELHAILRRQEDFYPFLKDNREKIEKILTFRIPYYVGPLARGNSRFAWMTRKSEETITPWNFEEVVDKGASAQSFIERMTNFDKNLPNEKVLPKHSLLYEYFTVYNELTKVKYVTEGMRKPAFLSGEQKKAIVDLLFKTNRKVTVKQLKEDYFKKIECFDSVEISGVEDRFNASLGTYHDLLKIIKDKDFLDNEENEDILEDIVLTLTLFEDREMIEERLKTYAHLFDDKVMKQLKRRRYTGWGRLSRKLINGIRDKQSGKTILDFLKSDGFANRNFMQLIHDDSLTFKEDIQKAQVSGQGDSLHEHIANLAGSPAIKKGILQTVKVVDELVKVMGRHKPENIVIEMARENQTTQKGQKNSRERMKRIEEGIKELGSQILKEHPVENTQLQNEKLYLYYLQNGRDMYVDQELDINRLSDYDVDHIVPQSFLKDDSIDNKVLTRSDKARGKSDNVPSEEVVKKMKNYWRQLLNAKLITQRKFDNLTKAERGGLSELDKAGFIKRQLVETRQITKHVAQILDSRMNTKYDENDKLIREVKVITLKSKLVSDFRKDFQFYKVREINNYHHAHDAYLNAVVGTALIKKYPKLESEFVYGDYKVYDVRKMIAKSEQEIGKATAKYFFYSNIMNFFKTEITLANGEIRKRPLIETNGETGEIVWDKGRDFATVRKVLSMPQVNIVKKTEVQTGGFSKESILPKRNSDKLIARKKDWDPKKYGGFDSPTVAYSVLVVAKVEKGKSKKLKSVKELLGITIMERSSFEKNPIDFLEAKGYKEVKKDLIIKLPKYSLFELENGRKRMLASAGELQKGNELALPSKYVNFLYLASHYEKLKGSPEDNEQKQLFVEQHKHYLDEIIEQISEFSKRVILADANLDKVLSAYNKHRDKPIREQAENIIHLFTLTNLGAPAAFKYFDTTIDRKRYTSTKEVLDATLIHQSITGLYETRIDLSQLGGDGGGGSGGSGGTLQLDDEYRLYSPLVKPDQNIQFWLEQFPQAWAETAGMGLAKQVPPQVIQLKASATPVSVRQYPLSKEAQEGIRPHVQRLIQQGILVPVQSPWNTPLLPVRKPGTNDYRPVQDLREVNKRVQDIHPTVPNPYNLLCALPPQRSWYTVLDLKDAFFCLRLHPTSQPLFAFEWRDPGTGRTGQLTWTRLPQGFKNSPTIFDEALHRDLANFRIQHPQVTLLQYVDDLLLAGATKQDCLEGTKALLLELSDLGYRASAKKAQICRREVTYLGYSLRDGQRWLTEARKKTVVQIPAPTTAKQVREFLGTAGFCRLWIPGFATLAAPLYPLTKEKGEFSWAPEHQKAFDAIKKALLSAPALALPDVTKPFTLYVDERKGVARGVLTQTLGPWRRPVAYLSKKLDPVASGWPVCLKAIAAVAILVKDADKLTLGQNITVIAPHALENIVRQPPDRWMTNARMTHYQSLLLTERVTFAPPAALNPATLLPEETDEPVTHDCHQLLIEETGVRKDLTDIPLTGEVLTWFTDGSSYVVEGKRMAGAAVVDGTRTIWASSLPEGTSAQKAELMALTQALRLAEGKSINIYTDSRYAFATAHVHGAIYKQRGLLTSAGREIKNKEEILSLLEALHLPKRLAIIHCPGHQKAKDPISRGNQMADRVAKQAAQGVNLLAGKRTADGSEFEKRTADGSEFESPKKKAKVE

SEQ ID NO: 6027 - protein, 2171 aa, synthetic construct
MPAAKRVKLDGGDKKYSIGLDIGTNSVGWAVITDEYKVPSKKFKVLGNTDRHSIKKNLIGALLFDSGETAEATRLKRTARRRYTRRKNRICYLQEIFSNEMAKVDDSFFHRLEESFLVEEDKKHERHPIFGNIVDEVAYHEKYPTIYHLRKKLVDSTDKADLRLIYLALAHMIKFRGHFLIEGDLNPDNSDVDKLFIQLVQTYNQLFEENPINASGVDAKAILSARLSKSRRLENLIAQLPGEKKNGLFGNLIALSLGLTPNFKSNFDLAEDAKLQLSKDTYDDDLDNLLAQIGDQYADLFLAAKNLSDAILLSDILRVNTEITKAPLSASMIKRYDEHHQDLTLLKALVRQQLPEKYKEIFFDQSKNGYAGYIDGGASQEEFYKFIKPILEKMDGTEELLVKLNREDLLRKQRTFDNGSIPHQIHLGELHAILRRQEDFYPFLKDNREKIEKILTFRIPYYVGPLARGNSRFAWMTRKSEETITPWNFEEVVDKGASAQSFIERMTNFDKNLPNEKVLPKHSLLYEYFTVYNELTKVKYVTEGMRKPAFLSGEQKKAIVDLLFKTNRKVTVKQLKEDYFKKIECFDSVEISGVEDRFNASLGTYHDLLKIIKDKDFLDNEENEDILEDIVLTLTLFEDREMIEERLKTYAHLFDDKVMKQLKRRRYTGWGRLSRKLINGIRDKQSGKTILDFLKSDGFANRNFMQLIHDDSLTFKEDIQKAQVSGQGDSLHEHIANLAGSPAIKKGILQTVKVVDELVKVMGRHKPENIVIEMARENQTTQKGQKNSRERMKRIEEGIKELGSQILKEHPVENTQLQNEKLYLYYLQNGRDMYVDQELDINRLSDYDVDHIVPQSFLKDDSIDNKVLTRSDKARGKSDNVPSEEVVKKMKNYWRQLLNAKLITQRKFDNLTKAERGGLSELDKAGFIKRQLVETRQITKHVAQILDSRMNTKYDENDKLIREVKVITLKSKLVSDFRKDFQFYKVREINNYHHAHDAYLNAVVGTALIKKYPKLESEFVYGDYKVYDVRKMIAKSEQEIGKATAKYFFYSNIMNFFKTEITLANGEIRKRPLIETNGETGEIVWDKGRDFATVRKVLSMPQVNIVKKTEVQTGGFSKESILPKRNSDKLIARKKDWDPKKYGGFDSPTVAYSVLVVAKVEKGKSKKLKSVKELLGITIMERSSFEKNPIDFLEAKGYKEVKKDLIIKLPKYSLFELENGRKRMLASAGELQKGNELALPSKYVNFLYLASHYEKLKGSPEDNEQKQLFVEQHKHYLDEIIEQISEFSKRVILADANLDKVLSAYNKHRDKPIREQAENIIHLFTLTNLGAPAAFKYFDTTIDRKRYTSTKEVLDATLIHQSITGLYETRIDLSQLGGDGGGGSGGSGGMDPLQLLQPLEAEIKGTKLKAHWNSGATITCVPQAFLEEEVPIKNIWIKTIHGEKEQPVYYLTFKIQGRKVEAEVISSPYDYILVSPSDIPWLMKKPLQLTTLVPLQEYEERLLKQTMLTGSYKEKLQSLFLKYDALWQHWENQVGHRRIKPHHIATGTVNPRPQKQYPINPKAKASIQTVINDLLKQGVLIQQNSIMNTPVYPVPKPDGKWRMVLDYREVNKTIPLIAAQNQHSAGILSSIFRGKYKTTLDLSNGFWAHSITPESYWLTAFTWLGQQYCWTRLPQGFLNSPALFNADVVDLLKEVPNVQVYVDDIYISHDDPREHLEQLEKVFSLLLNAGYVVSLKKSEIAQHEVEFLGFNITKEGRGLTETFKQKLLNITPPRDLKQLQSILGLLNFARNFIPNFSELVKPLYNIIATAPGKYITWTTDNSQQLQNIISMLNSAENLEERNPEVRLIMKVNTSPSAGYIRFYNEFAKRPIMYLNYVYTKAEVKFTNTEKLLTTIHKGLIKALDLGMGQEILVYSPIVSMTKIQKTPLPERKALPIRWITWMSYLEDPRIQFHYDKTLPELQQVPTVTDDIIAKIKHPSEFSMVFYTDGSAIKHPNVNKSHNAGMGIAQVQFKPEFTVINTWSIPLGDHTAQLAEVAAVEFACKKALKIDGPVLIVTDSFYVAESVNKELPYWQSNGFFNNKKKPLKHVSKWKSIADCIQLKPDIIIIHEKGHQPTASTFHTEGNNLADKLATQGSYVVNAGKRTADGSEFEKRTADGSEFESPKKKAKVE

SEQ ID NO: 6028 - protein, 2091 aa, synthetic construct
MPAAKRVKLDGGDKKYSIGLDIGTNSVGWAVITDEYKVPSKKFKVLGNTDRHSIKKNLIGALLFDSGETAEATRLKRTARRRYTRRKNRICYLQEIFSNEMAKVDDSFFHRLEESFLVEEDKKHERHPIFGNIVDEVAYHEKYPTIYHLRKKLVDSTDKADLRLIYLALAHMIKFRGHFLIEGDLNPDNSDVDKLFIQLVQTYNQLFEENPINASGVDAKAILSARLSKSRRLENLIAQLPGEKKNGLFGNLIALSLGLTPNFKSNFDLAEDAKLQLSKDTYDDDLDNLLAQIGDQYADLFLAAKNLSDAILLSDILRVNTEITKAPLSASMIKRYDEHHQDLTLLKALVRQQLPEKYKEIFFDQSKNGYAGYIDGGASQEEFYKFIKPILEKMDGTEELLVKLNREDLLRKQRTFDNGSIPHQIHLGELHAILRRQEDFYPFLKDNREKIEKILTFRIPYYVGPLARGNSRFAWMTRKSEETITPWNFEEVVDKGASAQSFIERMTNFDKNLPNEKVLPKHSLLYEYFTVYNELTKVKYVTEGMRKPAFLSGEQKKAIVDLLFKTNRKVTVKQLKEDYFKKIECFDSVEISGVEDRFNASLGTYHDLLKIIKDKDFLDNEENEDILEDIVLTLTLFEDREMIEERLKTYAHLFDDKVMKQLKRRRYTGWGRLSRKLINGIRDKQSGKTILDFLKSDGFANRNFMQLIHDDSLTFKEDIQKAQVSGQGDSLHEHIANLAGSPAIKKGILQTVKVVDELVKVMGRHKPENIVIEMARENQTTQKGQKNSRERMKRIEEGIKELGSQILKEHPVENTQLQNEKLYLYYLQNGRDMYVDQELDINRLSDYDVDHIVPQSFLKDDSIDNKVLTRSDKARGKSDNVPSEEVVKKMKNYWRQLLNAKLITQRKFDNLTKAERGGLSELDKAGFIKRQLVETRQITKHVAQILDSRMNTKYDENDKLIREVKVITLKSKLVSDFRKDFQFYKVREINNYHHAHDAYLNAVVGTALIKKYPKLESEFVYGDYKVYDVRKMIAKSEQEIGKATAKYFFYSNIMNFFKTEITLANGEIRKRPLIETNGETGEIVWDKGRDFATVRKVLSMPQVNIVKKTEVQTGGFSKESILPKRNSDKLIARKKDWDPKKYGGFDSPTVAYSVLVVAKVEKGKSKKLKSVKELLGITIMERSSFEKNPIDFLEAKGYKEVKKDLIIKLPKYSLFELENGRKRMLASAGELQKGNELALPSKYVNFLYLASHYEKLKGSPEDNEQKQLFVEQHKHYLDEIIEQISEFSKRVILADANLDKVLSAYNKHRDKPIREQAENIIHLFTLTNLGAPAAFKYFDTTIDRKRYTSTKEVLDATLIHQSITGLYETRIDLSQLGGDGGGGSGGSGGTLNIEDEYRLHETSKEPDVPLGSTWLSDFPQAWAETGGMGLAVRQAPLIIPLKATSTPVSIKQYPMSQEARLGIKPHIQRLLDQGILVPCQSPWNTPLLPVKKPGTNDYRPVQDLREVNKRVEDIHPTVPNPYNLLSGLPPSHQWYTVLDLKDAFFCLRLHPTSQPLFAFEWRDPEMGISGQLTWTRLPQGFKNSPTLFNEALHRDLADFRIQHPDLILLQYVDDLLLAATSEQDCQRGTRALLQTLGNLGYRASAKKAQICQKQVKYLGYLLKEGQRWLTEARKETVMGQPTPKTPRQLREFLGTAGFCRLWIPGFAEMAAPLYPLTKPGTLFNWGPDQQKAYQEIKQALLTAPALGLPDLTKPFELFVDEKQGYAKGVLTQKLGPWRRPVAYLSKKLDPVAAGWPPCLRMVAAIAVLTKDAGKLTMGQPLVILAPHAVEALVKQPPDRWLSNARMTHYQAMLLDTDRVQFGPVVALNPATLLPLPEKEAPHDCLEILAETHGTRPDLTDQPIPDADYTWYTDGSSFLQEGQRRAGAAVTTETEVIWARALPAGTSAQRAELIALTQALKMAEGKKLNVYTDSRYAFATAHVHGEIYRRRGWLTSEGREIKNKNEILALLKALFLPKRLSIIHCPGHQKGNSAEARGNRMADQAAREAAMKAVLETSTLLAGKRTADGSEFEKRTADGSEFESPKKKAKVE

SEQ ID NO: 6029 - protein, 2096 aa, synthetic construct
MPAAKRVKLDGGDKKYSIGLDIGTNSVGWAVITDEYKVPSKKFKVLGNTDRHSIKKNLIGALLFDSGETAEATRLKRTARRRYTRRKNRICYLQEIFSNEMAKVDDSFFHRLEESFLVEEDKKHERHPIFGNIVDEVAYHEKYPTIYHLRKKLVDSTDKADLRLIYLALAHMIKFRGHFLIEGDLNPDNSDVDKLFIQLVQTYNQLFEENPINASGVDAKAILSARLSKSRRLENLIAQLPGEKKNGLFGNLIALSLGLTPNFKSNFDLAEDAKLQLSKDTYDDDLDNLLAQIGDQYADLFLAAKNLSDAILLSDILRVNTEITKAPLSASMIKRYDEHHQDLTLLKALVRQQLPEKYKEIFFDQSKNGYAGYIDGGASQEEFYKFIKPILEKMDGTEELLVKLNREDLLRKQRTFDNGSIPHQIHLGELHAILRRQEDFYPFLKDNREKIEKILTFRIPYYVGPLARGNSRFAWMTRKSEETITPWNFEEVVDKGASAQSFIERMTNFDKNLPNEKVLPKHSLLYEYFTVYNELTKVKYVTEGMRKPAFLSGEQKKAIVDLLFKTNRKVTVKQLKEDYFKKIECFDSVEISGVEDRFNASLGTYHDLLKIIKDKDFLDNEENEDILEDIVLTLTLFEDREMIEERLKTYAHLFDDKVMKQLKRRRYTGWGRLSRKLINGIRDKQSGKTILDFLKSDGFANRNFMQLIHDDSLTFKEDIQKAQVSGQGDSLHEHIANLAGSPAIKKGILQTVKVVDELVKVMGRHKPENIVIEMARENQTTQKGQKNSRERMKRIEEGIKELGSQILKEHPVENTQLQNEKLYLYYLQNGRDMYVDQELDINRLSDYDVDHIVPQSFLKDDSIDNKVLTRSDKARGKSDNVPSEEVVKKMKNYWRQLLNAKLITQRKFDNLTKAERGGLSELDKAGFIKRQLVETRQITKHVAQILDSRMNTKYDENDKLIREVKVITLKSKLVSDFRKDFQFYKVREINNYHHAHDAYLNAVVGTALIKKYPKLESEFVYGDYKVYDVRKMIAKSEQEIGKATAKYFFYSNIMNFFKTEITLANGEIRKRPLIETNGETGEIVWDKGRDFATVRKVLSMPQVNIVKKTEVQTGGFSKESILPKRNSDKLIARKKDWDPKKYGGFDSPTVAYSVLVVAKVEKGKSKKLKSVKELLGITIMERSSFEKNPIDFLEAKGYKEVKKDLIIKLPKYSLFELENGRKRMLASAGELQKGNELALPSKYVNFLYLASHYEKLKGSPEDNEQKQLFVEQHKHYLDEIIEQISEFSKRVILADANLDKVLSAYNKHRDKPIREQAENIIHLFTLTNLGAPAAFKYFDTTIDRKRYTSTKEVLDATLIHQSITGLYETRIDLSQLGGDGGGGSGGSGGSGGTAPLEEEYRLFLEAPIQNVTLLEQWKREIPKVWAEINPPGLASTQAPIHVQLLSTALPVRVRQYPITLEAKRSLRETIRKFRAAGILRPVHSPWNTPLLPVRKSGTSEYRMVQDLREVNKRVETIHPTVPNPYTLLSLLPPDRIWYSVLDLKDAFFCIPLAPESQLIFAFEWADAEEGESGQLTWTRLPQGFKNSPTLFNEALNRDLQGFRLDHPSVSLLQYVDDLLIAADTQAACLSATRDLLMTLAELGYRVSGKKAQLCQEEVTYLGFKIHKGSRSLSNSRTQAILQIPVPKTKRQVREFLGTIGYCRLWIPGFAELAQPLYAATRPGNDPLVWGEKEEEAFQSLKLALTQPPALALPSLDKPFQLFVEETSGAAKGVLTQALGPWKRPVAYLSKRLDPVAAGWPRCLRAIAAAALLTREASKLTFGQDIEITSSHNLESLLRSPPDKWLTNARITQYQVLLLDPPRVRFKQTAALNPATLLPETDDTLPIHHCLDTLDSLTSTRPDLTDQPLAQAEATLFTDGSSYIRDGKRYAGAAVVTLDSVIWAEPLPIGTSAQKAELIALTKALEWSKDKSVNIYTDSRYAFATLHVHGMIYRERGWLTAGGKAIKNAPEILALLTAVWLPKRVAVMHCKGHQKDDAPTSTGNRRADEVAREVAIRPLSTQATISAGKRTADGSEFEKRTADGSEFESPKKKAKVE

SEQ ID NO: 6030 - protein, 2096 aa, synthetic construct; identical to SEQ ID NO: 4501

SEQ ID NO: 6031 - protein, 2093 aa, synthetic construct
MPAAKRVKLDGGDKKYSIGLDIGTNSVGWAVITDEYKVPSKKFKVLGNTDRHSIKKNLIGALLFDSGETAEATRLKRTARRRYTRRKNRICYLQEIFSNEMAKVDDSFFHRLEESFLVEEDKKHERHPIFGNIVDEVAYHEKYPTIYHLRKKLVDSTDKADLRLIYLALAHMIKFRGHFLIEGDLNPDNSDVDKLFIQLVQTYNQLFEENPINASGVDAKAILSARLSKSRRLENLIAQLPGEKKNGLFGNLIALSLGLTPNFKSNFDLAEDAKLQLSKDTYDDDLDNLLAQIGDQYADLFLAAKNLSDAILLSDILRVNTEITKAPLSASMIKRYDEHHQDLTLLKALVRQQLPEKYKEIFFDQSKNGYAGYIDGGASQEEFYKFIKPILEKMDGTEELLVKLNREDLLRKQRTFDNGSIPHQIHLGELHAILRRQEDFYPFLKDNREKIEKILTFRIPYYVGPLARGNSRFAWMTRKSEETITPWNFEEVVDKGASAQSFIERMTNFDKNLPNEKVLPKHSLLYEYFTVYNELTKVKYVTEGMRKPAFLSGEQKKAIVDLLFKTNRKVTVKQLKEDYFKKIECFDSVEISGVEDRFNASLGTYHDLLKIIKDKDFLDNEENEDILEDIVLTLTLFEDREMIEERLKTYAHLFDDKVMKQLKRRRYTGWGRLSRKLINGIRDKQSGKTILDFLKSDGFANRNFMQLIHDDSLTFKEDIQKAQVSGQGDSLHEHIANLAGSPAIKKGILQTVKVVDELVKVMGRHKPENIVIEMARENQTTQKGQKNSRERMKRIEEGIKELGSQILKEHPVENTQLQNEKLYLYYLQNGRDMYVDQELDINRLSDYDVDHIVPQSFLKDDSIDNKVLTRSDKARGKSDNVPSEEVVKKMKNYWRQLLNAKLITQRKFDNLTKAERGGLSELDKAGFIKRQLVETRQITKHVAQILDSRMNTKYDENDKLIREVKVITLKSKLVSDFRKDFQFYKVREINNYHHAHDAYLNAVVGTALIKKYPKLESEFVYGDYKVYDVRKMIAKSEQEIGKATAKYFFYSNIMNFFKTEITLANGEIRKRPLIETNGETGEIVWDKGRDFATVRKVLSMPQVNIVKKTEVQTGGFSKESILPKRNSDKLIARKKDWDPKKYGGFDSPTVAYSVLVVAKVEKGKSKKLKSVKELLGITIMERSSFEKNPIDFLEAKGYKEVKKDLIIKLPKYSLFELENGRKRMLASAGELQKGNELALPSKYVNFLYLASHYEKLKGSPEDNEQKQLFVEQHKHYLDEIIEQISEFSKRVILADANLDKVLSAYNKHRDKPIREQAENIIHLFTLTNLGAPAAFKYFDTTIDRKRYTSTKEVLDATLIHQSITGLYETRIDLSQLGGDGGGGSGGSGGSGGTLQLEEEYRLFEPESTQKQEMDIWLKNFPQAWAETGGMGTAHCQAPVLIQLKATATPISIRQYPMPHEAYQGIKPHIRRMLDQGILKPCQSPWNTPLLPVKKPGTEDYRPVQDLREVNKRVEDIHPTVPNPYNLLSTLPPSHPWYTVLDLKDAFFCLRLHSESQLLFAFEWRDPEIGLSGQLTWTRLPQGFKNSPTLFNEALHSDLADFRVRYPALVLLQYVDDLLLAAATRTECLEGTKALLETLGNKGYRASAKKAQICLQEVTYLGYSLKDGQRWLTKARKEAILSIPVPKNSRQVREFLGKAGYCRLFIPGFAELAAPLYPLTRPGTLFQWGTEQQLAFEDIKKALLSSPALGLPDITKPFELFIDENSGFAKGVLVQKLGPWKRPVAYLSKKLDTVASGWPPCLRMVAAIAILVKDAGKLTLGQPLTILTSHPVEALVRQPPNKWLSNARMTHYQAMLLDAERVHFGPTVSLNPATLLPLPSGGNHHDCLQILAETHGTRPDLTDQPLPDADLTWYTDGSSFIRNGEREAGAAVTTESEVIWAAPLPPGTSAQRAELIALTQALKMAEGKKLTVYTDSRYAFATTHVHGEIYRRRGWLTSEGKEIKNKNEILALLEALFLPKRLSIIHCPGHQKGDSPQAKGNRLADDTAKKAATETHSSLTVLPAGKRTADGSEFEKRTADGSEFESPKKKAKVE

SEQ ID NO: 6032 - protein, 2094 aa, synthetic construct
MPAAKRVKLDGGDKKYSIGLDIGTNSVGWAVITDEYKVPSKKFKVLGNTDRHSIKKNLIGALLFDSGETAEATRLKRTARRRYTRRKNRICYLQEIFSNEMAKVDDSFFHRLEESFLVEEDKKHERHPIFGNIVDEVAYHEKYPTIYHLRKKLVDSTDKADLRLIYLALAHMIKFRGHFLIEGDLNPDNSDVDKLFIQLVQTYNQLFEENPINASGVDAKAILSARLSKSRRLENLIAQLPGEKKNGLFGNLIALSLGLTPNFKSNFDLAEDAKLQLSKDTYDDDLDNLLAQIGDQYADLFLAAKNLSDAILLSDILRVNTEITKAPLSASMIKRYDEHHQDLTLLKALVRQQLPEKYKEIFFDQSKNGYAGYIDGGASQEEFYKFIKPILEKMDGTEELLVKLNREDLLRKQRTFDNGSIPHQIHLGELHAILRRQEDFYPFLKDNREKIEKILTFRIPYYVGPLARGNSRFAWMTRKSEETITPWNFEEVVDKGASAQSFIERMTNFDKNLPNEKVLPKHSLLYEYFTVYNELTKVKYVTEGMRKPAFLSGEQKKAIVDLLFKTNRKVTVKQLKEDYFKKIECFDSVEISGVEDRFNASLGTYHDLLKIIKDKDFLDNEENEDILEDIVLTLTLFEDREMIEERLKTYAHLFDDKVMKQLKRRRYTGWGRLSRKLINGIRDKQSGKTILDFLKSDGFANRNFMQLIHDDSLTFKEDIQKAQVSGQGDSLHEHIANLAGSPAIKKGILQTVKVVDELVKVMGRHKPENIVIEMARENQTTQKGQKNSRERMKRIEEGIKELGSQILKEHPVENTQLQNEKLYLYYLQNGRDMYVDQELDINRLSDYDVDHIVPQSFLKDDSIDNKVLTRSDKARGKSDNVPSEEVVKKMKNYWRQLLNAKLITQRKFDNLTKAERGGLSELDKAGFIKRQLVETRQITKHVAQILDSRMNTKYDENDKLIREVKVITLKSKLVSDFRKDFQFYKVREINNYHHAHDAYLNAVVGTALIKKYPKLESEFVYGDYKVYDVRKMIAKSEQEIGKATAKYFFYSNIMNFFKTEITLANGEIRKRPLIETNGETGEIVWDKGRDFATVRKVLSMPQVNIVKKTEVQTGGFSKESILPKRNSDKLIARKKDWDPKKYGGFDSPTVAYSVLVVAKVEKGKSKKLKSVKELLGITIMERSSFEKNPIDFLEAKGYKEVKKDLIIKLPKYSLFELENGRKRMLASAGELQKGNELALPSKYVNFLYLASHYEKLKGSPEDNEQKQLFVEQHKHYLDEIIEQISEFSKRVILADANLDKVLSAYNKHRDKPIREQAENIIHLFTLTNLGAPAAFKYFDTTIDRKRYTSTKEVLDATLIHQSITGLYETRIDLSQLGGDGGGGSGGSGGSGGTLNLEDEYRLYETSAEPEVSPGSTWLSDFPQAWAETGGMGLAVRQAPLIIPLKATSTPVSIKQYPMSQEAKLGIKPHIQRLLDQGILVPCQSPWNTPLLPVKKPGTNDYRPVQDLREVNKRVEDIHPTVPNPYNLLSGLPPSHRWYTVLDLKDAFFCLRLHPTSQPLFAFEWRDPGMGISGQLTWTRLPQGFKNSPTLFNEALHRDLADFRIQHPDLILLQYVDDILLAATSELDCQQGTRALLLTLGNLGYRASAKKAQLCQKQVKYLGYLLKEGQRWLTEARKETVMGQPTPKTPRQLREFLGTAGFCRLWIPGFAEMAAPLYPLTKPGTLFNWGPDQQKAYQEIKQALLTAPALGLPDLTKPFELFVDEKQGYAKGVLTQKLGPWRRPVAYLSKKLDPVAAGWPPCLRMVAAIAVLRKDAGKLTMGQPLVILAPHAVEALVKQPPDRWLSNARMTHYQAMLLDTDRVQFGPVVALNPATLLPLPEEGAPHDCLEILAETHGTRPDLTDQPIPDADHTWYTDGSSFLQEGQRKAGAAVTTETEVIWARALPAGTSAQRAELIALTQALKMAEGKRLNVYTDSRYAFATAHIHGEIYRRRGWLTSEGREIKNKSEILALLKALFLPKRLSIIHCLGHQKGDSAEARGNRLADQAAREAAIKTPPDTSTLLAGKRTADGSEFEKRTADGSEFESPKKKAKVE

SEQ ID NO: 6033 - protein, 2094 aa, synthetic construct
MPAAKRVKLDGGDKKYSIGLDIGTNSVGWAVITDEYKVPSKKFKVLGNTDRHSIKKNLIGALLFDSGETAEATRLKRTARRRYTRRKNRICYLQEIFSNEMAKVDDSFFHRLEESFLVEEDKKHERHPIFGNIVDEVAYHEKYPTIYHLRKKLVDSTDKADLRLIYLALAHMIKFRGHFLIEGDLNPDNSDVDKLFIQLVQTYNQLFEENPINASGVDAKAILSARLSKSRRLENLIAQLPGEKKNGLFGNLIALSLGLTPNFKSNFDLAEDAKLQLSKDTYDDDLDNLLAQIGDQYADLFLAAKNLSDAILLSDILRVNTEITKAPLSASMIKRYDEHHQDLTLLKALVRQQLPEKYKEIFFDQSKNGYAGYIDGGASQEEFYKFIKPILEKMDGTEELLVKLNREDLLRKQRTFDNGSIPHQIHLGELHAILRRQEDFYPFLKDNREKIEKILTFRIPYYVGPLARGNSRFAWMTRKSEETITPWNFEEVVDKGASAQSFIERMTNFDKNLPNEKVLPKHSLLYEYFTVYNELTKVKYVTEGMRKPAFLSGEQKKAIVDLLFKTNRKVTVKQLKEDYFKKIECFDSVEISGVEDRFNASLGTYHDLLKIIKDKDFLDNEENEDILEDIVLTLTLFEDREMIEERLKTYAHLFDDKVMKQLKRRRYTGWGRLSRKLINGIRDKQSGKTILDFLKSDGFANRNFMQLIHDDSLTFKEDIQKAQVSGQGDSLHEHIANLAGSPAIKKGILQTVKVVDELVKVMGRHKPENIVIEMARENQTTQKGQKNSRERMKRIEEGIKELGSQILKEHPVENTQLQNEKLYLYYLQNGRDMYVDQELDINRLSDYDVDHIVPQSFLKDDSIDNKVLTRSDKARGKSDNVPSEEVVKKMKNYWRQLLNAKLITQRKFDNLTKAERGGLSELDKAGFIKRQLVETRQITKHVAQILDSRMNTKYDENDKLIREVKVITLKSKLVSDFRKDFQFYKVREINNYHHAHDAYLNAVVGTALIKKYPKLESEFVYGDYKVYDVRKMIAKSEQEIGKATAKYFFYSNIMNFFKTEITLANGEIRKRPLIETNGETGEIVWDKGRDFATVRKVLSMPQVNIVKKTEVQTGGFSKESILPKRNSDKLIARKKDWDPKKYGGFDSPTVAYSVLVVAKVEKGKSKKLKSVKELLGITIMERSSFEKNPIDFLEAKGYKEVKKDLIIKLPKYSLFELENGRKRMLASAGELQKGNELALPSKYVNFLYLASHYEKLKGSPEDNEQKQLFVEQHKHYLDEIIEQISEFSKRVILADANLDKVLSAYNKHRDKPIREQAENIIHLFTLTNLGAPAAFKYFDTTIDRKRYTSTKEVLDATLIHQSITGLYETRIDLSQLGGDGGGGSGGSGGSGGTLNLEDEYRLYETSAEPEVSPGSTWLSDFPQAWAETGGMGLAVRQAPLIIPLKATSTPVSIKQYPMSQEAKLGIKPHIQRLLDQGILVPCQSPWNTPLLPVKKPGTNDYRPVQDLREVNKRVEDIHPTVPNPYNLLSGLPPSHRWYTVLDLKDAFFCLRLHPTSQPLFAFEWRDPGMGISGQLTWTRLPQGFKNSPTLFNEALHRDLADFRIQHPDLILLQYVDDILLAATSELDCQQGTRALLLTLGNLGYRASAKKAQLCQKQVKYLGYLLKEGQRWLTEARKETVMGQPTPKTPRQLREFLGKAGFCRLFIPGFAEMAAPLYPLTKPGTLFNWGPDQQKAYQEIKQALLTAPALGLPDLTKPFELFVDEKQGYAKGVLTQKLGPWRRPVAYLSKKLDPVAAGWPPCLRMVAAIAVLRKDAGKLTMGQPLVILAPHAVEALVKQPPDRWLSNARMTHYQAMLLDTDRVQFGPVVALNPATLLPLPEEGAPHDCLEILAETHGTRPDLTDQPIPDADHTWYTDGSSFLQEGQRKAGAAVTTETEVIWARALPAGTSAQRAELIALTQALKMAEGKRLNVYTDSRYAFATAHIHGEIYRRRGWLTSEGREIKNKSEILALLKALFLPKRLSIIHCLGHQKGDSAEARGNRLADQAAREAAIKTPPDTSTLLAGKRTADGSEFEKRTADGSEFESPKKKAKVE

SEQ ID NO: 6034 - protein, 2094 aa, synthetic construct
MPAAKRVKLDGGDKKYSIGLDIGTNSVGWAVITDEYKVPSKKFKVLGNTDRHSIKKNLIGALLFDSGETAEATRLKRTARRRYTRRKNRICYLQEIFSNEMAKVDDSFFHRLEESFLVEEDKKHERHPIFGNIVDEVAYHEKYPTIYHLRKKLVDSTDKADLRLIYLALAHMIKFRGHFLIEGDLNPDNSDVDKLFIQLVQTYNQLFEENPINASGVDAKAILSARLSKSRRLENLIAQLPGEKKNGLFGNLIALSLGLTPNFKSNFDLAEDAKLQLSKDTYDDDLDNLLAQIGDQYADLFLAAKNLSDAILLSDILRVNTEITKAPLSASMIKRYDEHHQDLTLLKALVRQQLPEKYKEIFFDQSKNGYAGYIDGGASQEEFYKFIKPILEKMDGTEELLVKLNREDLLRKQRTFDNGSIPHQIHLGELHAILRRQEDFYPFLKDNREKIEKILTFRIPYYVGPLARGNSRFAWMTRKSEETITPWNFEEVVDKGASAQSFIERMTNFDKNLPNEKVLPKHSLLYEYFTVYNELTKVKYVTEGMRKPAFLSGEQKKAIVDLLFKTNRKVTVKQLKEDYFKKIECFDSVEISGVEDRFNASLGTYHDLLKIIKDKDFLDNEENEDILEDIVLTLTLFEDREMIEERLKTYAHLFDDKVMKQLKRRRYTGWGRLSRKLINGIRDKQSGKTILDFLKSDGFANRNFMQLIHDDSLTFKEDIQKAQVSGQGDSLHEHIANLAGSPAIKKGILQTVKVVDELVKVMGRHKPENIVIEMARENQTTQKGQKNSRERMKRIEEGIKELGSQILKEHPVENTQLQNEKLYLYYLQNGRDMYVDQELDINRLSDYDVDHIVPQSFLKDDSIDNKVLTRSDKARGKSDNVPSEEVVKKMKNYWRQLLNAKLITQRKFDNLTKAERGGLSELDKAGFIKRQLVETRQITKHVAQILDSRMNTKYDENDKLIREVKVITLKSKLVSDFRKDFQFYKVREINNYHHAHDAYLNAVVGTALIKKYPKLESEFVYGDYKVYDVRKMIAKSEQEIGKATAKYFFYSNIMNFFKTEITLANGEIRKRPLIETNGETGEIVWDKGRDFATVRKVLSMPQVNIVKKTEVQTGGFSKESILPKRNSDKLIARKKDWDPKKYGGFDSPTVAYSVLVVAKVEKGKSKKLKSVKELLGITIMERSSFEKNPIDFLEAKGYKEVKKDLIIKLPKYSLFELENGRKRMLASAGELQKGNELALPSKYVNFLYLASHYEKLKGSPEDNEQKQLFVEQHKHYLDEIIEQISEFSKRVILADANLDKVLSAYNKHRDKPIREQAENIIHLFTLTNLGAPAAFKYFDTTIDRKRYTSTKEVLDATLIHQSITGLYETRIDLSQLGGDGGGGSGGSGGSGGLGIEDEYRLHETSTEPDVSLGSTWLSDFPQAWAETGGMGLAVRQAPLIIPLKATSTPVSIQQYPMSHEARLGIKPHIQRLLDQGILVPCQSPWNTPLLPVKKPGTNDYRPVQDLREVNKRVEDIHPTVPNPYNLLSGLPPSHQWYTVLDLKDAFFCLRLHPTSQPLFAFEWRDPGMGISGQLTWTRLPQGFKNSPTLFNEALHRDLADFRIQHPDLILLQYVDDILLAATSELDCQQGTRALLQTLGDLGYRASAKKAQICQKQVKYLGYLLREGQRWLTEARKETVMGQPVPKTPRQLREFLGKAGFCRLFIPGFAEMAAPLYPLTKPGTLFSWGPDQQKAYQEIKQALLTAPALGLPDLTKPFELFVDEKQGYAKGVLTQKLGPWRRPVAYLSKKLDPVAAGWPPCLRMVAAIAVLTKDAGKLTMGQPLVILAPHAVEALVKQPPDRWLSNARMTHYQAMLLDTDRVQFGPVVALNPATLLPLPEEGAPHDCLEILAETHGTRPDLTDQPIPDADHTWYTDGSSFLQEGQRKAGAAVTTETEVIWAGALPAGTSAQRAELIALTQALKMAEGKRLNVYTDSRYAFATAHIHGEIYRRRGWLTSEGREIKNKSEILALLKALFLPKRLSIIHCLGHQKGDSAEARGNRLADQAAREAAIKTPPDTSTLLIAGKRTADGSEFEKRTADGSEFESPKKKAKVE

SEQ ID NO: 6035 - protein, 2094 aa, synthetic construct
MPAAKRVKLDGGDKKYSIGLDIGTNSVGWAVITDEYKVPSKKFKVLGNTDRHSIKKNLIGALLFDSGETAEATRLKRTARRRYTRRKNRICYLQEIFSNEMAKVDDSFFHRLEESFLVEEDKKHERHPIFGNIVDEVAYHEKYPTIYHLRKKLVDSTDKADLRLIYLALAHMIKFRGHFLIEGDLNPDNSDVDKLFIQLVQTYNQLFEENPINASGVDAKAILSARLSKSRRLENLIAQLPGEKKNGLFGNLIALSLGLTPNFKSNFDLAEDAKLQLSKDTYDDDLDNLLAQIGDQYADLFLAAKNLSDAILLSDILRVNTEITKAPLSASMIKRYDEHHQDLTLLKALVRQQLPEKYKEIFFDQSKNGYAGYIDGGASQEEFYKFIKPILEKMDGTEELLVKLNREDLLRKQRTFDNGSIPHQIHLGELHAILRRQEDFYPFLKDNREKIEKILTFRIPYYVGPLARGNSRFAWMTRKSEETITPWNFEEVVDKGASAQSFIERMTNFDKNLPNEKVLPKHSLLYEYFTVYNELTKVKYVTEGMRKPAFLSGEQKKAIVDLLFKTNRKVTVKQLKEDYFKKIECFDSVEISGVEDRFNASLGTYHDLLKIIKDKDFLDNEENEDILEDIVLTLTLFEDREMIEERLKTYAHLFDDKVMKQLKRRRYTGWGRLSRKLINGIRDKQSGKTILDFLKSDGFANRNFMQLIHDDSLTFKEDIQKAQVSGQGDSLHEHIANLAGSPAIKKGILQTVKVVDELVKVMGRHKPENIVIEMARENQTTQKGQKNSRERMKRIEEGIKELGSQILKEHPVENTQLQNEKLYLYYLQNGRDMYVDQELDINRLSDYDVDHIVPQSFLKDDSIDNKVLTRSDKARGKSDNVPSEEVVKKMKNYWRQLLNAKLITQRKFDNLTKAERGGLSELDKAGFIKRQLVETRQITKHVAQILDSRMNTKYDENDKLIREVKVITLKSKLVSDFRKDFQFYKVREINNYHHAHDAYLNAVVGTALIKKYPKLESEFVYGDYKVYDVRKMIAKSEQEIGKATAKYFFYSNIMNFFKTEITLANGEIRKRPLIETNGETGEIVWDKGRDFATVRKVLSMPQVNIVKKTEVQTGGFSKESILPKRNSDKLIARKKDWDPKKYGGFDSPTVAYSVLVVAKVEKGKSKKLKSVKELLGITIMERSSFEKNPIDFLEAKGYKEVKKDLIIKLPKYSLFELENGRKRMLASAGELQKGNELALPSKYVNFLYLASHYEKLKGSPEDNEQKQLFVEQHKHYLDEIIEQISEFSKRVILADANLDKVLSAYNKHRDKPIREQAENIIHLFTLTNLGAPAAFKYFDTTIDRKRYTSTKEVLDATLIHQSITGLYETRIDLSQLGGDGGGGSGGSGGSGGTLGIEDEYRLHETSTEPDVSLGSTWLSDFPQAWAETGGMGLAVRQAPLIIPLKATSTPVSIQQYPMSHEARLGIKPHIQRLLDQGILVPCQSPWNTPLLPVKKPGTNDYRPVQDLREVNKRVEDIHPTVPNPYNLLSGLPPSHQWYTVLDLKDAFFCLRLHPTSQPLFAFEWRDPGMGISGQLTWTRLPQGFKNSPTLFNEALHRDLADFRIQHPDLILLQYVDDILLAATSELDCQQGTRALLQTLGDLGYRASAKKAQICQKQVKYLGYLLREGQRWLTEARKETVMGQPVPKTPRQLREFLGTAGFCRLWIPGFAEMAAPLYPLTKPGTLFSWGPDQQKAYQEIKQALLTAPALGLPDLTKPFELFVDEKQGYAKGVLTQKLGPWRRPVAYLSKKLDPVAAGWPPCLRMVAAIAVLTKDAGKLTMGQPLVILAPHAVEALVKQPPDRWLSNARMTHYQAMLLDTDRVQFGPVVALNPATLLPLPEEGAPHDCLEILAETHGTRPDLTDQPIPDADHTWYTDGSSFLQEGQRKAGAAVTTETEVIWAGALPAGTSAQRAELIALTQALKMAEGKRLNVYTDSRYAFATAHIHGEIYRRRGWLTSEGREIKNKSEILALLKALFLPKRLSIIHCLGHQKGDSAEARGNRLADQAAREAAIKTPPDTSTLLAGKRTADGSEFEKRTADGSEFESPKKKAKVE

SEQ ID NO: 6036 - protein, 2094 aa, synthetic construct; identical to SEQ ID NO: 6034

SEQ ID NO: 6037 - protein, 2094 aa, synthetic construct
MPAAKRVKLDGGDKKYSIGLDIGTNSVGWAVITDEYKVPSKKFKVLGNTDRHSIKKNLIGALLFDSGETAEATRLKRTARRRYTRRKNRICYLQEIFSNEMAKVDDSFFHRLEESFLVEEDKKHERHPIFGNIVDEVAYHEKYPTIYHLRKKLVDSTDKADLRLIYLALAHMIKFRGHFLIEGDLNPDNSDVDKLFIQLVQTYNQLFEENPINASGVDAKAILSARLSKSRRLENLIAQLPGEKKNGLFGNLIALSLGLTPNFKSNFDLAEDAKLQLSKDTYDDDLDNLLAQIGDQYADLFLAAKNLSDAILLSDILRVNTEITKAPLSASMIKRYDEHHQDLTLLKALVRQQLPEKYKEIFFDQSKNGYAGYIDGGASQEEFYKFIKPILEKMDGTEELLVKLNREDLLRKQRTFDNGSIPHQIHLGELHAILRRQEDFYPFLKDNREKIEKILTFRIPYYVGPLARGNSRFAWMTRKSEETITPWNFEEVVDKGASAQSFIERMTNFDKNLPNEKVLPKHSLLYEYFTVYNELTKVKYVTEGMRKPAFLSGEQKKAIVDLLFKTNRKVTVKQLKEDYFKKIECFDSVEISGVEDRFNASLGTYHDLLKIIKDKDFLDNEENEDILEDIVLTLTLFEDREMIEERLKTYAHLFDDKVMKQLKRRRYTGWGRLSRKLINGIRDKQSGKTILDFLKSDGFANRNFMQLIHDDSLTFKEDIQKAQVSGQGDSLHEHIANLAGSPAIKKGILQTVKVVDELVKVMGRHKPENIVIEMARENQTTQKGQKNSRERMKRIEEGIKELGSQILKEHPVENTQLQNEKLYLYYLQNGRDMYVDQELDINRLSDYDVDHIVPQSFLKDDSIDNKVLTRSDKARGKSDNVPSEEVVKKMKNYWRQLLNAKLITQRKFDNLTKAERGGLSELDKAGFIKRQLVETRQITKHVAQILDSRMNTKYDENDKLIREVKVITLKSKLVSDFRKDFQFYKVREINNYHHAHDAYLNAVVGTALIKKYPKLESEFVYGDYKVYDVRKMIAKSEQEIGKATAKYFFYSNIMNFFKTEITLANGEIRKRPLIETNGETGEIVWDKGRDFATVRKVLSMPQVNIVKKTEVQTGGFSKESILPKRNSDKLIARKKDWDPKKYGGFDSPTVAYSVLVVAKVEKGKSKKLKSVKELLGITIMERSSFEKNPIDFLEAKGYKEVKKDLIIKLPKYSLFELENGRKRMLASAGELQKGNELALPSKYVNFLYLASHYEKLKGSPEDNEQKQLFVEQHKHYLDEIIEQISEFSKRVILADANLDKVLSAYNKHRDKPIREQAENIIHLFTLTNLGAPAAFKYFDTTIDRKRYTSTKEVLDATLIHQSITGLYETRIDLSQLGGDGGGGSGGSGGSGGTLGIEDEYRLHETSTEPDVSLGSTWLSDFPQAWAETGGMGLAVRQAPLIIPLKATSTPVSIQQYPMSHEARLGIKPHIQRLLDQGILVPCQSPWNTPLLPVKKPGTNDYRPVQDLREVNKRVEDIHPTVPNPYNLLSGLPPSHQWYTVLDLKDAFFCLRLHPTSQPLFAFEWRDPGMGISGQLTWTRLPQGFKNSPTLFDEALHRDLADFRIQHPDLILLQYVDDILLAATSELDCQQGTRALLQTLGDLGYRASAKKAQICQKQVKYLGYLLREGQRWLTEARKETVMGQPVPKTPRQLREFLGTAGFCRLWIPGFAEMAAPLYPLTKTGTLFSWGPDQQKAYQEIKQALLTAPALGLPDLTKPFELFVDEKQGYAKGVLTQKLGPWRRPVAYLSKKLDPVAAGWPPCLRMVAAIAVLTKDAGKLTMGQPLVILAPHAVEALVKQPPDRWLSNARMTHYQAMLLDTDRVQFGPVVALNPATLLPLPEEGAPHDCLEILAETHGTRPDLTDQPIPDADHTWYTDGSSFLQEGQRKAGAAVTTETEVIWAGALPAGTSAQRAELIALTQALKMAEGKRLNVYTDSRYAFATAHIHGEIYRRRGLLTSEGREIKNKSEILALLKALFLPKRLSIIHCLGHQKGDSAEARGNRLADQAAREAAIKTPPDTSTLLAGKRTADGSEFEKRTADGSEFESPKKKAKVE

SEQ ID NO: 6038 - protein, 2094 aa, synthetic construct; identical to SEQ ID NO: 6035

SEQ ID NO: 6039 - protein, 2094 aa, synthetic construct
MPAAKRVKLDGGDKKYSIGLDIGTNSVGWAVITDEYKVPSKKFKVLGNTDRHSIKKNLIGALLFDSGETAEATRLKRTARRRYTRRKNRICYLQEIFSNEMAKVDDSFFHRLEESFLVEEDKKHERHPIFGNIVDEVAYHEKYPTIYHLRKKLVDSTDKADLRLIYLALAHMIKFRGHFLIEGDLNPDNSDVDKLFIQLVQTYNQLFEENPINASGVDAKAILSARLSKSRRLENLIAQLPGEKKNGLFGNLIALSLGLTPNFKSNFDLAEDAKLQLSKDTYDDDLDNLLAQIGDQYADLFLAAKNLSDAILLSDILRVNTEITKAPLSASMIKRYDEHHQDLTLLKALVRQQLPEKYKEIFFDQSKNGYAGYIDGGASQEEFYKFIKPILEKMDGTEELLVKLNREDLLRKQRTFDNGSIPHQIHLGELHAILRRQEDFYPFLKDNREKIEKILTFRIPYYVGPLARGNSRFAWMTRKSEETITPWNFEEVVDKGASAQSFIERMTNFDKNLPNEKVLPKHSLLYEYFTVYNELTKVKYVTEGMRKPAFLSGEQKKAIVDLLFKTNRKVTVKQLKEDYFKKIECFDSVEISGVEDRFNASLGTYHDLLKIIKDKDFLDNEENEDILEDIVLTLTLFEDREMIEERLKTYAHLFDDKVMKQLKRRRYTGWGRLSRKLINGIRDKQSGKTILDFLKSDGFANRNFMQLIHDDSLTFKEDIQKAQVSGQGDSLHEHIANLAGSPAIKKGILQTVKVVDELVKVMGRHKPENIVIEMARENQTTQKGQKNSRERMKRIEEGIKELGSQILKEHPVENTQLQNEKLYLYYLQNGRDMYVDQELDINRLSDYDVDHIVPQSFLKDDSIDNKVLTRSDKARGKSDNVPSEEVVKKMKNYWRQLLNAKLITQRKFDNLTKAERGGLSELDKAGFIKRQLVETRQITKHVAQILDSRMNTKYDENDKLIREVKVITLKSKLVSDFRKDFQFYKVREINNYHHAHDAYLNAVVGTALIKKYPKLESEFVYGDYKVYDVRKMIAKSEQEIGKATAKYFFYSNIMNFFKTEITLANGEIRKRPLIETNGETGEIVWDKGRDFATVRKVLSMPQVNIVKKTEVQTGGFSKESILPKRNSDKLIARKKDWDPKKYGGFDSPTVAYSVLVVAKVEKGKSKKLKSVKELLGITIMERSSFEKNPIDFLEAKGYKEVKKDLIIKLPKYSLFELENGRKRMLASAGELQKGNELALPSKYVNFLYLASHYEKLKGSPEDNEQKQLFVEQHKHYLDEIIEQISEFSKRVILADANLDKVLSAYNKHRDKPIREQAENIIHLFTLTNLGAPAAFKYFDTTIDRKRYTSTKEVLDATLIHQSITGLYETRIDLSQLGGDGGGGSGGSGGSGGTLNIEDEYRLHETSKGPDVPLGSTWLSDFPQAWAETGGMGLAFRQAPLIISLKATSTPVSIKQYPMSQEARLGIKPHIQRLLDQGILVPCQSPWNTPLLPVKKPGTNDYRPVQDLREVNKRVEDIHPTVPNPYNLLSGLPPSHQWYTVLDLKDAFFCLRLHPTSQSLFAFEWKDPEMGISGQLTWTRLPQGFKNSPTLFNEALHRDLADFRIQHPDLILLQYVDDLLLAATSELDCQQGTRALLQTLGDLGYRASAKKAQICQKQVKYLGYLLKEGQRWLTEARKETVMGQPTPKTPRQLREFLGKAGLCRLFIPGFAEMAAPLYPLTKPGTLFKWGPDQQKAYQEIKQALLTAPALGLPDLTKPFELFVDEKQGYAKGVLTQKLGPWRRPVAYLSKKLDPVAAGWPPCLRMVAAIAVLTKDVGKLTMGQPLVILAPHAVEALVKQPPDRWLSNARMTHYQALLLDTDRVQFGPIVALNPATLLPLPEEGLQHDCLDILAEAHGTRPDLTDQPLPDADHTWYTDGSSFLQEGQRRAGAAVTTETEVIWAKALPAGTSAQRAELIALTQALKMAAGKKLNVYTDSRYAFATAHIHGEIYRRRGWLTSEGKEIKNKDEILALLKALFLPKRLSIIHCPGHQKGNHAEARGNRMADQAAREVATRETPETSTLLAGKRTADGSEFEKRTADGSEFESPKKKAKVE

SEQ ID NO: 6040 - protein, 2094 aa, synthetic construct
MPAAKRVKLDGGDKKYSIGLDIGTNSVGWAVITDEYKVPSKKFKVLGNTDRHSIKKNLIGALLFDSGETAEATRLKRTARRRYTRRKNRICYLQEIFSNEMAKVDDSFFHRLEESFLVEEDKKHERHPIFGNIVDEVAYHEKYPTIYHLRKKLVDSTDKADLRLIYLALAHMIKFRGHFLIEGDLNPDNSDVDKLFIQLVQTYNQLFEENPINASGVDAKAILSARLSKSRRLENLIAQLPGEKKNGLFGNLIALSLGLTPNFKSNFDLAEDAKLQLSKDTYDDDLDNLLAQIGDQYADLFLAAKNLSDAILLSDILRVNTEITKAPLSASMIKRYDEHHQDLTLLKALVRQQLPEKYKEIFFDQSKNGYAGYIDGGASQEEFYKFIKPILEKMDGTEELLVKLNREDLLRKQRTFDNGSIPHQIHLGELHAILRRQEDFYPFLKDNREKIEKILTFRIPYYVGPLARGNSRFAWMTRKSEETITPWNFEEVVDKGASAQSFIERMTNFDKNLPNEKVLPKHSLLYEYFTVYNELTKVKYVTEGMRKPAFLSGEQKKAIVDLLFKTNRKVTVKQLKEDYFKKIECFDSVEISGVEDRFNASLGTYHDLLKIIKDKDFLDNEENEDILEDIVLTLTLFEDREMIEERLKTYAHLFDDKVMKQLKRRRYTGWGRLSRKLINGIRDKQSGKTILDFLKSDGFANRNFMQLIHDDSLTFKEDIQKAQVSGQGDSLHEHIANLAGSPAIKKGILQTVKVVDELVKVMGRHKPENIVIEMARENQTTQKGQKNSRERMKRIEEGIKELGSQILKEHPVENTQLQNEKLYLYYLQNGRDMYVDQELDINRLSDYDVDHIVPQSFLKDDSIDNKVLTRSDKARGKSDNVPSEEVVKKMKNYWRQLLNAKLITQRKFDNLTKAERGGLSELDKAGFIKRQLVETRQITKHVAQILDSRMNTKYDENDKLIREVKVITLKSKLVSDFRKDFQFYKVREINNYHHAHDAYLNAVVGTALIKKYPKLESEFVYGDYKVYDVRKMIAKSEQEIGKATAKYFFYSNIMNFFKTEITLANGEIRKRPLIETNGETGEIVWDKGRDFATVRKVLSMPQVNIVKKTEVQTGGFSKESILPKRNSDKLIARKKDWDPKKYGGFDSPTVAYSVLVVAKVEKGKSKKLKSVKELLGITIMERSSFEKNPIDFLEAKGYKEVKKDLIIKLPKYSLFELENGRKRMLASAGELQKGNELALPSKYVNFLYLASHYEKLKGSPEDNEQKQLFVEQHKHYLDEIIEQISEFSKRVILADANLDKVLSAYNKHRDKPIREQAENIIHLFTLTNLGAPAAFKYFDTTIDRKRYTSTKEVLDATLIHQSITGLYETRIDLSQLGGDGGGGSGGSGGSGGTLNIEDEYRLHETSKGPDVPLGSTWLSDFPQAWAETGGMGLAVRQAPLIIPLKATSTPVSIKQYPMSQEARLGIKPHIQRLLDQGILVPCQSPWNTPLLPVKKPGTNDYRPVQDLREVNKRVEDIHPTVPNPYNLLSGLPPSHQWYTVLDLKDAFFCLRLHPTSQSLFAFEWRDPEMGISGQLTWTRLPQGFKNSPTLFDEALHRDLADFRIQHPDLILLQYVDDLLLAATSELDCQQGTRALLQTLGDLGYRASAKKAQICQKQVKYLGYLLKEGQRWLTEARKETVMGQPTPKTPRQLREFLGTAGFCRLWIPGFAEMAAPLYPLTKTGTLFEWGPDQQKAYQEIKQALLTAPALGLPDLTKPFELFVDEKQGYAKGVLTQKLGPWRRPVAYLSKKLDPVAAGWPPCLRMVAAIAVLTKDAGKLTMGQPLVILAPHAVEALVKQPPDRWLSNARMTHYQALLLDTDRVQFGPIVALNPATLLPLPEEGLQHDCLDILAEAHGTRPDLTDQPLPDADHTWYTDGSSFLQEGQRKAGAAVTTETEVVWAKALPAGTSAQRAELIALTQALKMAEGKKLNVYTDSRYAFATAHIHGEIYRRRGLLTSEGKEIKNKDEILALLKALFLPKRLSIIHCPGHQKGNRAEARGNRMADQAAREVATRETPETSTLLAGKRTADGSEFEKRTADGSEFESPKKKAKVE

SEQ ID NO: 6041 - protein, 2094 aa, synthetic construct
MPAAKRVKLDGGDKKYSIGLDIGTNSVGWAVITDEYKVPSKKFKVLGNTDRHSIKKNLIGALLFDSGETAEATRLKRTARRRYTRRKNRICYLQEIFSNEMAKVDDSFFHRLEESFLVEEDKKHERHPIFGNIVDEVAYHEKYPTIYHLRKKLVDSTDKADLRLIYLALAHMIKFRGHFLIEGDLNPDNSDVDKLFIQLVQTYNQLFEENPINASGVDAKAILSARLSKSRRLENLIAQLPGEKKNGLFGNLIALSLGLTPNFKSNFDLAEDAKLQLSKDTYDDDLDNLLAQIGDQYADLFLAAKNLSDAILLSDILRVNTEITKAPLSASMIKRYDEHHQDLTLLKALVRQQLPEKYKEIFFDQSKNGYAGYIDGGASQEEFYKFIKPILEKMDGTEELLVKLNREDLLRKQRTFDNGSIPHQIHLGELHAILRRQEDFYPFLKDNREKIEKILTFRIPYYVGPLARGNSRFAWMTRKSEETITPWNFEEVVDKGASAQSFIERMTNFDKNLPNEKVLPKHSLLYEYFTVYNELTKVKYVTEGMRKPAFLSGEQKKAIVDLLFKTNRKVTVKQLKEDYFKKIECFDSVEISGVEDRFNASLGTYHDLLKIIKDKDFLDNEENEDILEDIVLTLTLFEDREMIEERLKTYAHLFDDKVMKQLKRRRYTGWGRLSRKLINGIRDKQSGKTILDFLKSDGFANRNFMQLIHDDSLTFKEDIQKAQVSGQGDSLHEHIANLAGSPAIKKGILQTVKVVDELVKVMGRHKPENIVIEMARENQTTQKGQKNSRERMKRIEEGIKELGSQILKEHPVENTQLQNEKLYLYYLQNGRDMYVDQELDINRLSDYDVDHIVPQSFLKDDSIDNKVLTRSDKARGKSDNVPSEEVVKKMKNYWRQLLNAKLITQRKFDNLTKAERGGLSELDKAGFIKRQLVETRQITKHVAQILDSRMNTKYDENDKLIREVKVITLKSKLVSDFRKDFQFYKVREINNYHHAHDAYLNAVVGTALIKKYPKLESEFVYGDYKVYDVRKMIAKSEQEIGKATAKYFFYSNIMNFFKTEITLANGEIRKRPLIETNGETGEIVWDKGRDFATVRKVLSMPQVNIVKKTEVQTGGFSKESILPKRNSDKLIARKKDWDPKKYGGFDSPTVAYSVLVVAKVEKGKSKKLKSVKELLGITIMERSSFEKNPIDFLEAKGYKEVKKDLIIKLPKYSLFELENGRKRMLASAGELQKGNELALPSKYVNFLYLASHYEKLKGSPEDNEQKQLFVEQHKHYLDEIIEQISEFSKRVILADANLDKVLSAYNKHRDKPIREQAENIIHLFTLTNLGAPAAFKYFDTTIDRKRYTSTKEVLDATLIHQSITGLYETRIDLSQLGGDGGGGSGGSGGSGGTLNIEDEHRLHETSKEPDVSLGSTWLSDFPQAWAETGGMGLAVRQAPLIIPLKATSTPVSIKQYPMSQEARLGIKPHIQRLLDQGILVPCQSPWNTPLLPVKKPGTNDYRPVQDLREVNKRVEDIHPTVPNPYNLLSGLPPSHQWYTVLDLKDAFFCLRLHPTSQPLFAFEWRDPEMGISGQLTWTRLPQGFKNSPTLFNEALHRDLADFRIQHPDLILLQYVDDLLLAATSELDCQQGTRALLQTLGNLGYRASAKKAQICQKQVKYLGYLLKEGQRWLTEARKETVMGQPTPKTPRQLREFLGTAGFCRLWIPGFAEMAAPLYPLTKPGTLFNWGPDQQKAYQEIKQALLTAPALGLPDLTKPFELFVDEKQGYAKGVLTQKLGPWRRPVAYLSKKLDPVAAGWPPCLRMVAAIAVLTKDAGKLTMGQPLVILAPHAVEALVKQPPDRWLSNARMTHYQALLLDTDRVQFGPVVALNPATLLPLPEEGLQHNCLDILAEAHGTRPDLTDQPLPDADHTWYTDGSSLLQEGQRKAGAAVTTETEVIWAKALPAGTSAQRAELIALTQALKMAEGKKLNVYTDSRYAFATAHIHGEIYRRRGWLTSEGKEIKNKDEILALLKALFLPKRLSIIHCPGHQKGHSAEARGNRMADQAARKAAITETPDTSTLLAGKRTADGSEFEKRTADGSEFESPKKKAKVE

SEQ ID NO: 6042 - protein, 2094 aa, synthetic construct
MPAAKRVKLDGGDKKYSIGLDIGTNSVGWAVITDEYKVPSKKFKVLGNTDRHSIKKNLIGALLFDSGETAEATRLKRTARRRYTRRKNRICYLQEIFSNEMAKVDDSFFHRLEESFLVEEDKKHERHPIFGNIVDEVAYHEKYPTIYHLRKKLVDSTDKADLRLIYLALAHMIKFRGHFLIEGDLNPDNSDVDKLFIQLVQTYNQLFEENPINASGVDAKAILSARLSKSRRLENLIAQLPGEKKNGLFGNLIALSLGLTPNFKSNFDLAEDAKLQLSKDTYDDDLDNLLAQIGDQYADLFLAAKNLSDAILLSDILRVNTEITKAPLSASMIKRYDEHHQDLTLLKALVRQQLPEKYKEIFFDQSKNGYAGYIDGGASQEEFYKFIKPILEKMDGTEELLVKLNREDLLRKQRTFDNGSIPHQIHLGELHAILRRQEDFYPFLKDNREKIEKILTFRIPYYVGPLARGNSRFAWMTRKSEETITPWNFEEVVDKGASAQSFIERMTNFDKNLPNEKVLPKHSLLYEYFTVYNELTKVKYVTEGMRKPAFLSGEQKKAIVDLLFKTNRKVTVKQLKEDYFKKIECFDSVEISGVEDRFNASLGTYHDLLKIIKDKDFLDNEENEDILEDIVLTLTLFEDREMIEERLKTYAHLFDDKVMKQLKRRRYTGWGRLSRKLINGIRDKQSGKTILDFLKSDGFANRNFMQLIHDDSLTFKEDIQKAQVSGQGDSLHEHIANLAGSPAIKKGILQTVKVVDELVKVMGRHKPENIVIEMARENQTTQKGQKNSRERMKRIEEGIKELGSQILKEHPVENTQLQNEKLYLYYLQNGRDMYVDQELDINRLSDYDVDHIVPQSFLKDDSIDNKVLTRSDKARGKSDNVPSEEVVKKMKNYWRQLLNAKLITQRKFDNLTKAERGGLSELDKAGFIKRQLVETRQITKHVAQILDSRMNTKYDENDKLIREVKVITLKSKLVSDFRKDFQFYKVREINNYHHAHDAYLNAVVGTALIKKYPKLESEFVYGDYKVYDVRKMIAKSEQEIGKATAKYFFYSNIMNFFKTEITLANGEIRKRPLIETNGETGEIVWDKGRDFATVRKVLSMPQVNIVKKTEVQTGGFSKESILPKRNSDKLIARKKDWDPKKYGGFDSPTVAYSVLVVAKVEKGKSKKLKSVKELLGITIMERSSFEKNPIDFLEAKGYKEVKKDLIIKLPKYSLFELENGRKRMLASAGELQKGNELALPSKYVNFLYLASHYEKLKGSPEDNEQKQLFVEQHKHYLDEIIEQISEFSKRVILADANLDKVLSAYNKHRDKPIREQAENIIHLFTLTNLGAPAAFKYFDTTIDRKRYTSTKEVLDATLIHQSITGLYETRIDLSQLGGDGGGGSGGSGGSGGTLNIEDEHRLHETSKEPDVSLGSTWLSDFPQAWAETGGMGLAVRQAPLIIPLKATSTPVSIKQYPMSQEARLGIKPHIQRLLDQGILVPCQSPWNTPLLPVKKPGTNDYRPVQDLREVNKRVEDIHPTVPNPYNLLSGLPPSHQWYTVLDLKDAFFCLRLHPTSQPLFAFEWRDPEMGISGQLTWTRLPQGFKNSPTLFDEALHRDLADFRIQHPDLILLQYVDDLLLAATSELDCQQGTRALLQTLGNLGYRASAKKAQICQKQVKYLGYLLKEGQRWLTEARKETVMGQPTPKTPRQLREFLGTAGFCRLWIPGFAEMAAPLYPLTKTGTLFNWGPDQQKAYQEIKQALLTAPALGLPDLTKPFELFVDEKQGYAKGVLTQKLGPWRRPVAYLSKKLDPVAAGWPPCLRMVAAIAVLTKDAGKLTMGQPLVILAPHAVEALVKQPPDRWLSNARMTHYQALLLDTDRVQFGPVVALNPATLLPLPEEGLQHNCLDILAEAHGTRPDLTDQPLPDADHTWYTDGSSLLQEGQRKAGAAVTTETEVIWAKALPAGTSAQRAELIALTQALKMAEGKKLNVYTDSRYAFATAHIHGEIYRRRGLLTSEGKEIKNKDEILALLKALFLPKRLSIIHCPGHQKGHSAEARGNRMADQAARKAAITETPDTSTLLAGKRTADGSEFEKRTADGSEFESPKKKAKVE

SEQ ID NO: 6043 - protein, 2094 aa, synthetic construct; identical to SEQ ID NO: 6041

SEQ ID NO: 6044 - protein, 2092 aa, synthetic construct
MPAAKRVKLDGGDKKYSIGLDIGTNSVGWAVITDEYKVPSKKFKVLGNTDRHSIKKNLIGALLFDSGETAEATRLKRTARRRYTRRKNRICYLQEIFSNEMAKVDDSFFHRLEESFLVEEDKKHERHPIFGNIVDEVAYHEKYPTIYHLRKKLVDSTDKADLRLIYLALAHMIKFRGHFLIEGDLNPDNSDVDKLFIQLVQTYNQLFEENPINASGVDAKAILSARLSKSRRLENLIAQLPGEKKNGLFGNLIALSLGLTPNFKSNFDLAEDAKLQLSKDTYDDDLDNLLAQIGDQYADLFLAAKNLSDAILLSDILRVNTEITKAPLSASMIKRYDEHHQDLTLLKALVRQQLPEKYKEIFFDQSKNGYAGYIDGGASQEEFYKFIKPILEKMDGTEELLVKLNREDLLRKQRTFDNGSIPHQIHLGELHAILRRQEDFYPFLKDNREKIEKILTFRIPYYVGPLARGNSRFAWMTRKSEETITPWNFEEVVDKGASAQSFIERMTNFDKNLPNEKVLPKHSLLYEYFTVYNELTKVKYVTEGMRKPAFLSGEQKKAIVDLLFKTNRKVTVKQLKEDYFKKIECFDSVEISGVEDRFNASLGTYHDLLKIIKDKDFLDNEENEDILEDIVLTLTLFEDREMIEERLKTYAHLFDDKVMKQLKRRRYTGWGRLSRKLINGIRDKQSGKTILDFLKSDGFANRNFMQLIHDDSLTFKEDIQKAQVSGQGDSLHEHIANLAGSPAIKKGILQTVKVVDELVKVMGRHKPENIVIEMARENQTTQKGQKNSRERMKRIEEGIKELGSQILKEHPVENTQLQNEKLYLYYLQNGRDMYVDQELDINRLSDYDVDHIVPQSFLKDDSIDNKVLTRSDKARGKSDNVPSEEVVKKMKNYWRQLLNAKLITQRKFDNLTKAERGGLSELDKAGFIKRQLVETRQITKHVAQILDSRMNTKYDENDKLIREVKVITLKSKLVSDFRKDFQFYKVREINNYHHAHDAYLNAVVGTALIKKYPKLESEFVYGDYKVYDVRKMIAKSEQEIGKATAKYFFYSNIMNFFKTEITLANGEIRKRPLIETNGETGEIVWDKGRDFATVRKVLSMPQVNIVKKTEVQTGGFSKESILPKRNSDKLIARKKDWDPKKYGGFDSPTVAYSVLVVAKVEKGKSKKLKSVKELLGITIMERSSFEKNPIDFLEAKGYKEVKKDLIIKLPKYSLFELENGRKRMLASAGELQKGNELALPSKYVNFLYLASHYEKLKGSPEDNEQKQLFVEQHKHYLDEIIEQISEFSKRVILADANLDKVLSAYNKHRDKPIREQAENIIHLFTLTNLGAPAAFKYFDTTIDRKRYTSTKEVLDATLIHQSITGLYETRIDLSQLGGDGGGGSGGSGGSGGVLNLEEEYRLHEKPVPSSIDPSWLQLFPTVWAERAGMGLANQVPPVVVELRSGASPVAVRQYPMSKEAREGIRPHIQRFLDLGVLVPCQSPWNTPLLPVKKPGTNDYRPVQDLREINKRVQDIHPTVPNPYNLLSSLPPSHTWYSVLDLKDAFFCLKLHPNSQPLFAFEWRDPEKGNTGQLTWTRLPQGFKNSPTLFDEALHRDLAPFRALNPQVVLLQYVDDLLVAAPTYRDCKEGTQKLLQELSKLGYRVSAKKAQLCQKEVTYLGYLLKEGKRWLTPARKATVMKIPPPTTPRQVREFLGTAGFCRLWIPGFASLAAPLYPLTKESIPFIWTEEHQKAFDRIKEALLSAPALALPDLTKPFTLYVDERAGVARGVLTQTLGPWRRPVAYLSKKLDPVASGWPTCLKAVAAVALLLKDADKLTLGQNVTVIASHSLESIVRQPPDRWMTNARMTHYQSLLLNERVSFAPPAVLNPATLLPVESEATPVHRCSEILAEETGTRRDLKDQPLPGVPAWYTDGSSFIAEGKRRAGAAIVDGKRTVWASSLPEGTSAQKAELVALTQALRLAEGKDINIYTDSRYAFATAHIHGAIYKQRGLLTSAGKDIKNKEEILALLEAIHLPKRVAIIHCPGHQKGNDPVATGNRRADEAAKQAALSTRVLAETTKPAGKRTADGSEFEKRTADGSEFESPKKKAKVE

SEQ ID NO: 6045 - protein, 2099 aa, synthetic construct
MPAAKRVKLDGGDKKYSIGLDIGTNSVGWAVITDEYKVPSKKFKVLGNTDRHSIKKNLIGALLFDSGETAEATRLKRTARRRYTRRKNRICYLQEIFSNEMAKVDDSFFHRLEESFLVEEDKKHERHPIFGNIVDEVAYHEKYPTIYHLRKKLVDSTDKADLRLIYLALAHMIKFRGHFLIEGDLNPDNSDVDKLFIQLVQTYNQLFEENPINASGVDAKAILSARLSKSRRLENLIAQLPGEKKNGLFGNLIALSLGLTPNFKSNFDLAEDAKLQLSKDTYDDDLDNLLAQIGDQYADLFLAAKNLSDAILLSDILRVNTEITKAPLSASMIKRYDEHHQDLTLLKALVRQQLPEKYKEIFFDQSKNGYAGYIDGGASQEEFYKFIKPILEKMDGTEELLVKLNREDLLRKQRTFDNGSIPHQIHLGELHAILRRQEDFYPFLKDNREKIEKILTFRIPYYVGPLARGNSRFAWMTRKSEETITPWNFEEVVDKGASAQSFIERMTNFDKNLPNEKVLPKHSLLYEYFTVYNELTKVKYVTEGMRKPAFLSGEQKKAIVDLLFKTNRKVTVKQLKEDYFKKIECFDSVEISGVEDRFNASLGTYHDLLKIIKDKDFLDNEENEDILEDIVLTLTLFEDREMIEERLKTYAHLFDDKVMKQLKRRRYTGWGRLSRKLINGIRDKQSGKTILDFLKSDGFANRNFMQLIHDDSLTFKEDIQKAQVSGQGDSLHEHIANLAGSPAIKKGILQTVKVVDELVKVMGRHKPENIVIEMARENQTTQKGQKNSRERMKRIEEGIKELGSQILKEHPVENTQLQNEKLYLYYLQNGRDMYVDQELDINRLSDYDVDHIVPQSFLKDDSIDNKVLTRSDKARGKSDNVPSEEVVKKMKNYWRQLLNAKLITQRKFDNLTKAERGGLSELDKAGFIKRQLVETRQITKHVAQILDSRMNTKYDENDKLIREVKVITLKSKLVSDFRKDFQFYKVREINNYHHAHDAYLNAVVGTALIKKYPKLESEFVYGDYKVYDVRKMIAKSEQEIGKATAKYFFYSNIMNFFKTEITLANGEIRKRPLIETNGETGEIVWDKGRDFATVRKVLSMPQVNIVKKTEVQTGGFSKESILPKRNSDKLIARKKDWDPKKYGGFDSPTVAYSVLVVAKVEKGKSKKLKSVKELLGITIMERSSFEKNPIDFLEAKGYKEVKKDLIIKLPKYSLFELENGRKRMLASAGELQKGNELALPSKYVNFLYLASHYEKLKGSPEDNEQKQLFVEQHKHYLDEIIEQISEFSKRVILADANLDKVLSAYNKHRDKPIREQAENIIHLFTLTNLGAPAAFKYFDTTIDRKRYTSTKEVLDATLIHQSITGLYETRIDLSQLGGDGGGGSGGSGGSGGSGGTAPLEEEYRLFLEAPIQNVTLLEQWKREIPKVWAEINPPGLASTQAPIHVQLLSTALPVRVRQYPITLEAKRSLRETIRKFRAAGILRPVHSPWNTPLLPVRKSGTSEYRMVQDLREVNKRVETIHPTVPNPYTLLSLLPPDRIWYSVLDLKDAFFCIPLAPESQLIFAFEWADAEEGESGQLTWTRLPQGFKNSPTLFNEALNRDLQGFRLDHPSVSLLQYVDDLLIAADTQAACLSATRDLLMTLAELGYRVSGKKAQLCQEEVTYLGFKIHKGSRSLSNSRTQAILQIPVPKTKRQVREFLGTIGYCRLWIPGFAELAQPLYAATRPGNDPLVWGEKEEEAFQSLKLALTQPPALALPSLDKPFQLFVEETSGAAKGVLTQALGPWKRPVAYLSKRLDPVAAGWPRCLRAIAAAALLTREASKLTFGQDIEITSSHNLESLLRSPPDKWLTNARITQYQVLLLDPPRVRFKQTAALNPATLLPETDDTLPIHHCLDTLDSLTSTRPDLTDQPLAQAEATLFTDGSSYIRDGKRYAGAAVVTLDSVIWAEPLPIGTSAQKAELIALTKALEWSKDKSVNIYTDSRYAFATLHVHGMIYRERGWLTAGGKAIKNAPEILALLTAVWLPKRVAVMHCKGHQKDDAPTSTGNRRADEVAREVAIRPLSTQATISAGKRTADGSEFEKRTADGSEFESPKKKAKVE

SEQ ID NO: 6046 - protein, 2103 aa, synthetic construct
MPAAKRVKLDGGDKKYSIGLDIGTNSVGWAVITDEYKVPSKKFKVLGNTDRHSIKKNLIGALLFDSGETAEATRLKRTARRRYTRRKNRICYLQEIFSNEMAKVDDSFFHRLEESFLVEEDKKHERHPIFGNIVDEVAYHEKYPTIYHLRKKLVDSTDKADLRLIYLALAHMIKFRGHFLIEGDLNPDNSDVDKLFIQLVQTYNQLFEENPINASGVDAKAILSARLSKSRRLENLIAQLPGEKKNGLFGNLIALSLGLTPNFKSNFDLAEDAKLQLSKDTYDDDLDNLLAQIGDQYADLFLAAKNLSDAILLSDILRVNTEITKAPLSASMIKRYDEHHQDLTLLKALVRQQLPEKYKEIFFDQSKNGYAGYIDGGASQEEFYKFIKPILEKMDGTEELLVKLNREDLLRKQRTFDNGSIPHQIHLGELHAILRRQEDFYPFLKDNREKIEKILTFRIPYYVGPLARGNSRFAWMTRKSEETITPWNFEEVVDKGASAQSFIERMTNFDKNLPNEKVLPKHSLLYEYFTVYNELTKVKYVTEGMRKPAFLSGEQKKAIVDLLFKTNRKVTVKQLKEDYFKKIECFDSVEISGVEDRFNASLGTYHDLLKIIKDKDFLDNEENEDILEDIVLTLTLFEDREMIEERLKTYAHLFDDKVMKQLKRRRYTGWGRLSRKLINGIRDKQSGKTILDFLKSDGFANRNFMQLIHDDSLTFKEDIQKAQVSGQGDSLHEHIANLAGSPAIKKGILQTVKVVDELVKVMGRHKPENIVIEMARENQTTQKGQKNSRERMKRIEEGIKELGSQILKEHPVENTQLQNEKLYLYYLQNGRDMYVDQELDINRLSDYDVDHIVPQSFLKDDSIDNKVLTRSDKARGKSDNVPSEEVVKKMKNYWRQLLNAKLITQRKFDNLTKAERGGLSELDKAGFIKRQLVETRQITKHVAQILDSRMNTKYDENDKLIREVKVITLKSKLVSDFRKDFQFYKVREINNYHHAHDAYLNAVVGTALIKKYPKLESEFVYGDYKVYDVRKMIAKSEQEIGKATAKYFFYSNIMNFFKTEITLANGEIRKRPLIETNGETGEIVWDKGRDFATVRKVLSMPQVNIVKKTEVQTGGFSKESILPKRNSDKLIARKKDWDPKKYGGFDSPTVAYSVLVVAKVEKGKSKKLKSVKELLGITIMERSSFEKNPIDFLEAKGYKEVKKDLIIKLPKYSLFELENGRKRMLASAGELQKGNELALPSKYVNFLYLASHYEKLKGSPEDNEQKQLFVEQHKHYLDEIIEQISEFSKRVILADANLDKVLSAYNKHRDKPIREQAENIIHLFTLTNLGAPAAFKYFDTTIDRKRYTSTKEVLDATLIHQSITGLYETRIDLSQLGGDGGGGSGGSGGSGGSGGTVSLQDEHRLFDIPVTTSLPDVWLQDFPQAWAETGGLGRAKCQAPIIIDLKPTAVPVSIKQYPMSLEAHMGIRQHIIKFLELGVLRPCRSPWNTPLLPVKKPGTQDYRPVQDLREINKRTVDIHPTVPNPYNLLSTLKPDYSWYTVLDLKDAFFCLPLAPQSQELFAFEWKDPERGISGQLTWTRLPQGFKNSPTLFNEALHRDLTDFRTQHPEVTLLQYVDDLLLAAPTKKACTQGTRHLLQELGEKGYRASAKKAQICQTKVTYLGYILSEGKRWLTPGRIETVARIPPPRNPREVREFLGTAGFCRLWIPGFAELAAPLYALTKPSTPFTWQTEHQLAFEALKKALLSAPALGLPDTSKPFTLFLDERQGIAKGVLTQKLGPWKRPVAYLSKKLDPVAAGWPPCLRIMAATAMLVKDSAKLTLGQPLTVITPHTLEAIVRQPPDRWITNARLTHYQALLLDTDRVQFGPPVTLNPATLLPVPENQPSPHDCRQVLAETHGTREDLKDQELPDADHTWYTDGSSYLDSGTRRAGAAVVDGHNTIWAQSLPPGTSAQKAELIALTKALELSKGKKANIYTDSRYAFATAHTHGSIYERRGWLTSEGKEIKNKAEIIALLKALFLPQEVAIIHCPGHQKGQDPVAVGNRQADRVARQAAMAEVLTLATEPDNTSHITAGKRTADGSEFEKRTADGSEFESPKKKAKVE

SEQ ID NO: 6047 - protein, 2088 aa, synthetic construct
MPAAKRVKLDGGDKKYSIGLDIGTNSVGWAVITDEYKVPSKKFKVLGNTDRHSIKKNLIGALLFDSGETAEATRLKRTARRRYTRRKNRICYLQEIFSNEMAKVDDSFFHRLEESFLVEEDKKHERHPIFGNIVDEVAYHEKYPTIYHLRKKLVDSTDKADLRLIYLALAHMIKFRGHFLIEGDLNPDNSDVDKLFIQLVQTYNQLFEENPINASGVDAKAILSARLSKSRRLENLIAQLPGEKKNGLFGNLIALSLGLTPNFKSNFDLAEDAKLQLSKDTYDDDLDNLLAQIGDQYADLFLAAKNLSDAILLSDILRVNTEITKAPLSASMIKRYDEHHQDLTLLKALVRQQLPEKYKEIFFDQSKNGYAGYIDGGASQEEFYKFIKPILEKMDGTEELLVKLNREDLLRKQRTFDNGSIPHQIHLGELHAILRRQEDFYPFLKDNREKIEKILTFRIPYYVGPLARGNSRFAWMTRKSEETITPWNFEEVVDKGASAQSFIERMTNFDKNLPNEKVLPKHSLLYEYFTVYNELTKVKYVTEGMRKPAFLSGEQKKAIVDLLFKTNRKVTVKQLKEDYFKKIECFDSVEISGVEDRFNASLGTYHDLLKIIKDKDFLDNEENEDILEDIVLTLTLFEDREMIEERLKTYAHLFDDKVMKQLKRRRYTGWGRLSRKLINGIRDKQSGKTILDFLKSDGFANRNFMQLIHDDSLTFKEDIQKAQVSGQGDSLHEHIANLAGSPAIKKGILQTVKVVDELVKVMGRHKPENIVIEMARENQTTQKGQKNSRERMKRIEEGIKELGSQILKEHPVENTQLQNEKLYLYYLQNGRDMYVDQELDINRLSDYDVDHIVPQSFLKDDSIDNKVLTRSDKARGKSDNVPSEEVVKKMKNYWRQLLNAKLITQRKFDNLTKAERGGLSELDKAGFIKRQLVETRQITKHVAQILDSRMNTKYDENDKLIREVKVITLKSKLVSDFRKDFQFYKVREINNYHHAHDAYLNAVVGTALIKKYPKLESEFVYGDYKVYDVRKMIAKSEQEIGKATAKYFFYSNIMNFFKTEITLANGEIRKRPLIETNGETGEIVWDKGRDFATVRKVLSMPQVNIVKKTEVQTGGFSKESILPKRNSDKLIARKKDWDPKKYGGFDSPTVAYSVLVVAKVEKGKSKKLKSVKELLGITIMERSSFEKNPIDFLEAKGYKEVKKDLIIKLPKYSLFELENGRKRMLASAGELQKGNELALPSKYVNFLYLASHYEKLKGSPEDNEQKQLFVEQHKHYLDEIIEQISEFSKRVILADANLDKVLSAYNKHRDKPIREQAENIIHLFTLTNLGAPAAFKYFDTTIDRKRYTSTKEVLDATLIHQSITGLYETRIDLSQLGGDGGGGSGGSGGSGGSGGVPWLTQQPLQLTILVPLQEYQEKILSKTALPEDQKQQLKTLFVKYDNLWQHWENQVGHRKIRPHNIATGDYPPRPQKQYPINPKAKPSIQIVIDDLLKQGVLTPQNSTMNTPVYPVPKPDGRWRMVLDYREVNKTIPLTAAQNQHSAGILATIVRQKYKTTLDLANGFWAHPITPESYWLTAFTWQGKQYCWTRLPQGFLNSPALFTADVVDLLKEIPNVQVYVDDIYLSHDDPKEHVQQLEKVFQILLQAGYVVSLKKSEIGQKTVEFLGFNITKEGRGLTDTFKTKLLNITPPKDLKQLQSILGLLNFARNFIPNFAELVQPLYNLIASAKGKYIEWSEENTKQLNMVIEALNTASNLEERLPEQRLVIKVNTSPSAGYVRYYNETGKKPIMYLNYVFSKAELKFSMLEKLLTTMHKALIKAMDLAMGQEILVYSPIVSMTKIQKTPLPERKALPIRWITWMTYLEDPRIQFHYDKTLPELKHIPDVYTSSQSPVKHPSQYEGVFYTDGSAIKSPDPTKSNNAGMGIVHATYKPEYQVLNQWSIPLGNHTAQMAEIAAVEFACKKALKIPGPVLVITDSFYVAESANKELPYWKSNGFVNNKKKPLKHISKWKSIAECLSMKPDITIQHEKGISLQIPVFILKGNALADKLATQGSYVVNAGKRTADGSEFEKRTADGSEFESPKKKAKVE

SEQ ID NO: 6048 - protein, 2128 aa, synthetic construct
MPAAKRVKLDGGDKKYSIGLDIGTNSVGWAVITDEYKVPSKKFKVLGNTDRHSIKKNLIGALLFDSGETAEATRLKRTARRRYTRRKNRICYLQEIFSNEMAKVDDSFFHRLEESFLVEEDKKHERHPIFGNIVDEVAYHEKYPTIYHLRKKLVDSTDKADLRLIYLALAHMIKFRGHFLIEGDLNPDNSDVDKLFIQLVQTYNQLFEENPINASGVDAKAILSARLSKSRRLENLIAQLPGEKKNGLFGNLIALSLGLTPNFKSNFDLAEDAKLQLSKDTYDDDLDNLLAQIGDQYADLFLAAKNLSDAILLSDILRVNTEITKAPLSASMIKRYDEHHQDLTLLKALVRQQLPEKYKEIFFDQSKNGYAGYIDGGASQEEFYKFIKPILEKMDGTEELLVKLNREDLLRKQRTFDNGSIPHQIHLGELHAILRRQEDFYPFLKDNREKIEKILTFRIPYYVGPLARGNSRFAWMTRKSEETITPWNFEEVVDKGASAQSFIERMTNFDKNLPNEKVLPKHSLLYEYFTVYNELTKVKYVTEGMRKPAFLSGEQKKAIVDLLFKTNRKVTVKQLKEDYFKKIECFDSVEISGVEDRFNASLGTYHDLLKIIKDKDFLDNEENEDILEDIVLTLTLFEDREMIEERLKTYAHLFDDKVMKQLKRRRYTGWGRLSRKLINGIRDKQSGKTILDFLKSDGFANRNFMQLIHDDSLTFKEDIQKAQVSGQGDSLHEHIANLAGSPAIKKGILQTVKVVDELVKVMGRHKPENIVIEMARENQTTQKGQKNSRERMKRIEEGIKELGSQILKEHPVENTQLQNEKLYLYYLQNGRDMYVDQELDINRLSDYDVDHIVPQSFLKDDSIDNKVLTRSDKARGKSDNVPSEEVVKKMKNYWRQLLNAKLITQRKFDNLTKAERGGLSELDKAGFIKRQLVETRQITKHVAQILDSRMNTKYDENDKLIREVKVITLKSKLVSDFRKDFQFYKVREINNYHHAHDAYLNAVVGTALIKKYPKLESEFVYGDYKVYDVRKMIAKSEQEIGKATAKYFFYSNIMNFFKTEITLANGEIRKRPLIETNGETGEIVWDKGRDFATVRKVLSMPQVNIVKKTEVQTGGFSKESILPKRNSDKLIARKKDWDPKKYGGFDSPTVAYSVLVVAKVEKGKSKKLKSVKELLGITIMERSSFEKNPIDFLEAKGYKEVKKDLIIKLPKYSLFELENGRKRMLASAGELQKGNELALPSKYVNFLYLASHYEKLKGSPEDNEQKQLFVEQHKHYLDEIIEQISEFSKRVILADANLDKVLSAYNKHRDKPIREQAENIIHLFTLTNLGAPAAFKYFDTTIDRKRYTSTKEVLDATLIHQSITGLYETRIDLSQLGGDGGGGSGGSGGSGGSGGLLGRDLLTKLKAQIQFSTEGPQVTWEDRPAMCLVLNLEEEYRLHEKPVPPSIDPSWLQLFPMVWAEKAGMGLANQVPPVVVELKSDASPVAVRQYPMSKEAREGIRPHIQRFLDLGILVPCQSPWNTPLLPVKKPGTNDYRPVQDLREVNKRVQDIHPTVPNPYNLLSSLPPSHTWYSVLDLKDAFFCLKLHPNSQPLFAFEWRDPEKGNTGQLTWTRLPQGFKNSPTLFNEALHRDLASFRALNPQVVMLQYVDDLLVAAPTYRDCKEGTRRLLQELSKLGYRVSAKKAQLCREEVTYLGYLLKGGKRWLTPARKATVMKIPTPTTPRQVREFLGTAGFCRLWIPGFASLAAPLYPLTRPKVPFTWTEAHQEAFGRIKEALLSAPALALPDLTKPFALYVDEKEGVARGVLTQTLGPWRRPVAYLSKKLDPVASGWPTCLKAIAAVALLLKDADKLTLGQNVLVIAPHNLESIVRQPPDRWMTNARMTHYQSLLLNERVSFAPPAILNPATLLPVESDDTPIHICSEILAEETGTRPDLRDQPLPGVPAWYTDGSSFIMDGRRQAGAAIVDNKRTVWASNLPEGTSAQKAELIALTQALRLAEGKSINIYTDSRYAFATAHVHGAIYKQRGWLTSAGKDIKNKEEILALLEAIHLPKRVAIIHCPGHQRGTDPVATGNRKADEAAKQAAQSTRILTETTKNAGKRTADGSEFEKRTADGSEFESPKKKAKVE

SEQ ID NO: 6049 - protein, 2219 aa, synthetic construct
MPAAKRVKLDGGDKKYSIGLDIGTNSVGWAVITDEYKVPSKKFKVLGNTDRHSIKKNLIGALLFDSGETAEATRLKRTARRRYTRRKNRICYLQEIFSNEMAKVDDSFFHRLEESFLVEEDKKHERHPIFGNIVDEVAYHEKYPTIYHLRKKLVDSTDKADLRLIYLALAHMIKFRGHFLIEGDLNPDNSDVDKLFIQLVQTYNQLFEENPINASGVDAKAILSARLSKSRRLENLIAQLPGEKKNGLFGNLIALSLGLTPNFKSNFDLAEDAKLQLSKDTYDDDLDNLLAQIGDQYADLFLAAKNLSDAILLSDILRVNTEITKAPLSASMIKRYDEHHQDLTLLKALVRQQLPEKYKEIFFDQSKNGYAGYIDGGASQEEFYKFIKPILEKMDGTEELLVKLNREDLLRKQRTFDNGSIPHQIHLGELHAILRRQEDFYPFLKDNREKIEKILTFRIPYYVGPLARGNSRFAWMTRKSEETITPWNFEEVVDKGASAQSFIERMTNFDKNLPNEKVLPKHSLLYEYFTVYNELTKVKYVTEGMRKPAFLSGEQKKAIVDLLFKTNRKVTVKQLKEDYFKKIECFDSVEISGVEDRFNASLGTYHDLLKIIKDKDFLDNEENEDILEDIVLTLTLFEDREMIEERLKTYAHLFDDKVMKQLKRRRYTGWGRLSRKLINGIRDKQSGKTILDFLKSDGFANRNFMQLIHDDSLTFKEDIQKAQVSGQGDSLHEHIANLAGSPAIKKGILQTVKVVDELVKVMGRHKPENIVIEMARENQTTQKGQKNSRERMKRIEEGIKELGSQILKEHPVENTQLQNEKLYLYYLQNGRDMYVDQELDINRLSDYDVDHIVPQSFLKDDSIDNKVLTRSDKARGKSDNVPSEEVVKKMKNYWRQLLNAKLITQRKFDNLTKAERGGLSELDKAGFIKRQLVETRQITKHVAQILDSRMNTKYDENDKLIREVKVITLKSKLVSDFRKDFQFYKVREINNYHHAHDAYLNAVVGTALIKKYPKLESEFVYGDYKVYDVRKMIAKSEQEIGKATAKYFFYSNIMNFFKTEITLANGEIRKRPLIETNGETGEIVWDKGRDFATVRKVLSMPQVNIVKKTEVQTGGFSKESILPKRNSDKLIARKKDWDPKKYGGFDSPTVAYSVLVVAKVEKGKSKKLKSVKELLGITIMERSSFEKNPIDFLEAKGYKEVKKDLIIKLPKYSLFELENGRKRMLASAGELQKGNELALPSKYVNFLYLASHYEKLKGSPEDNEQKQLFVEQHKHYLDEIIEQISEFSKRVILADANLDKVLSAYNKHRDKPIREQAENIIHLFTLTNLGAPAAFKYFDTTIDRKRYTSTKEVLDATLIHQSITGLYETRIDLSQLGGDGGGGSGGSGGSGGSGGTLGDQGSRGSDPLPEPRVTLTVEGIPTEFLVNTGAEHSVLTKPMGKMGSKRTVVAGATGSKVYPWTTKRLLKIGQKQVTHSFLVIPECPAPLLGRDLLTKLKAQIQFSTEGPQVTWEDRPAMCLVLNLEEEYRLHEKPVPPSIDPSWLQLFPMVWAEKAGMGLANQVPPVVVELKSDASPVAVRQYPMSKEAREGIRPHIQRFLDLGILVPCQSPWNTPLLPVKKPGTNDYRPVQDLREVNKRVQDIHPTVPNPYNLLSSLPPSHTWYSVLDLKDAFFCLKLHPNSQPLFAFEWRDPEKGNTGQLTWTRLPQGFKNSPTLFNEALHRDLASFRALNPQVVMLQYVDDLLVAAPTYRDCKEGTRRLLQELSKLGYRVSAKKAQLCREEVTYLGYLLKGGKRWLTPARKATVMKIPTPTTPRQVREFLGKAGFCRLFIPGFASLAAPLYPLTRPKVPFTWTEAHQEAFGRIKEALLSAPALALPDLTKPFALYVDEKEGVARGVLTQTLGPWRRPVAYLSKKLDPVASGWPTCLKAIAAVALLLKDADKLTLGQNVLVIAPHNLESIVRQPPDRWMTNARMTHYQSLLLNERVSFAPPAILNPATLLPVESDDTPIHICSEILAEETGTRPDLRDQPLPGVPAWYTDGSSFIMDGRRQAGAAIVDNKRTVWASNLPEGTSAQKAELIALTQALRLAEGKSINIYTDSRYAFATAHVHGAIYKQRGWLTSAGKDIKNKEEILALLEAIHLPKRVAIIHCPGHQRGTDPVATGNRKADEAAKQAAQSTRILTETTKNAGKRTADGSEFEKRTADGSEFESPKKKAKVE

SEQ ID NO: 6050 - protein, 2097 aa, synthetic construct
MPAAKRVKLDGGDKKYSIGLDIGTNSVGWAVITDEYKVPSKKFKVLGNTDRHSIKKNLIGALLFDSGETAEATRLKRTARRRYTRRKNRICYLQEIFSNEMAKVDDSFFHRLEESFLVEEDKKHERHPIFGNIVDEVAYHEKYPTIYHLRKKLVDSTDKADLRLIYLALAHMIKFRGHFLIEGDLNPDNSDVDKLFIQLVQTYNQLFEENPINASGVDAKAILSARLSKSRRLENLIAQLPGEKKNGLFGNLIALSLGLTPNFKSNFDLAEDAKLQLSKDTYDDDLDNLLAQIGDQYADLFLAAKNLSDAILLSDILRVNTEITKAPLSASMIKRYDEHHQDLTLLKALVRQQLPEKYKEIFFDQSKNGYAGYIDGGASQEEFYKFIKPILEKMDGTEELLVKLNREDLLRKQRTFDNGSIPHQIHLGELHAILRRQEDFYPFLKDNREKIEKILTFRIPYYVGPLARGNSRFAWMTRKSEETITPWNFEEVVDKGASAQSFIERMTNFDKNLPNEKVLPKHSLLYEYFTVYNELTKVKYVTEGMRKPAFLSGEQKKAIVDLLFKTNRKVTVKQLKEDYFKKIECFDSVEISGVEDRFNASLGTYHDLLKIIKDKDFLDNEENEDILEDIVLTLTLFEDREMIEERLKTYAHLFDDKVMKQLKRRRYTGWGRLSRKLINGIRDKQSGKTILDFLKSDGFANRNFMQLIHDDSLTFKEDIQKAQVSGQGDSLHEHIANLAGSPAIKKGILQTVKVVDELVKVMGRHKPENIVIEMARENQTTQKGQKNSRERMKRIEEGIKELGSQILKEHPVENTQLQNEKLYLYYLQNGRDMYVDQELDINRLSDYDVDHIVPQSFLKDDSIDNKVLTRSDKARGKSDNVPSEEVVKKMKNYWRQLLNAKLITQRKFDNLTKAERGGLSELDKAGFIKRQLVETRQITKHVAQILDSRMNTKYDENDKLIREVKVITLKSKLVSDFRKDFQFYKVREINNYHHAHDAYLNAVVGTALIKKYPKLESEFVYGDYKVYDVRKMIAKSEQEIGKATAKYFFYSNIMNFFKTEITLANGEIRKRPLIETNGETGEIVWDKGRDFATVRKVLSMPQVNIVKKTEVQTGGFSKESILPKRNSDKLIARKKDWDPKKYGGFDSPTVAYSVLVVAKVEKGKSKKLKSVKELLGITIMERSSFEKNPIDFLEAKGYKEVKKDLIIKLPKYSLFELENGRKRMLASAGELQKGNELALPSKYVNFLYLASHYEKLKGSPEDNEQKQLFVEQHKHYLDEIIEQISEFSKRVILADANLDKVLSAYNKHRDKPIREQAENIIHLFTLTNLGAPAAFKYFDTTIDRKRYTSTKEVLDATLIHQSITGLYETRIDLSQLGGDGGGGSGGSGGSGGSGGTLNIEDEYRLHETSKGPDVPLGSTWLSDFPQAWAETGGMGLAVRQAPLIIPLKATSTPVSIKQYPMSQEARLGIKPHIQRLLDQGILVPCQSPWNTPLLPVKKPGTNDYRPVQDLREVNKRVEDIHPTVPNPYNLLSGLPPSHQWYTVLDLKDAFFCLRLHPTSQSLFAFEWRDPEMGISGQLTWTRLPQGFKNSPTLFNEALHRDLADFRIQHPDLILLQYVDDLLLAATSELDCQQGTRALLQTLGDLGYRASAKKAQICQKQVKYLGYLLKEGQRWLTEARKETVMGQPTPKTPRQLREFLGTAGFCRLWIPGFAEMAAPLYPLTKPGTLFEWGPDQQKAYQEIKQALLTAPALGLPDLTKPFELFVDEKQGYAKGVLTQKLGPWRRPVAYLSKKLDPVAAGWPPCLRMVAAIAVLTKDAGKLTMGQPLVILAPHAVEALVKQPPDRWLSNARMTHYQALLLDTDRVQFGPIVALNPATLLPLPEEGLQHDCLDILAEAHGTRPDLTDQPLPDADHTWYTDGSSFLQEGQRKAGAAVTTETEVVWAKALPAGTSAQRAELIALTQALKMAEGKKLNVYTDSRYAFATAHIHGEIYRRRGWLTSEGKEIKNKDEILALLKALFLPKRLSIIHCPGHQKGNRAEARGNRMADQAAREVATRETPETSTLLAGKRTADGSEFEKRTADGSEFESPKKKAKVE

SEQ ID NO: 6051 - protein, 2088 aa, synthetic construct
MPAAKRVKLDGGDKKYSIGLDIGTNSVGWAVITDEYKVPSKKFKVLGNTDRHSIKKNLIGALLFDSGETAEATRLKRTARRRYTRRKNRICYLQEIFSNEMAKVDDSFFHRLEESFLVEEDKKHERHPIFGNIVDEVAYHEKYPTIYHLRKKLVDSTDKADLRLIYLALAHMIKFRGHFLIEGDLNPDNSDVDKLFIQLVQTYNQLFEENPINASGVDAKAILSARLSKSRRLENLIAQLPGEKKNGLFGNLIALSLGLTPNFKSNFDLAEDAKLQLSKDTYDDDLDNLLAQIGDQYADLFLAAKNLSDAILLSDILRVNTEITKAPLSASMIKRYDEHHQDLTLLKALVRQQLPEKYKEIFFDQSKNGYAGYIDGGASQEEFYKFIKPILEKMDGTEELLVKLNREDLLRKQRTFDNGSIPHQIHLGELHAILRRQEDFYPFLKDNREKIEKILTFRIPYYVGPLARGNSRFAWMTRKSEETITPWNFEEVVDKGASAQSFIERMTNFDKNLPNEKVLPKHSLLYEYFTVYNELTKVKYVTEGMRKPAFLSGEQKKAIVDLLFKTNRKVTVKQLKEDYFKKIECFDSVEISGVEDRFNASLGTYHDLLKIIKDKDFLDNEENEDILEDIVLTLTLFEDREMIEERLKTYAHLFDDKVMKQLKRRRYTGWGRLSRKLINGIRDKQSGKTILDFLKSDGFANRNFMQLIHDDSLTFKEDIQKAQVSGQGDSLHEHIANLAGSPAIKKGILQTVKVVDELVKVMGRHKPENIVIEMARENQTTQKGQKNSRERMKRIEEGIKELGSQILKEHPVENTQLQNEKLYLYYLQNGRDMYVDQELDINRLSDYDVDHIVPQSFLKDDSIDNKVLTRSDKARGKSDNVPSEEVVKKMKNYWRQLLNAKLITQRKFDNLTKAERGGLSELDKAGFIKRQLVETRQITKHVAQILDSRMNTKYDENDKLIREVKVITLKSKLVSDFRKDFQFYKVREINNYHHAHDAYLNAVVGTALIKKYPKLESEFVYGDYKVYDVRKMIAKSEQEIGKATAKYFFYSNIMNFFKTEITLANGEIRKRPLIETNGETGEIVWDKGRDFATVRKVLSMPQVNIVKKTEVQTGGFSKESILPKRNSDKLIARKKDWDPKKYGGFDSPTVAYSVLVVAKVEKGKSKKLKSVKELLGITIMERSSFEKNPIDFLEAKGYKEVKKDLIIKLPKYSLFELENGRKRMLASAGELQKGNELALPSKYVNFLYLASHYEKLKGSPEDNEQKQLFVEQHKHYLDEIIEQISEFSKRVILADANLDKVLSAYNKHRDKPIREQAENIIHLFTLTNLGAPAAFKYFDTTIDRKRYTSTKEVLDATLIHQSITGLYETRIDLSQLGGDGGGGSGGSGGSGGSGGIPWLMKKPLQLTTLVPLQEYEERLLKQTMLTGSYKEKLQSLFLKYDALWQHWENQVGHRRIKPHHIATGTVNPRPQKQYPINPKAKASIQTVINDLLKQGVLIQQNSIMNTPVYPVPKPDGKWRMVLDYREVNKTIPLIAAQNQHSAGILSSIFRGKYKTTLDLSNGFWAHSITPESYWLTAFTWLGQQYCWTRLPQGFLNSPALFNADVVDLLKEVPNVQVYVDDIYISHDDPREHLEQLEKVFSLLLNAGYVVSLKKSEIAQHEVEFLGFNITKEGRGLTETFKQKLLNITPPRDLKQLQSILGKLNFARNFIPNFSELVKPLYNIIATAPGKYITWTTDNSQQLQNIISMLNSAENLEERNPEVRLIMKVNTSPSAGYIRFYNEFAKRPIMYLNYVYTKAEVKFTNTEKLLTTIHKGLIKALDLGMGQEILVYSPIVSMTKIQKTPLPERKALPIRWITWMSYLEDPRIQFHYDKTLPELQQVPTVTDDIIAKIKHPSEFSMVFYTDGSAIKHPNVNKSHNAGMGIAQVQFKPEFTVINTWSIPLGDHTAQLAEVAAVEFACKKALKIDGPVLIVTDSFYVAESVNKELPYWQSNGFFNNKKKPLKHVSKWKSIADCIQLKPDIIIIHEKGHQPTASTFHTEGNNLADKLATQGSYVVNAGKRTADGSEFEKRTADGSEFESPKKKAKVE

SEQ ID NO: 6052 - protein, 2177 aa, synthetic construct
MPAAKRVKLDGGDKKYSIGLDIGTNSVGWAVITDEYKVPSKKFKVLGNTDRHSIKKNLIGALLFDSGETAEATRLKRTARRRYTRRKNRICYLQEIFSNEMAKVDDSFFHRLEESFLVEEDKKHERHPIFGNIVDEVAYHEKYPTIYHLRKKLVDSTDKADLRLIYLALAHMIKFRGHFLIEGDLNPDNSDVDKLFIQLVQTYNQLFEENPINASGVDAKAILSARLSKSRRLENLIAQLPGEKKNGLFGNLIALSLGLTPNFKSNFDLAEDAKLQLSKDTYDDDLDNLLAQIGDQYADLFLAAKNLSDAILLSDILRVNTEITKAPLSASMIKRYDEHHQDLTLLKALVRQQLPEKYKEIFFDQSKNGYAGYIDGGASQEEFYKFIKPILEKMDGTEELLVKLNREDLLRKQRTFDNGSIPHQIHLGELHAILRRQEDFYPFLKDNREKIEKILTFRIPYYVGPLARGNSRFAWMTRKSEETITPWNFEEVVDKGASAQSFIERMTNFDKNLPNEKVLPKHSLLYEYFTVYNELTKVKYVTEGMRKPAFLSGEQKKAIVDLLFKTNRKVTVKQLKEDYFKKIECFDSVEISGVEDRFNASLGTYHDLLKIIKDKDFLDNEENEDILEDIVLTLTLFEDREMIEERLKTYAHLFDDKVMKQLKRRRYTGWGRLSRKLINGIRDKQSGKTILDFLKSDGFANRNFMQLIHDDSLTFKEDIQKAQVSGQGDSLHEHIANLAGSPAIKKGILQTVKVVDELVKVMGRHKPENIVIEMARENQTTQKGQKNSRERMKRIEEGIKELGSQILKEHPVENTQLQNEKLYLYYLQNGRDMYVDQELDINRLSDYDVDHIVPQSFLKDDSIDNKVLTRSDKARGKSDNVPSEEVVKKMKNYWRQLLNAKLITQRKFDNLTKAERGGLSELDKAGFIKRQLVETRQITKHVAQILDSRMNTKYDENDKLIREVKVITLKSKLVSDFRKDFQFYKVREINNYHHAHDAYLNAVVGTALIKKYPKLESEFVYGDYKVYDVRKMIAKSEQEIGKATAKYFFYSNIMNFFKTEITLANGEIRKRPLIETNGETGEIVWDKGRDFATVRKVLSMPQVNIVKKTEVQTGGFSKESILPKRNSDKLIARKKDWDPKKYGGFDSPTVAYSVLVVAKVEKGKSKKLKSVKELLGITIMERSSFEKNPIDFLEAKGYKEVKKDLIIKLPKYSLFELENGRKRMLASAGELQKGNELALPSKYVNFLYLASHYEKLKGSPEDNEQKQLFVEQHKHYLDEIIEQISEFSKRVILADANLDKVLSAYNKHRDKPIREQAENIIHLFTLTNLGAPAAFKYFDTTIDRKRYTSTKEVLDATLIHQSITGLYETRIDLSQLGGDGGGGSGGSGGSGGSGGMDPLQLLQPLEAEIKGTKLKAHWNSGATITCVPQAFLEEEVPIKNIWIKTIHGEKEQPVYYLTFKIQGRKVEAEVISSPYDYILVSPSDIPWLMKKPLQLTTLVPLQEYEERLLKQTMLTGSYKEKLQSLFLKYDALWQHWENQVGHRRIKPHHIATGTVNPRPQKQYPINPKAKASIQTVINDLLKQGVLIQQNSIMNTPVYPVPKPDGKWRMVLDYREVNKTIPLIAAQNQHSAGILSSIFRGKYKTTLDLSNGFWAHSITPESYWLTAFTWLGQQYCWTRLPQGFLNSPALFNADVVDLLKEVPNVQVYVDDIYISHDDPREHLEQLEKVFSLLLNAGYVVSLKKSEIAQHEVEFLGFNITKEGRGLTETFKQKLLNITPPRDLKQLQSILGKLNFARNFIPNFSELVKPLYNIIATAPGKYITWTTDNSQQLQNIISMLNSAENLEERNPEVRLIMKVNTSPSAGYIRFYNEFAKRPIMYLNYVYTKAEVKFTNTEKLLTTIHKGLIKALDLGMGQEILVYSPIVSMTKIQKTPLPERKALPIRWITWMSYLEDPRIQFHYDKTLPELQQVPTVTDDIIAKIKHPSEFSMVFYTDGSAIKHPNVNKSHNAGMGIAQVQFKPEFTVINTWSIPLGDHTAQLAEVAAVEFACKKALKIDGPVLIVTDSFYVAESVNKELPYWQSNGFFNNKKKPLKHVSKWKSIADCIQLKPDIIIIHEKGHQPTASTFHTEGNNLADKLATQGSYVVNAGKRTADGSEFEKRTADGSEFESPKKKAKVE

SEQ ID NO: 6053 - protein, 2095 aa, synthetic construct
MPAAKRVKLDGGDKKYSIGLDIGTNSVGWAVITDEYKVPSKKFKVLGNTDRHSIKKNLIGALLFDSGETAEATRLKRTARRRYTRRKNRICYLQEIFSNEMAKVDDSFFHRLEESFLVEEDKKHERHPIFGNIVDEVAYHEKYPTIYHLRKKLVDSTDKADLRLIYLALAHMIKFRGHFLIEGDLNPDNSDVDKLFIQLVQTYNQLFEENPINASGVDAKAILSARLSKSRRLENLIAQLPGEKKNGLFGNLIALSLGLTPNFKSNFDLAEDAKLQLSKDTYDDDLDNLLAQIGDQYADLFLAAKNLSDAILLSDILRVNTEITKAPLSASMIKRYDEHHQDLTLLKALVRQQLPEKYKEIFFDQSKNGYAGYIDGGASQEEFYKFIKPILEKMDGTEELLVKLNREDLLRKQRTFDNGSIPHQIHLGELHAILRRQEDFYPFLKDNREKIEKILTFRIPYYVGPLARGNSRFAWMTRKSEETITPWNFEEVVDKGASAQSFIERMTNFDKNLPNEKVLPKHSLLYEYFTVYNELTKVKYVTEGMRKPAFLSGEQKKAIVDLLFKTNRKVTVKQLKEDYFKKIECFDSVEISGVEDRFNASLGTYHDLLKIIKDKDFLDNEENEDILEDIVLTLTLFEDREMIEERLKTYAHLFDDKVMKQLKRRRYTGWGRLSRKLINGIRDKQSGKTILDFLKSDGFANRNFMQLIHDDSLTFKEDIQKAQVSGQGDSLHEHIANLAGSPAIKKGILQTVKVVDELVKVMGRHKPENIVIEMARENQTTQKGQKNSRERMKRIEEGIKELGSQILKEHPVENTQLQNEKLYLYYLQNGRDMYVDQELDINRLSDYDVDHIVPQSFLKDDSIDNKVLTRSDKARGKSDNVPSEEVVKKMKNYWRQLLNAKLITQRKFDNLTKAERGGLSELDKAGFIKRQLVETRQITKHVAQILDSRMNTKYDENDKLIREVKVITLKSKLVSDFRKDFQFYKVREINNYHHAHDAYLNAVVGTALIKKYPKLESEFVYGDYKVYDVRKMIAKSEQEIGKATAKYFFYSNIMNFFKTEITLANGEIRKRPLIETNGETGEIVWDKGRDFATVRKVLSMPQVNIVKKTEVQTGGFSKESILPKRNSDKLIARKKDWDPKKYGGFDSPTVAYSVLVVAKVEKGKSKKLKSVKELLGITIMERSSFEKNPIDFLEAKGYKEVKKDLIIKLPKYSLFELENGRKRMLASAGELQKGNELALPSKYVNFLYLASHYEKLKGSPEDNEQKQLFVEQHKHYLDEIIEQISEFSKRVILADANLDKVLSAYNKHRDKPIREQAENIIHLFTLTNLGAPAAFKYFDTTIDRKRYTSTKEVLDATLIHQSITGLYETRIDLSQLGGDGGGGSGGSGGSGGSGGVLNLEEEYRLHEKPVPSSIDPSWLQLFPTVWAERAGMGLANQVPPVVVELRSGASPVAVRQYPMSKEAREGIRPHIQRFLDLGVLVPCQSPWNTPLLPVKKPGTNDYRPVQDLREINKRVQDIHPTVPNPYNLLSSLPPSHTWYSVLDLKDAFFCLKLHPNSQPLFAFEWRDPEKGNTGQLTWTRLPQGFKNSPTLFDEALHRDLAPFRALNPQVVLLQYVDDLLVAAPTYRDCKEGTQKLLQELSKLGYRVSAKKAQLCQKEVTYLGYLLKEGKRWLTPARKATVMKIPPPTTPRQVREFLGTAGFCRLWIPGFASLAAPLYPLTKESIPFIWTEEHQKAFDRIKEALLSAPALALPDLTKPFTLYVDERAGVARGVLTQTLGPWRRPVAYLSKKLDPVASGWPTCLKAVAAVALLLKDADKLTLGQNVTVIASHSLESIVRQPPDRWMTNARMTHYQSLLLNERVSFAPPAVLNPATLLPVESEATPVHRCSEILAEETGTRRDLKDQPLPGVPAWYTDGSSFIAEGKRRAGAAIVDGKRTVWASSLPEGTSAQKAELVALTQALRLAEGKDINIYTDSRYAFATAHIHGAIYKQRGLLTSAGKDIKNKEEILALLEAIHLPKRVAIIHCPGHQKGNDPVATGNRRADEAAKQAALSTRVLAETTKPAGKRTADGSEFEKRTADGSEFESPKKKAKVE

SEQ ID NO: 6054 - protein, 2097 aa, synthetic construct
MPAAKRVKLDGGDKKYSIGLDIGTNSVGWAVITDEYKVPSKKFKVLGNTDRHSIKKNLIGALLFDSGETAEATRLKRTARRRYTRRKNRICYLQEIFSNEMAKVDDSFFHRLEESFLVEEDKKHERHPIFGNIVDEVAYHEKYPTIYHLRKKLVDSTDKADLRLIYLALAHMIKFRGHFLIEGDLNPDNSDVDKLFIQLVQTYNQLFEENPINASGVDAKAILSARLSKSRRLENLIAQLPGEKKNGLFGNLIALSLGLTPNFKSNFDLAEDAKLQLSKDTYDDDLDNLLAQIGDQYADLFLAAKNLSDAILLSDILRVNTEITKAPLSASMIKRYDEHHQDLTLLKALVRQQLPEKYKEIFFDQSKNGYAGYIDGGASQEEFYKFIKPILEKMDGTEELLVKLNREDLLRKQRTFDNGSIPHQIHLGELHAILRRQEDFYPFLKDNREKIEKILTFRIPYYVGPLARGNSRFAWMTRKSEETITPWNFEEVVDKGASAQSFIERMTNFDKNLPNEKVLPKHSLLYEYFTVYNELTKVKYVTEGMRKPAFLSGEQKKAIVDLLFKTNRKVTVKQLKEDYFKKIECFDSVEISGVEDRFNASLGTYHDLLKIIKDKDFLDNEENEDILEDIVLTLTLFEDREMIEERLKTYAHLFDDKVMKQLKRRRYTGWGRLSRKLINGIRDKQSGKTILDFLKSDGFANRNFMQLIHDDSLTFKEDIQKAQVSGQGDSLHEHIANLAGSPAIKKGILQTVKVVDELVKVMGRHKPENIVIEMARENQTTQKGQKNSRERMKRIEEGIKELGSQILKEHPVENTQLQNEKLYLYYLQNGRDMYVDQELDINRLSDYDVDHIVPQSFLKDDSIDNKVLTRSDKARGKSDNVPSEEVVKKMKNYWRQLLNAKLITQRKFDNLTKAERGGLSELDKAGFIKRQLVETRQITKHVAQILDSRMNTKYDENDKLIREVKVITLKSKLVSDFRKDFQFYKVREINNYHHAHDAYLNAVVGTALIKKYPKLESEFVYGDYKVYDVRKMIAKSEQEIGKATAKYFFYSNIMNFFKTEITLANGEIRKRPLIETNGETGEIVWDKGRDFATVRKVLSMPQVNIVKKTEVQTGGFSKESILPKRNSDKLIARKKDWDPKKYGGFDSPTVAYSVLVVAKVEKGKSKKLKSVKELLGITIMERSSFEKNPIDFLEAKGYKEVKKDLIIKLPKYSLFELENGRKRMLASAGELQKGNELALPSKYVNFLYLASHYEKLKGSPEDNEQKQLFVEQHKHYLDEIIEQISEFSKRVILADANLDKVLSAYNKHRDKPIREQAENIIHLFTLTNLGAPAAFKYFDTTIDRKRYTSTKEVLDATLIHQSITGLYETRIDLSQLGGDGGGGSGGSGGSGGSGGTLNIEDEYRLHETSKEPDVPLGSTWLSDFPQAWAETGGMGLAVRQAPLIIPLKATSTPVSIKQYPMSQEARLGIKPHIQRLLDQGILVPCQSPWNTPLLPVKKPGTNDYRPVQDLREVNKRVEDIHPTVPNPYNLLSGLPPSHQWYTVLDLKDAFFCLRLHPTSQPLFAFEWRDPEMGISGQLTWTRLPQGFKNSPTLFNEALHRDLADFRIQHPDLILLQYVDDLLLAATSEQDCQRGTRALLQTLGNLGYRASAKKAQICQKQVKYLGYLLKEGQRWLTEARKETVMGQPTPKTPRQLREFLGTAGFCRLWIPGFAEMAAPLYPLTKPGTLFNWGPDQQKAYQEIKQALLTAPALGLPDLTKPFELFVDEKQGYAKGVLTQKLGPWRRPVAYLSKKLDPVAAGWPPCLRMVAAIAVLTKDAGKLTMGQPLVILAPHAVEALVKQPPDRWLSNARMTHYQAMLLDTDRVQFGPVVALNPATLLPLPEKEAPHDCLEILAETHGTRPDLTDQPIPDADYTWYTDGSSFLQEGQRRAGAAVTTETEVIWARALPAGTSAQRAELIALTQALKMAEGKKLNVYTDSRYAFATAHVHGEIYRRRGWLTSEGREIKNKNEILALLKALFLPKRLSIIHCPGHQKGNSAEARGNRMADQAAREAAMKAVLETSTLLAGKRTADGSEFEKRTADGSEFESPKKKAKVE

SEQ ID NO: 6055 - protein, 2005 aa, synthetic construct
MPAAKRVKLDGGDKKYSIGLDIGTNSVGWAVITDEYKVPSKKFKVLGNTDRHSIKKNLIGALLFDSGETAEATRLKRTARRRYTRRKNRICYLQEIFSNEMAKVDDSFFHRLEESFLVEEDKKHERHPIFGNIVDEVAYHEKYPTIYHLRKKLVDSTDKADLRLIYLALAHMIKFRGHFLIEGDLNPDNSDVDKLFIQLVQTYNQLFEENPINASGVDAKAILSARLSKSRRLENLIAQLPGEKKNGLFGNLIALSLGLTPNFKSNFDLAEDAKLQLSKDTYDDDLDNLLAQIGDQYADLFLAAKNLSDAILLSDILRVNTEITKAPLSASMIKRYDEHHQDLTLLKALVRQQLPEKYKEIFFDQSKNGYAGYIDGGASQEEFYKFIKPILEKMDGTEELLVKLNREDLLRKQRTFDNGSIPHQIHLGELHAILRRQEDFYPFLKDNREKIEKILTFRIPYYVGPLARGNSRFAWMTRKSEETITPWNFEEVVDKGASAQSFIERMTNFDKNLPNEKVLPKHSLLYEYFTVYNELTKVKYVTEGMRKPAFLSGEQKKAIVDLLFKTNRKVTVKQLKEDYFKKIECFDSVEISGVEDRFNASLGTYHDLLKIIKDKDFLDNEENEDILEDIVLTLTLFEDREMIEERLKTYAHLFDDKVMKQLKRRRYTGWGRLSRKLINGIRDKQSGKTILDFLKSDGFANRNFMQLIHDDSLTFKEDIQKAQVSGQGDSLHEHIANLAGSPAIKKGILQTVKVVDELVKVMGRHKPENIVIEMARENQTTQKGQKNSRERMKRIEEGIKELGSQILKEHPVENTQLQNEKLYLYYLQNGRDMYVDQELDINRLSDYDVDHIVPQSFLKDDSIDNKVLTRSDKARGKSDNVPSEEVVKKMKNYWRQLLNAKLITQRKFDNLTKAERGGLSELDKAGFIKRQLVETRQITKHVAQILDSRMNTKYDENDKLIREVKVITLKSKLVSDFRKDFQFYKVREINNYHHAHDAYLNAVVGTALIKKYPKLESEFVYGDYKVYDVRKMIAKSEQEIGKATAKYFFYSNIMNFFKTEITLANGEIRKRPLIETNGETGEIVWDKGRDFATVRKVLSMPQVNIVKKTEVQTGGFSKESILPKRNSDKLIARKKDWDPKKYGGFDSPTVAYSVLVVAKVEKGKSKKLKSVKELLGITIMERSSFEKNPIDFLEAKGYKEVKKDLIIKLPKYSLFELENGRKRMLASAGELQKGNELALPSKYVNFLYLASHYEKLKGSPEDNEQKQLFVEQHKHYLDEIIEQISEFSKRVILADANLDKVLSAYNKHRDKPIREQAENIIHLFTLTNLGAPAAFKYFDTTIDRKRYTSTKEVLDATLIHQSITGLYETRIDLSQLGGDGGGGSGGSGGSGGSGGSGGGVLDTPPSHIGLEHLPPPPEVPQFPLNLERLQALQDLVHRSLEAGYISPWDGPGNNPVFPVRKPNGAWRFVHDLRATNALTKPIPALSPGPPDLTAPPTHPPHIICLDLKDAFFQIPVEDRFRFYLSFTLPSPGGLQPHRRFAWRVLPQGFINSPALFQRALQEPLRQVSAAFSQSLLVSYMDDILYASPTEEQRSQCYQALAARLRDLGFQVASEKTSQTPSPVPFLGQMVHEQIVTYQSLPTLQISSPISLHQLQAVLGDLQWVSRGTPTTRRPLQLLYSSLKRHHDPRAIIQLSPEQLQGIAELRQALSHNARSRYNEQEPLLAYVHLTRAGSTLVLFQKGAQFPLAYFQTPLTDNQASPWGLLLLLGCQYLQTQALSSYAKPILKYYHNLPKTSLDNWIQSSEDPRVQELLQLWPQISSQGIQPPGPWKTLITRAEVFLTPQFSPDPIPAALCLFSDGATGRGAYCLWKDHLLDFQAVPAPESAQKGELAGLLAGLAAAPPEPVNIWVDSKYLYSLLRTWVLGAWLQPDPVPSYALLYKSLLRHPAIVVGHVRSHSSASHPIASLNNYVDQLAGKRTADGSEFEKRTADGSEFESPKKKAKVE

SEQ ID NO: 6056 - protein, 2177 aa, synthetic construct
MPAAKRVKLDGGDKKYSIGLDIGTNSVGWAVITDEYKVPSKKFKVLGNTDRHSIKKNLIGALLFDSGETAEATRLKRTARRRYTRRKNRICYLQEIFSNEMAKVDDSFFHRLEESFLVEEDKKHERHPIFGNIVDEVAYHEKYPTIYHLRKKLVDSTDKADLRLIYLALAHMIKFRGHFLIEGDLNPDNSDVDKLFIQLVQTYNQLFEENPINASGVDAKAILSARLSKSRRLENLIAQLPGEKKNGLFGNLIALSLGLTPNFKSNFDLAEDAKLQLSKDTYDDDLDNLLAQIGDQYADLFLAAKNLSDAILLSDILRVNTEITKAPLSASMIKRYDEHHQDLTLLKALVRQQLPEKYKEIFFDQSKNGYAGYIDGGASQEEFYKFIKPILEKMDGTEELLVKLNREDLLRKQRTFDNGSIPHQIHLGELHAILRRQEDFYPFLKDNREKIEKILTFRIPYYVGPLARGNSRFAWMTRKSEETITPWNFEEVVDKGASAQSFIERMTNFDKNLPNEKVLPKHSLLYEYFTVYNELTKVKYVTEGMRKPAFLSGEQKKAIVDLLFKTNRKVTVKQLKEDYFKKIECFDSVEISGVEDRFNASLGTYHDLLKIIKDKDFLDNEENEDILEDIVLTLTLFEDREMIEERLKTYAHLFDDKVMKQLKRRRYTGWGRLSRKLINGIRDKQSGKTILDFLKSDGFANRNFMQLIHDDSLTFKEDIQKAQVSGQGDSLHEHIANLAGSPAIKKGILQTVKVVDELVKVMGRHKPENIVIEMARENQTTQKGQKNSRERMKRIEEGIKELGSQILKEHPVENTQLQNEKLYLYYLQNGRDMYVDQELDINRLSDYDVDHIVPQSFLKDDSIDNKVLTRSDKARGKSDNVPSEEVVKKMKNYWRQLLNAKLITQRKFDNLTKAERGGLSELDKAGFIKRQLVETRQITKHVAQILDSRMNTKYDENDKLIREVKVITLKSKLVSDFRKDFQFYKVREINNYHHAHDAYLNAVVGTALIKKYPKLESEFVYGDYKVYDVRKMIAKSEQEIGKATAKYFFYSNIMNFFKTEITLANGEIRKRPLIETNGETGEIVWDKGRDFATVRKVLSMPQVNIVKKTEVQTGGFSKESILPKRNSDKLIARKKDWDPKKYGGFDSPTVAYSVLVVAKVEKGKSKKLKSVKELLGITIMERSSFEKNPIDFLEAKGYKEVKKDLIIKLPKYSLFELENGRKRMLASAGELQKGNELALPSKYVNFLYLASHYEKLKGSPEDNEQKQLFVEQHKHYLDEIIEQISEFSKRVILADANLDKVLSAYNKHRDKPIREQAENIIHLFTLTNLGAPAAFKYFDTTIDRKRYTSTKEVLDATLIHQSITGLYETRIDLSQLGGDGGGGSGGSGGSGGSGGSGGMDLLKPLTVERKGVKIKGYWNSQADITCVPKDLLQGEEPVRQQNVTTIHGTQEGDVYYVNLKIDGRRINTEVIGTTLDYAIITPGDVPWILKKPLELTIKLDLEEQQGTLLNNSILSKKGKEELKQLFEKYSALWQSWENQVGHRRIRPHKIATGTVKPTPQKQYHINPKAKPDIQIVINDLLKQGVLIQKESTMNTPVYPVPKPNGRWRMVLDYRAVNKVTPLIAVQNQHSYGILGSLFKGRYKTTIDLSNGFWAHPIVPEDYWITAFTWQGKQYCWTVLPQGFLNSPGLFTGDVVDLLQGIPNVEVYVDDVYISHDSEKEHLEYLDILFNRLKEAGYIISLKKSNIANSIVDFLGFQITNEGRGLTDTFKEKLENITAPTTLKQLQSILGLLNFARNFIPDFTELIAPLYALIPKSTKNYVPWQIEHSTTLETLITKLNGAEYLQGRKGDKTLIMKVNASYTTGYIRYYNEGEKKPISYVSIVFSKTELKFTELEKLLTTVHKGLLKALDLSMGQNIHVYSPIVSMQNIQKTPQTAKKALASRWLSWLSYLEDPRIRFFYDPQMPALKDLPAVDTGKDNKKHPSNFQHIFYTDGSAITSPTKEGHLNAGMGIVYFINKDGNLQKQQEWSISLGNHTAQFAEIAAFEFALKKCLPLGGNILVVTDSNYVAKAYNEELDVWASNGFVNNRKKPLKHISKWKSVADLKRLRPDVVVTHEPGHQKLDSSPHAYGNNLADQLATQASFKVHAGKRTADGSEFEKRTADGSEFESPKKKAKVE

SEQ ID NO: 6057 - protein, 2177 aa, synthetic construct
MPAAKRVKLDGGDKKYSIGLDIGTNSVGWAVITDEYKVPSKKFKVLGNTDRHSIKKNLIGALLFDSGETAEATRLKRTARRRYTRRKNRICYLQEIFSNEMAKVDDSFFHRLEESFLVEEDKKHERHPIFGNIVDEVAYHEKYPTIYHLRKKLVDSTDKADLRLIYLALAHMIKFRGHFLIEGDLNPDNSDVDKLFIQLVQTYNQLFEENPINASGVDAKAILSARLSKSRRLENLIAQLPGEKKNGLFGNLIALSLGLTPNFKSNFDLAEDAKLQLSKDTYDDDLDNLLAQIGDQYADLFLAAKNLSDAILLSDILRVNTEITKAPLSASMIKRYDEHHQDLTLLKALVRQQLPEKYKEIFFDQSKNGYAGYIDGGASQEEFYKFIKPILEKMDGTEELLVKLNREDLLRKQRTFDNGSIPHQIHLGELHAILRRQEDFYPFLKDNREKIEKILTFRIPYYVGPLARGNSRFAWMTRKSEETITPWNFEEVVDKGASAQSFIERMTNFDKNLPNEKVLPKHSLLYEYFTVYNELTKVKYVTEGMRKPAFLSGEQKKAIVDLLFKTNRKVTVKQLKEDYFKKIECFDSVEISGVEDRFNASLGTYHDLLKIIKDKDFLDNEENEDILEDIVLTLTLFEDREMIEERLKTYAHLFDDKVMKQLKRRRYTGWGRLSRKLINGIRDKQSGKTILDFLKSDGFANRNFMQLIHDDSLTFKEDIQKAQVSGQGDSLHEHIANLAGSPAIKKGILQTVKVVDELVKVMGRHKPENIVIEMARENQTTQKGQKNSRERMKRIEEGIKELGSQILKEHPVENTQLQNEKLYLYYLQNGRDMYVDQELDINRLSDYDVDHIVPQSFLKDDSIDNKVLTRSDKARGKSDNVPSEEVVKKMKNYWRQLLNAKLITQRKFDNLTKAERGGLSELDKAGFIKRQLVETRQITKHVAQILDSRMNTKYDENDKLIREVKVITLKSKLVSDFRKDFQFYKVREINNYHHAHDAYLNAVVGTALIKKYPKLESEFVYGDYKVYDVRKMIAKSEQEIGKATAKYFFYSNIMNFFKTEITLANGEIRKRPLIETNGETGEIVWDKGRDFATVRKVLSMPQVNIVKKTEVQTGGFSKESILPKRNSDKLIARKKDWDPKKYGGFDSPTVAYSVLVVAKVEKGKSKKLKSVKELLGITIMERSSFEKNPIDFLEAKGYKEVKKDLIIKLPKYSLFELENGRKRMLASAGELQKGNELALPSKYVNFLYLASHYEKLKGSPEDNEQKQLFVEQHKHYLDEIIEQISEFSKRVILADANLDKVLSAYNKHRDKPIREQAENIIHLFTLTNLGAPAAFKYFDTTIDRKRYTSTKEVLDATLIHQSITGLYETRIDLSQLGGDGGGGSGGSGGSGGSGGSGGMDLLKPLTVERKGVKIKGYWNSQADITCVPKDLLQGEEPVRQQNVTTIHGTQEGDVYYVNLKIDGRRINTEVIGTTLDYAIITPGDVPWILKKPLELTIKLDLEEQQGTLLNNSILSKKGKEELKQLFEKYSALWQSWENQVGHRRIRPHKIATGTVKPTPQKQYHINPKAKPDIQIVINDLLKQGVLIQKESTMNTPVYPVPKPNGRWRMVLDYRAVNKVTPLIAVQNQHSYGILGSLFKGRYKTTIDLSNGFWAHPIVPEDYWITAFTWQGKQYCWTVLPQGFLNSPGLFNGDVVDLLQGIPNVEVYVDDVYISHDSEKEHLEYLDILFNRLKEAGYIISLKKSNIANSIVDFLGFQITNEGRGLTDTFKEKLENITAPTTLKQLQSILGLLNFARNFIPDFTELIAPLYALIPKSPKNYVPWQIEHSTTLETLITKLNGAEYLQGRKGDKTLIMKVNASYTTGYIRYYNEGEKKPISYVSIVFSKTELKFTELEKLLTTVHKGLLKALDLSMGQNIHVYSPIVSMQNIQKTPQTAKKALASRWLSWLSYLEDPRIRFFYDPQMPALKDLPAVDTGKDNKKHPSNFQHIFYTDGSAITSPTKEGHLNAGMGIVYFINKDGNLQKQQEWSISLGNHTAQFAEIAAFEFALKKCLPLGGNILVVTDSNYVAKAYNEELDVWASNGFVNNRKKPLKHISKWKSVADLKRLRPDVVVTHEPGHQKLDSSPHAYGNNLADQLATQASFKVHAGKRTADGSEFEKRTADGSEFESPKKKAKVE

SEQ ID NO: 6058 - protein, 2099 aa, synthetic construct
MPAAKRVKLDGGDKKYSIGLDIGTNSVGWAVITDEYKVPSKKFKVLGNTDRHSIKKNLIGALLFDSGETAEATRLKRTARRRYTRRKNRICYLQEIFSNEMAKVDDSFFHRLEESFLVEEDKKHERHPIFGNIVDEVAYHEKYPTIYHLRKKLVDSTDKADLRLIYLALAHMIKFRGHFLIEGDLNPDNSDVDKLFIQLVQTYNQLFEENPINASGVDAKAILSARLSKSRRLENLIAQLPGEKKNGLFGNLIALSLGLTPNFKSNFDLAEDAKLQLSKDTYDDDLDNLLAQIGDQYADLFLAAKNLSDAILLSDILRVNTEITKAPLSASMIKRYDEHHQDLTLLKALVRQQLPEKYKEIFFDQSKNGYAGYIDGGASQEEFYKFIKPILEKMDGTEELLVKLNREDLLRKQRTFDNGSIPHQIHLGELHAILRRQEDFYPFLKDNREKIEKILTFRIPYYVGPLARGNSRFAWMTRKSEETITPWNFEEVVDKGASAQSFIERMTNFDKNLPNEKVLPKHSLLYEYFTVYNELTKVKYVTEGMRKPAFLSGEQKKAIVDLLFKTNRKVTVKQLKEDYFKKIECFDSVEISGVEDRFNASLGTYHDLLKIIKDKDFLDNEENEDILEDIVLTLTLFEDREMIEERLKTYAHLFDDKVMKQLKRRRYTGWGRLSRKLINGIRDKQSGKTILDFLKSDGFANRNFMQLIHDDSLTFKEDIQKAQVSGQGDSLHEHIANLAGSPAIKKGILQTVKVVDELVKVMGRHKPENIVIEMARENQTTQKGQKNSRERMKRIEEGIKELGSQILKEHPVENTQLQNEKLYLYYLQNGRDMYVDQELDINRLSDYDVDHIVPQSFLKDDSIDNKVLTRSDKARGKSDNVPSEEVVKKMKNYWRQLLNAKLITQRKFDNLTKAERGGLSELDKAGFIKRQLVETRQITKHVAQILDSRMNTKYDENDKLIREVKVITLKSKLVSDFRKDFQFYKVREINNYHHAHDAYLNAVVGTALIKKYPKLESEFVYGDYKVYDVRKMIAKSEQEIGKATAKYFFYSNIMNFFKTEITLANGEIRKRPLIETNGETGEIVWDKGRDFATVRKVLSMPQVNIVKKTEVQTGGFSKESILPKRNSDKLIARKKDWDPKKYGGFDSPTVAYSVLVVAKVEKGKSKKLKSVKELLGITIMERSSFEKNPIDFLEAKGYKEVKKDLIIKLPKYSLFELENGRKRMLASAGELQKGNELALPSKYVNFLYLASHYEKLKGSPEDNEQKQLFVEQHKHYLDEIIEQISEFSKRVILADANLDKVLSAYNKHRDKPIREQAENIIHLFTLTNLGAPAAFKYFDTTIDRKRYTSTKEVLDATLIHQSITGLYETRIDLSQLGGDGGGGSGGSGGSGGSGGSGGTLQLEEEYRLFEPESTQKQEMDIWLKNFPQAWAETGGMGTAHCQAPVLIQLKATATPISIRQYPMPHEAYQGIKPHIRRMLDQGILKPCQSPWNTPLLPVKKPGTEDYRPVQDLREVNKRVEDIHPTVPNPYNLLSTLPPSHPWYTVLDLKDAFFCLRLHSESQLLFAFEWRDPEIGLSGQLTWTRLPQGFKNSPTLFNEALHSDLADFRVRYPALVLLQYVDDLLLAAATRTECLEGTKALLETLGNKGYRASAKKAQICLQEVTYLGYSLKDGQRWLTKARKEAILSIPVPKNSRQVREFLGTAGYCRLWIPGFAELAAPLYPLTRPGTLFQWGTEQQLAFEDIKKALLSSPALGLPDITKPFELFIDENSGFAKGVLVQKLGPWKRPVAYLSKKLDTVASGWPPCLRMVAAIAILVKDAGKLTLGQPLTILTSHPVEALVRQPPNKWLSNARMTHYQAMLLDAERVHFGPTVSLNPATLLPLPSGGNHHDCLQILAETHGTRPDLTDQPLPDADLTWYTDGSSFIRNGEREAGAAVTTESEVIWAAPLPPGTSAQRAELIALTQALKMAEGKKLTVYTDSRYAFATTHVHGEIYRRRGWLTSEGKEIKNKNEILALLEALFLPKRLSIIHCPGHQKGDSPQAKGNRLADDTAKKAATETHSSLTVLPAGKRTADGSEFEKRTADGSEFESPKKKAKVE

SEQ ID NO: 6059 - protein, 2099 aa, synthetic construct
MPAAKRVKLDGGDKKYSIGLDIGTNSVGWAVITDEYKVPSKKFKVLGNTDRHSIKKNLIGALLFDSGETAEATRLKRTARRRYTRRKNRICYLQEIFSNEMAKVDDSFFHRLEESFLVEEDKKHERHPIFGNIVDEVAYHEKYPTIYHLRKKLVDSTDKADLRLIYLALAHMIKFRGHFLIEGDLNPDNSDVDKLFIQLVQTYNQLFEENPINASGVDAKAILSARLSKSRRLENLIAQLPGEKKNGLFGNLIALSLGLTPNFKSNFDLAEDAKLQLSKDTYDDDLDNLLAQIGDQYADLFLAAKNLSDAILLSDILRVNTEITKAPLSASMIKRYDEHHQDLTLLKALVRQQLPEKYKEIFFDQSKNGYAGYIDGGASQEEFYKFIKPILEKMDGTEELLVKLNREDLLRKQRTFDNGSIPHQIHLGELHAILRRQEDFYPFLKDNREKIEKILTFRIPYYVGPLARGNSRFAWMTRKSEETITPWNFEEVVDKGASAQSFIERMTNFDKNLPNEKVLPKHSLLYEYFTVYNELTKVKYVTEGMRKPAFLSGEQKKAIVDLLFKTNRKVTVKQLKEDYFKKIECFDSVEISGVEDRFNASLGTYHDLLKIIKDKDFLDNEENEDILEDIVLTLTLFEDREMIEERLKTYAHLFDDKVMKQLKRRRYTGWGRLSRKLINGIRDKQSGKTILDFLKSDGFANRNFMQLIHDDSLTFKEDIQKAQVSGQGDSLHEHIANLAGSPAIKKGILQTVKVVDELVKVMGRHKPENIVIEMARENQTTQKGQKNSRERMKRIEEGIKELGSQILKEHPVENTQLQNEKLYLYYLQNGRDMYVDQELDINRLSDYDVDHIVPQSFLKDDSIDNKVLTRSDKARGKSDNVPSEEVVKKMKNYWRQLLNAKLITQRKFDNLTKAERGGLSELDKAGFIKRQLVETRQITKHVAQILDSRMNTKYDENDKLIREVKVITLKSKLVSDFRKDFQFYKVREINNYHHAHDAYLNAVVGTALIKKYPKLESEFVYGDYKVYDVRKMIAKSEQEIGKATAKYFFYSNIMNFFKTEITLANGEIRKRPLIETNGETGEIVWDKGRDFATVRKVLSMPQVNIVKKTEVQTGGFSKESILPKRNSDKLIARKKDWDPKKYGGFDSPTVAYSVLVVAKVEKGKSKKLKSVKELLGITIMERSSFEKNPIDFLEAKGYKEVKKDLIIKLPKYSLFELENGRKRMLASAGELQKGNELALPSKYVNFLYLASHYEKLKGSPEDNEQKQLFVEQHKHYLDEIIEQISEFSKRVILADANLDKVLSAYNKHRDKPIREQAENIIHLFTLTNLGAPAAFKYFDTTIDRKRYTSTKEVLDATLIHQSITGLYETRIDLSQLGGDGGGGSGGSGGSGGSGGSGGTLQLEEEYRLFEPESTQKQEMDIWLKNFPQAWAETGGMGTAHCQAPVLIQLKATATPISIRQYPMPHEAYQGIKPHIRRMLDQGILKPCQSPWNTPLLPVKKPGTEDYRPVQDLREVNKRVEDIHPTVPNPYNLLSTLPPSHPWYTVLDLKDAFFCLRLHSESQLLFAFEWRDPEIGLSGQLTWTRLPQGFKNSPTLFNEALHSDLADFRVRYPALVLLQYVDDLLLAAATRTECLEGTKALLETLGNKGYRASAKKAQICLQEVTYLGYSLKDGQRWLTKARKEAILSIPVPKNSRQVREFLGKAGYCRLFIPGFAELAAPLYPLTRPGTLFQWGTEQQLAFEDIKKALLSSPALGLPDITKPFELFIDENSGFAKGVLVQKLGPWKRPVAYLSKKLDTVASGWPPCLRMVAAIAILVKDAGKLTLGQPLTILTSHPVEALVRQPPNKWLSNARMTHYQAMLLDAERVHFGPTVSLNPATLLPLPSGGNHHDCLQILAETHGTRPDLTDQPLPDADLTWYTDGSSFIRNGEREAGAAVTTESEVIWAAPLPPGTSAQRAELIALTQALKMAEGKKLTVYTDSRYAFATTHVHGEIYRRRGWLTSEGKEIKNKNEILALLEALFLPKRLSIIHCPGHQKGDSPQAKGNRLADDTAKKAATETHSSLTVLPAGKRTADGSEFEKRTADGSEFESPKKKAKVE

SEQ ID NO: 6060 - protein, 2180 aa, synthetic construct
MPAAKRVKLDGGDKKYSIGLDIGTNSVGWAVITDEYKVPSKKFKVLGNTDRHSIKKNLIGALLFDSGETAEATRLKRTARRRYTRRKNRICYLQEIFSNEMAKVDDSFFHRLEESFLVEEDKKHERHPIFGNIVDEVAYHEKYPTIYHLRKKLVDSTDKADLRLIYLALAHMIKFRGHFLIEGDLNPDNSDVDKLFIQLVQTYNQLFEENPINASGVDAKAILSARLSKSRRLENLIAQLPGEKKNGLFGNLIALSLGLTPNFKSNFDLAEDAKLQLSKDTYDDDLDNLLAQIGDQYADLFLAAKNLSDAILLSDILRVNTEITKAPLSASMIKRYDEHHQDLTLLKALVRQQLPEKYKEIFFDQSKNGYAGYIDGGASQEEFYKFIKPILEKMDGTEELLVKLNREDLLRKQRTFDNGSIPHQIHLGELHAILRRQEDFYPFLKDNREKIEKILTFRIPYYVGPLARGNSRFAWMTRKSEETITPWNFEEVVDKGASAQSFIERMTNFDKNLPNEKVLPKHSLLYEYFTVYNELTKVKYVTEGMRKPAFLSGEQKKAIVDLLFKTNRKVTVKQLKEDYFKKIECFDSVEISGVEDRFNASLGTYHDLLKIIKDKDFLDNEENEDILEDIVLTLTLFEDREMIEERLKTYAHLFDDKVMKQLKRRRYTGWGRLSRKLINGIRDKQSGKTILDFLKSDGFANRNFMQLIHDDSLTFKEDIQKAQVSGQGDSLHEHIANLAGSPAIKKGILQTVKVVDELVKVMGRHKPENIVIEMARENQTTQKGQKNSRERMKRIEEGIKELGSQILKEHPVENTQLQNEKLYLYYLQNGRDMYVDQELDINRLSDYDVDHIVPQSFLKDDSIDNKVLTRSDKARGKSDNVPSEEVVKKMKNYWRQLLNAKLITQRKFDNLTKAERGGLSELDKAGFIKRQLVETRQITKHVAQILDSRMNTKYDENDKLIREVKVITLKSKLVSDFRKDFQFYKVREINNYHHAHDAYLNAVVGTALIKKYPKLESEFVYGDYKVYDVRKMIAKSEQEIGKATAKYFFYSNIMNFFKTEITLANGEIRKRPLIETNGETGEIVWDKGRDFATVRKVLSMPQVNIVKKTEVQTGGFSKESILPKRNSDKLIARKKDWDPKKYGGFDSPTVAYSVLVVAKVEKGKSKKLKSVKELLGITIMERSSFEKNPIDFLEAKGYKEVKKDLIIKLPKYSLFELENGRKRMLASAGELQKGNELALPSKYVNFLYLASHYEKLKGSPEDNEQKQLFVEQHKHYLDEIIEQISEFSKRVILADANLDKVLSAYNKHRDKPIREQAENIIHLFTLTNLGAPAAFKYFDTTIDRKRYTSTKEVLDATLIHQSITGLYETRIDLSQLGGDGGGGSGGSGGSGGSGGSGGMNPLQLLQPLPAEIKGTKLLAHWNSGATITCIPESFLEDEQPIKKTLIKTIHGEKQQNVYYVTFKVKGRKVEAEVIASPYEYILLSPTDVPWLTQQPLQLTILVPLQEYQEKILSKTALPEDQKQQLKTLFVKYDNLWQHWENQVGHRKIRPHNIATGDYPPRPQKQYPINPKAKPSIQIVIDDLLKQGVLTPQNSTMNTPVYPVPKPDGRWRMVLDYREVNKTIPLTAAQNQHSAGILATIVRQKYKTTLDLANGFWAHPITPESYWLTAFTWQGKQYCWTRLPQGFLNSPALFNADVVDLLKEIPNVQVYVDDIYLSHDDPKEHVQQLEKVFQILLQAGYVVSLKKSEIGQKTVEFLGFNITKEGRGLTDTFKTKLLNITPPKDLKQLQSILGKLNFARNFIPNFAELVQPLYNLIAPAKGKYIEWSEENTKQLNMVIEALNTASNLEERLPEQRLVIKVNTSPSAGYVRYYNETGKKPIMYLNYVFSKAELKFSMLEKLLTTMHKALIKAMDLAMGQEILVYSPIVSMTKIQKTPLPERKALPIRWITWMTYLEDPRIQFHYDKTLPELKHIPDVYTSSQSPVKHPSQYEGVFYTDGSAIKSPDPTKSNNAGMGIVHATYKPEYQVLNQWSIPLGNHTAQMAEIAAVEFACKKALKIPGPVLVITDSFYVAESANKELPYWKSNGFVNNKKKPLKHISKWKSIAECLSMKPDITIQHEKGISLQIPVFILKGNALADKLATQGSYVVNAGKRTADGSEFEKRTADGSEFESPKKKAKVE

SEQ ID NO: 6061 - protein, 2098 aa, synthetic construct
MPAAKRVKLDGGDKKYSIGLDIGTNSVGWAVITDEYKVPSKKFKVLGNTDRHSIKKNLIGALLFDSGETAEATRLKRTARRRYTRRKNRICYLQEIFSNEMAKVDDSFFHRLEESFLVEEDKKHERHPIFGNIVDEVAYHEKYPTIYHLRKKLVDSTDKADLRLIYLALAHMIKFRGHFLIEGDLNPDNSDVDKLFIQLVQTYNQLFEENPINASGVDAKAILSARLSKSRRLENLIAQLPGEKKNGLFGNLIALSLGLTPNFKSNFDLAEDAKLQLSKDTYDDDLDNLLAQIGDQYADLFLAAKNLSDAILLSDILRVNTEITKAPLSASMIKRYDEHHQDLTLLKALVRQQLPEKYKEIFFDQSKNGYAGYIDGGASQEEFYKFIKPILEKMDGTEELLVKLNREDLLRKQRTFDNGSIPHQIHLGELHAILRRQEDFYPFLKDNREKIEKILTFRIPYYVGPLARGNSRFAWMTRKSEETITPWNFEEVVDKGASAQSFIERMTNFDKNLPNEKVLPKHSLLYEYFTVYNELTKVKYVTEGMRKPAFLSGEQKKAIVDLLFKTNRKVTVKQLKEDYFKKIECFDSVEISGVEDRFNASLGTYHDLLKIIKDKDFLDNEENEDILEDIVLTLTLFEDREMIEERLKTYAHLFDDKVMKQLKRRRYTGWGRLSRKLINGIRDKQSGKTILDFLKSDGFANRNFMQLIHDDSLTFKEDIQKAQVSGQGDSLHEHIANLAGSPAIKKGILQTVKVVDELVKVMGRHKPENIVIEMARENQTTQKGQKNSRERMKRIEEGIKELGSQILKEHPVENTQLQNEKLYLYYLQNGRDMYVDQELDINRLSDYDVDHIVPQSFLKDDSIDNKVLTRSDKARGKSDNVPSEEVVKKMKNYWRQLLNAKLITQRKFDNLTKAERGGLSELDKAGFIKRQLVETRQITKHVAQILDSRMNTKYDENDKLIREVKVITLKSKLVSDFRKDFQFYKVREINNYHHAHDAYLNAVVGTALIKKYPKLESEFVYGDYKVYDVRKMIAKSEQEIGKATAKYFFYSNIMNFFKTEITLANGEIRKRPLIETNGETGEIVWDKGRDFATVRKVLSMPQVNIVKKTEVQTGGFSKESILPKRNSDKLIARKKDWDPKKYGGFDSPTVAYSVLVVAKVEKGKSKKLKSVKELLGITIMERSSFEKNPIDFLEAKGYKEVKKDLIIKLPKYSLFELENGRKRMLASAGELQKGNELALPSKYVNFLYLASHYEKLKGSPEDNEQKQLFVEQHKHYLDEIIEQISEFSKRVILADANLDKVLSAYNKHRDKPIREQAENIIHLFTLTNLGAPAAFKYFDTTIDRKRYTSTKEVLDATLIHQSITGLYETRIDLSQLGGDGGGGSGGSGGSGGSGGSGGVLNLEEEYRLHEKPVPSSIDPSWLQLFPTVWAERAGMGLANQVPPVVVELRSGASPVAVRQYPMSKEAREGIRPHIQKFLDLGVLVPCRSPWNTPLLPVKKPGTNDYRPVQDLREINKRVQDIHPTVPNPYNLLSSLPPSYTWYSVLDLKDAFFCLRLHPNSQPLFAFEWKDPEKGNTGQLTWTRLPQGFKNSPTLFNEALHRDLAPFRALNPQVVLLQYVDDLLVAAPTYEDCKKGTQKLLQELSKLGYRVSAKKAQLCQREVTYLGYLLKEGKRWLTPARKATVMKIPVPTTPRQVREFLGKAGFCRLFIPGFASLAAPLYPLTKPSIPFIWTEEHQQAFDHIKKALLSAPALALPDLTKPFTLYIDERAGVARGVLTQTLGPWRRPVAYLSKKLDPVASGWPTCLKAVAAVALLLKDADKLTLGQNVTVIASHSLESIVRQPPDRWMTNARMTHYQSLLLNERVSFAPPAVLNPATLLPVESEATPVHRCSEILAEETGTRRDLEDQPLPGVPTWYTDGSSFITEGKRRAGAPIVDGKRTVWASSLPEGTSAQKAELVALTQALRLAEGKNINIYTDSRYAFATAHIHGAIYKQRGWLTSAGKDIKNKEEILALLEAIHLPRRVAIIHCPGHQRGSNPVATGNRRADEAAKQAALSTRVLAGTTKPAGKRTADGSEFEKRTADGSEFESPKKKAKVE

SEQ ID NO: 6062 - protein, 2010 aa, synthetic construct
MPAAKRVKLDGGDKKYSIGLDIGTNSVGWAVITDEYKVPSKKFKVLGNTDRHSIKKNLIGALLFDSGETAEATRLKRTARRRYTRRKNRICYLQEIFSNEMAKVDDSFFHRLEESFLVEEDKKHERHPIFGNIVDEVAYHEKYPTIYHLRKKLVDSTDKADLRLIYLALAHMIKFRGHFLIEGDLNPDNSDVDKLFIQLVQTYNQLFEENPINASGVDAKAILSARLSKSRRLENLIAQLPGEKKNGLFGNLIALSLGLTPNFKSNFDLAEDAKLQLSKDTYDDDLDNLLAQIGDQYADLFLAAKNLSDAILLSDILRVNTEITKAPLSASMIKRYDEHHQDLTLLKALVRQQLPEKYKEIFFDQSKNGYAGYIDGGASQEEFYKFIKPILEKMDGTEELLVKLNREDLLRKQRTFDNGSIPHQIHLGELHAILRRQEDFYPFLKDNREKIEKILTFRIPYYVGPLARGNSRFAWMTRKSEETITPWNFEEVVDKGASAQSFIERMTNFDKNLPNEKVLPKHSLLYEYFTVYNELTKVKYVTEGMRKPAFLSGEQKKAIVDLLFKTNRKVTVKQLKEDYFKKIECFDSVEISGVEDRFNASLGTYHDLLKIIKDKDFLDNEENEDILEDIVLTLTLFEDREMIEERLKTYAHLFDDKVMKQLKRRRYTGWGRLSRKLINGIRDKQSGKTILDFLKSDGFANRNFMQLIHDDSLTFKEDIQKAQVSGQGDSLHEHIANLAGSPAIKKGILQTVKVVDELVKVMGRHKPENIVIEMARENQTTQKGQKNSRERMKRIEEGIKELGSQILKEHPVENTQLQNEKLYLYYLQNGRDMYVDQELDINRLSDYDVDHIVPQSFLKDDSIDNKVLTRSDKARGKSDNVPSEEVVKKMKNYWRQLLNAKLITQRKFDNLTKAERGGLSELDKAGFIKRQLVETRQITKHVAQILDSRMNTKYDENDKLIREVKVITLKSKLVSDFRKDFQFYKVREINNYHHAHDAYLNAVVGTALIKKYPKLESEFVYGDYKVYDVRKMIAKSEQEIGKATAKYFFYSNIMNFFKTEITLANGEIRKRPLIETNGETGEIVWDKGRDFATVRKVLSMPQVNIVKKTEVQTGGFSKESILPKRNSDKLIARKKDWDPKKYGGFDSPTVAYSVLVVAKVEKGKSKKLKSVKELLGITIMERSSFEKNPIDFLEAKGYKEVKKDLIIKLPKYSLFELENGRKRMLASAGELQKGNELALPSKYVNFLYLASHYEKLKGSPEDNEQKQLFVEQHKHYLDEIIEQISEFSKRVILADANLDKVLSAYNKHRDKPIREQAENIIHLFTLTNLGAPAAFKYFDTTIDRKRYTSTKEVLDATLIHQSITGLYETRIDLSQLGGDGGGGSGGSGGSGGSGGSGGPLGTSDSPVTHADPIDWKSEEPVWVDQWPLTQEKLSAAQQLVQEQLRLGHIEPSTSAWNSPIFVIKKKSGKWRLLQDLRKVNETMMHMGALQPGLPTPSAIPDKSYIIVIDLKDCFYTIPLAPQDCKRFAFSLPSVNFKEPMQRYQWRVLPQGMTNSPTLCQKFVATAIAPVRQRFPQLYLVHYMDDILLAHTDEHLLYQAFSILKQHLSLNGLVIADEKIQTHFPYNYLGFSLYPRVYNTQLVKLQTDHLKTLNDFQKLLGDINWIRPYLKLPTYTLQPLFDILKGDSDPASPRTLSLEGRTALQSIEEAIRQQQITYCDYQRSWGLYILPTPRAPTGVLYQDKPLRWIYLSATPTKHLLPYYELVAKIIAKGRHEAIQYFGMEPPFICVPYALEQQDWLFQFSDNWSIAFANYPGQITHHYPSDKLLQFASSHAFIFPKIVRRQPIPEATLIFTDGSSNGTAALIINHQTYYAQTSFSSAQVVELFAVHQALLTVPTSFNLFTDSSYVVGALQMIETVPIIGTTSPEVLNLFTLIQQVLHCRQHPCFFGHIRAHSTLPGALVQGNHTADVLTKQVFFQSAGKRTADGSEFEKRTADGSEFESPKKKAKVE

SEQ ID NO: 6063 - protein, 2131 aa, synthetic construct
MPAAKRVKLDGGDKKYSIGLDIGTNSVGWAVITDEYKVPSKKFKVLGNTDRHSIKKNLIGALLFDSGETAEATRLKRTARRRYTRRKNRICYLQEIFSNEMAKVDDSFFHRLEESFLVEEDKKHERHPIFGNIVDEVAYHEKYPTIYHLRKKLVDSTDKADLRLIYLALAHMIKFRGHFLIEGDLNPDNSDVDKLFIQLVQTYNQLFEENPINASGVDAKAILSARLSKSRRLENLIAQLPGEKKNGLFGNLIALSLGLTPNFKSNFDLAEDAKLQLSKDTYDDDLDNLLAQIGDQYADLFLAAKNLSDAILLSDILRVNTEITKAPLSASMIKRYDEHHQDLTLLKALVRQQLPEKYKEIFFDQSKNGYAGYIDGGASQEEFYKFIKPILEKMDGTEELLVKLNREDLLRKQRTFDNGSIPHQIHLGELHAILRRQEDFYPFLKDNREKIEKILTFRIPYYVGPLARGNSRFAWMTRKSEETITPWNFEEVVDKGASAQSFIERMTNFDKNLPNEKVLPKHSLLYEYFTVYNELTKVKYVTEGMRKPAFLSGEQKKAIVDLLFKTNRKVTVKQLKEDYFKKIECFDSVEISGVEDRFNASLGTYHDLLKIIKDKDFLDNEENEDILEDIVLTLTLFEDREMIEERLKTYAHLFDDKVMKQLKRRRYTGWGRLSRKLINGIRDKQSGKTILDFLKSDGFANRNFMQLIHDDSLTFKEDIQKAQVSGQGDSLHEHIANLAGSPAIKKGILQTVKVVDELVKVMGRHKPENIVIEMARENQTTQKGQKNSRERMKRIEEGIKELGSQILKEHPVENTQLQNEKLYLYYLQNGRDMYVDQELDINRLSDYDVDHIVPQSFLKDDSIDNKVLTRSDKARGKSDNVPSEEVVKKMKNYWRQLLNAKLITQRKFDNLTKAERGGLSELDKAGFIKRQLVETRQITKHVAQILDSRMNTKYDENDKLIREVKVITLKSKLVSDFRKDFQFYKVREINNYHHAHDAYLNAVVGTALIKKYPKLESEFVYGDYKVYDVRKMIAKSEQEIGKATAKYFFYSNIMNFFKTEITLANGEIRKRPLIETNGETGEIVWDKGRDFATVRKVLSMPQVNIVKKTEVQTGGFSKESILPKRNSDKLIARKKDWDPKKYGGFDSPTVAYSVLVVAKVEKGKSKKLKSVKELLGITIMERSSFEKNPIDFLEAKGYKEVKKDLIIKLPKYSLFELENGRKRMLASAGELQKGNELALPSKYVNFLYLASHYEKLKGSPEDNEQKQLFVEQHKHYLDEIIEQISEFSKRVILADANLDKVLSAYNKHRDKPIREQAENIIHLFTLTNLGAPAAFKYFDTTIDRKRYTSTKEVLDATLIHQSITGLYETRIDLSQLGGDGGGGSGGSGGSGGSGGSGGLLGRDLLTKLKAQIQFSTEGPQVTWEDRPAMCLVLNLEEEYRLHEKPVPPSIDPSWLQLFPMVWAEKAGMGLANQVPPVVVELKSDASPVAVRQYPMSKEAREGIRPHIQRFLDLGILVPCQSPWNTPLLPVKKPGTNDYRPVQDLREVNKRVQDIHPTVPNPYNLLSSLPPSHTWYSVLDLKDAFFCLKLHPNSQPLFAFEWRDPEKGNTGQLTWTRLPQGFKNSPTLFNEALHRDLASFRALNPQVVMLQYVDDLLVAAPTYRDCKEGTRRLLQELSKLGYRVSAKKAQLCREEVTYLGYLLKGGKRWLTPARKATVMKIPTPTTPRQVREFLGTAGFCRLWIPGFASLAAPLYPLTRPKVPFTWTEAHQEAFGRIKEALLSAPALALPDLTKPFALYVDEKEGVARGVLTQTLGPWRRPVAYLSKKLDPVASGWPTCLKAIAAVALLLKDADKLTLGQNVLVIAPHNLESIVRQPPDRWMTNARMTHYQSLLLNERVSFAPPAILNPATLLPVESDDTPIHICSEILAEETGTRPDLRDQPLPGVPAWYTDGSSFIMDGRRQAGAAIVDNKRTVWASNLPEGTSAQKAELIALTQALRLAEGKSINIYTDSRYAFATAHVHGAIYKQRGWLTSAGKDIKNKEEILALLEAIHLPKRVAIIHCPGHQRGTDPVATGNRKADEAAKQAAQSTRILTETTKNAGKRTADGSEFEKRTADGSEFESPKKKAKVE

SEQ ID NO: 6064 - protein, 2222 aa, synthetic construct
MPAAKRVKLDGGDKKYSIGLDIGTNSVGWAVITDEYKVPSKKFKVLGNTDRHSIKKNLIGALLFDSGETAEATRLKRTARRRYTRRKNRICYLQEIFSNEMAKVDDSFFHRLEESFLVEEDKKHERHPIFGNIVDEVAYHEKYPTIYHLRKKLVDSTDKADLRLIYLALAHMIKFRGHFLIEGDLNPDNSDVDKLFIQLVQTYNQLFEENPINASGVDAKAILSARLSKSRRLENLIAQLPGEKKNGLFGNLIALSLGLTPNFKSNFDLAEDAKLQLSKDTYDDDLDNLLAQIGDQYADLFLAAKNLSDAILLSDILRVNTEITKAPLSASMIKRYDEHHQDLTLLKALVRQQLPEKYKEIFFDQSKNGYAGYIDGGASQEEFYKFIKPILEKMDGTEELLVKLNREDLLRKQRTFDNGSIPHQIHLGELHAILRRQEDFYPFLKDNREKIEKILTFRIPYYVGPLARGNSRFAWMTRKSEETITPWNFEEVVDKGASAQSFIERMTNFDKNLPNEKVLPKHSLLYEYFTVYNELTKVKYVTEGMRKPAFLSGEQKKAIVDLLFKTNRKVTVKQLKEDYFKKIECFDSVEISGVEDRFNASLGTYHDLLKIIKDKDFLDNEENEDILEDIVLTLTLFEDREMIEERLKTYAHLFDDKVMKQLKRRRYTGWGRLSRKLINGIRDKQSGKTILDFLKSDGFANRNFMQLIHDDSLTFKEDIQKAQVSGQGDSLHEHIANLAGSPAIKKGILQTVKVVDELVKVMGRHKPENIVIEMARENQTTQKGQKNSRERMKRIEEGIKELGSQILKEHPVENTQLQNEKLYLYYLQNGRDMYVDQELDINRLSDYDVDHIVPQSFLKDDSIDNKVLTRSDKARGKSDNVPSEEVVKKMKNYWRQLLNAKLITQRKFDNLTKAERGGLSELDKAGFIKRQLVETRQITKHVAQILDSRMNTKYDENDKLIREVKVITLKSKLVSDFRKDFQFYKVREINNYHHAHDAYLNAVVGTALIKKYPKLESEFVYGDYKVYDVRKMIAKSEQEIGKATAKYFFYSNIMNFFKTEITLANGEIRKRPLIETNGETGEIVWDKGRDFATVRKVLSMPQVNIVKKTEVQTGGFSKESILPKRNSDKLIARKKDWDPKKYGGFDSPTVAYSVLVVAKVEKGKSKKLKSVKELLGITIMERSSFEKNPIDFLEAKGYKEVKKDLIIKLPKYSLFELENGRKRMLASAGELQKGNELALPSKYVNFLYLASHYEKLKGSPEDNEQKQLFVEQHKHYLDEIIEQISEFSKRVILADANLDKVLSAYNKHRDKPIREQAENIIHLFTLTNLGAPAAFKYFDTTIDRKRYTSTKEVLDATLIHQSITGLYETRIDLSQLGGDGGGGSGGSGGSGGSGGSGGTLGDQGSRGSDPLPEPRVTLTVEGIPTEFLVNTGAEHSVLTKPMGKMGSKRTVVAGATGSKVYPWTTKRLLKIGQKQVTHSFLVIPECPAPLLGRDLLTKLKAQIQFSTEGPQVTWEDRPAMCLVLNLEEEYRLHEKPVPPSIDPSWLQLFPMVWAEKAGMGLANQVPPVVVELKSDASPVAVRQYPMSKEAREGIRPHIQRFLDLGILVPCQSPWNTPLLPVKKPGTNDYRPVQDLREVNKRVQDIHPTVPNPYNLLSSLPPSHTWYSVLDLKDAFFCLKLHPNSQPLFAFEWRDPEKGNTGQLTWTRLPQGFKNSPTLFNEALHRDLASFRALNPQVVMLQYVDDLLVAAPTYRDCKEGTRRLLQELSKLGYRVSAKKAQLCREEVTYLGYLLKGGKRWLTPARKATVMKIPTPTTPRQVREFLGTAGFCRLWIPGFASLAAPLYPLTRPKVPFTWTEAHQEAFGRIKEALLSAPALALPDLTKPFALYVDEKEGVARGVLTQTLGPWRRPVAYLSKKLDPVASGWPTCLKAIAAVALLLKDADKLTLGQNVLVIAPHNLESIVRQPPDRWMTNARMTHYQSLLLNERVSFAPPAILNPATLLPVESDDTPIHICSEILAEETGTRPDLRDQPLPGVPAWYTDGSSFIMDGRRQAGAAIVDNKRTVWASNLPEGTSAQKAELIALTQALRLAEGKSINIYTDSRYAFATAHVHGAIYKQRGWLTSAGKDIKNKEEILALLEAIHLPKRVAIIHCPGHQRGTDPVATGNRKADEAAKQAAQSTRILTETTKNAGKRTADGSEFEKRTADGSEFESPKKKAKVE

SEQ ID NO: 6065 - protein, 2222 aa, synthetic construct
MPAAKRVKLDGGDKKYSIGLDIGTNSVGWAVITDEYKVPSKKFKVLGNTDRHSIKKNLIGALLFDSGETAEATRLKRTARRRYTRRKNRICYLQEIFSNEMAKVDDSFFHRLEESFLVEEDKKHERHPIFGNIVDEVAYHEKYPTIYHLRKKLVDSTDKADLRLIYLALAHMIKFRGHFLIEGDLNPDNSDVDKLFIQLVQTYNQLFEENPINASGVDAKAILSARLSKSRRLENLIAQLPGEKKNGLFGNLIALSLGLTPNFKSNFDLAEDAKLQLSKDTYDDDLDNLLAQIGDQYADLFLAAKNLSDAILLSDILRVNTEITKAPLSASMIKRYDEHHQDLTLLKALVRQQLPEKYKEIFFDQSKNGYAGYIDGGASQEEFYKFIKPILEKMDGTEELLVKLNREDLLRKQRTFDNGSIPHQIHLGELHAILRRQEDFYPFLKDNREKIEKILTFRIPYYVGPLARGNSRFAWMTRKSEETITPWNFEEVVDKGASAQSFIERMTNFDKNLPNEKVLPKHSLLYEYFTVYNELTKVKYVTEGMRKPAFLSGEQKKAIVDLLFKTNRKVTVKQLKEDYFKKIECFDSVEISGVEDRFNASLGTYHDLLKIIKDKDFLDNEENEDILEDIVLTLTLFEDREMIEERLKTYAHLFDDKVMKQLKRRRYTGWGRLSRKLINGIRDKQSGKTILDFLKSDGFANRNFMQLIHDDSLTFKEDIQKAQVSGQGDSLHEHIANLAGSPAIKKGILQTVKVVDELVKVMGRHKPENIVIEMARENQTTQKGQKNSRERMKRIEEGIKELGSQILKEHPVENTQLQNEKLYLYYLQNGRDMYVDQELDINRLSDYDVDHIVPQSFLKDDSIDNKVLTRSDKARGKSDNVPSEEVVKKMKNYWRQLLNAKLITQRKFDNLTKAERGGLSELDKAGFIKRQLVETRQITKHVAQILDSRMNTKYDENDKLIREVKVITLKSKLVSDFRKDFQFYKVREINNYHHAHDAYLNAVVGTALIKKYPKLESEFVYGDYKVYDVRKMIAKSEQEIGKATAKYFFYSNIMNFFKTEITLANGEIRKRPLIETNGETGEIVWDKGRDFATVRKVLSMPQVNIVKKTEVQTGGFSKESILPKRNSDKLIARKKDWDPKKYGGFDSPTVAYSVLVVAKVEKGKSKKLKSVKELLGITIMERSSFEKNPIDFLEAKGYKEVKKDLIIKLPKYSLFELENGRKRMLASAGELQKGNELALPSKYVNFLYLASHYEKLKGSPEDNEQKQLFVEQHKHYLDEIIEQISEFSKRVILADANLDKVLSAYNKHRDKPIREQAENIIHLFTLTNLGAPAAFKYFDTTIDRKRYTSTKEVLDATLIHQSITGLYETRIDLSQLGGDGGGGSGGSGGSGGSGGSGGTLGDQGSRGSDPLPEPRVTLTVEGIPTEFLVNTGAEHSVLTKPMGKMGSKRTVVAGATGSKVYPWTTKRLLKIGQKQVTHSFLVIPECPAPLLGRDLLTKLKAQIQFSTEGPQVTWEDRPAMCLVLNLEEEYRLHEKPVPPSIDPSWLQLFPMVWAEKAGMGLANQVPPVVVELKSDASPVAVRQYPMSKEAREGIRPHIQRFLDLGILVPCQSPWNTPLLPVKKPGTNDYRPVQDLREVNKRVQDIHPTVPNPYNLLSSLPPSHTWYSVLDLKDAFFCLKLHPNSQPLFAFEWRDPEKGNTGQLTWTRLPQGFKNSPTLFNEALHRDLASFRALNPQVVMLQYVDDLLVAAPTYRDCKEGTRRLLQELSKLGYRVSAKKAQLCREEVTYLGYLLKGGKRWLTPARKATVMKIPTPTTPRQVREFLGKAGFCRLFIPGFASLAAPLYPLTRPKVPFTWTEAHQEAFGRIKEALLSAPALALPDLTKPFALYVDEKEGVARGVLTQTLGPWRRPVAYLSKKLDPVASGWPTCLKAIAAVALLLKDADKLTLGQNVLVIAPHNLESIVRQPPDRWMTNARMTHYQSLLLNERVSFAPPAILNPATLLPVESDDTPIHICSEILAEETGTRPDLRDQPLPGVPAWYTDGSSFIMDGRRQAGAAIVDNKRTVWASNLPEGTSAQKAELIALTQALRLAEGKSINIYTDSRYAFATAHVHGAIYKQRGWLTSAGKDIKNKEEILALLEAIHLPKRVAIIHCPGHQRGTDPVATGNRKADEAAKQAAQSTRILTETTKNAGKRTADGSEFEKRTADGSEFESPKKKAKVE

SEQ ID NO: 6066 - protein, 2100 aa, synthetic construct
MPAAKRVKLDGGDKKYSIGLDIGTNSVGWAVITDEYKVPSKKFKVLGNTDRHSIKKNLIGALLFDSGETAEATRLKRTARRRYTRRKNRICYLQEIFSNEMAKVDDSFFHRLEESFLVEEDKKHERHPIFGNIVDEVAYHEKYPTIYHLRKKLVDSTDKADLRLIYLALAHMIKFRGHFLIEGDLNPDNSDVDKLFIQLVQTYNQLFEENPINASGVDAKAILSARLSKSRRLENLIAQLPGEKKNGLFGNLIALSLGLTPNFKSNFDLAEDAKLQLSKDTYDDDLDNLLAQIGDQYADLFLAAKNLSDAILLSDILRVNTEITKAPLSASMIKRYDEHHQDLTLLKALVRQQLPEKYKEIFFDQSKNGYAGYIDGGASQEEFYKFIKPILEKMDGTEELLVKLNREDLLRKQRTFDNGSIPHQIHLGELHAILRRQEDFYPFLKDNREKIEKILTFRIPYYVGPLARGNSRFAWMTRKSEETITPWNFEEVVDKGASAQSFIERMTNFDKNLPNEKVLPKHSLLYEYFTVYNELTKVKYVTEGMRKPAFLSGEQKKAIVDLLFKTNRKVTVKQLKEDYFKKIECFDSVEISGVEDRFNASLGTYHDLLKIIKDKDFLDNEENEDILEDIVLTLTLFEDREMIEERLKTYAHLFDDKVMKQLKRRRYTGWGRLSRKLINGIRDKQSGKTILDFLKSDGFANRNFMQLIHDDSLTFKEDIQKAQVSGQGDSLHEHIANLAGSPAIKKGILQTVKVVDELVKVMGRHKPENIVIEMARENQTTQKGQKNSRERMKRIEEGIKELGSQILKEHPVENTQLQNEKLYLYYLQNGRDMYVDQELDINRLSDYDVDHIVPQSFLKDDSIDNKVLTRSDKARGKSDNVPSEEVVKKMKNYWRQLLNAKLITQRKFDNLTKAERGGLSELDKAGFIKRQLVETRQITKHVAQILDSRMNTKYDENDKLIREVKVITLKSKLVSDFRKDFQFYKVREINNYHHAHDAYLNAVVGTALIKKYPKLESEFVYGDYKVYDVRKMIAKSEQEIGKATAKYFFYSNIMNFFKTEITLANGEIRKRPLIETNGETGEIVWDKGRDFATVRKVLSMPQVNIVKKTEVQTGGFSKESILPKRNSDKLIARKKDWDPKKYGGFDSPTVAYSVLVVAKVEKGKSKKLKSVKELLGITIMERSSFEKNPIDFLEAKGYKEVKKDLIIKLPKYSLFELENGRKRMLASAGELQKGNELALPSKYVNFLYLASHYEKLKGSPEDNEQKQLFVEQHKHYLDEIIEQISEFSKRVILADANLDKVLSAYNKHRDKPIREQAENIIHLFTLTNLGAPAAFKYFDTTIDRKRYTSTKEVLDATLIHQSITGLYETRIDLSQLGGDGGGGSGGSGGSGGSGGSGGTLGIEDEYRLHETSTEPDVSLGSTWLSDFPQAWAETGGMGLAVRQAPLIIPLKATSTPVSIQQYPMSHEARLGIKPHIQRLLDQGILVPCQSPWNTPLLPVKKPGTNDYRPVQDLREVNKRVEDIHPTVPNPYNLLSGLPPSHQWYTVLDLKDAFFCLRLHPTSQPLFAFEWRDPGMGISGQLTWTRLPQGFKNSPTLFNEALHRDLADFRIQHPDLILLQYVDDILLAATSELDCQQGTRALLQTLGDLGYRASAKKAQICQKQVKYLGYLLREGQRWLTEARKETVMGQPVPKTPRQLREFLGTAGFCRLWIPGFAEMAAPLYPLTKPGTLFSWGPDQQKAYQEIKQALLTAPALGLPDLTKPFELFVDEKQGYAKGVLTQKLGPWRRPVAYLSKKLDPVAAGWPPCLRMVAAIAVLTKDAGKLTMGQPLVILAPHAVEALVKQPPDRWLSNARMTHYQAMLLDTDRVQFGPVVALNPATLLPLPEEGAPHDCLEILAETHGTRPDLTDQPIPDADHTWYTDGSSFLQEGQRKAGAAVTTETEVIWAGALPAGTSAQRAELIALTQALKMAEGKRLNVYTDSRYAFATAHIHGEIYRRRGWLTSEGREIKNKSEILALLKALFLPKRLSIIHCLGHQKGDSAEARGNRLADQAAREAAIKTPPDTSTLLAGKRTADGSEFEKRTADGSEFESPKKKAKVE

SEQ ID NO: 6067 - protein, 2100 aa, synthetic construct
MPAAKRVKLDGGDKKYSIGLDIGTNSVGWAVITDEYKVPSKKFKVLGNTDRHSIKKNLIGALLFDSGETAEATRLKRTARRRYTRRKNRICYLQEIFSNEMAKVDDSFFHRLEESFLVEEDKKHERHPIFGNIVDEVAYHEKYPTIYHLRKKLVDSTDKADLRLIYLALAHMIKFRGHFLIEGDLNPDNSDVDKLFIQLVQTYNQLFEENPINASGVDAKAILSARLSKSRRLENLIAQLPGEKKNGLFGNLIALSLGLTPNFKSNFDLAEDAKLQLSKDTYDDDLDNLLAQIGDQYADLFLAAKNLSDAILLSDILRVNTEITKAPLSASMIKRYDEHHQDLTLLKALVRQQLPEKYKEIFFDQSKNGYAGYIDGGASQEEFYKFIKPILEKMDGTEELLVKLNREDLLRKQRTFDNGSIPHQIHLGELHAILRRQEDFYPFLKDNREKIEKILTFRIPYYVGPLARGNSRFAWMTRKSEETITPWNFEEVVDKGASAQSFIERMTNFDKNLPNEKVLPKHSLLYEYFTVYNELTKVKYVTEGMRKPAFLSGEQKKAIVDLLFKTNRKVTVKQLKEDYFKKIECFDSVEISGVEDRFNASLGTYHDLLKIIKDKDFLDNEENEDILEDIVLTLTLFEDREMIEERLKTYAHLFDDKVMKQLKRRRYTGWGRLSRKLINGIRDKQSGKTILDFLKSDGFANRNFMQLIHDDSLTFKEDIQKAQVSGQGDSLHEHIANLAGSPAIKKGILQTVKVVDELVKVMGRHKPENIVIEMARENQTTQKGQKNSRERMKRIEEGIKELGSQILKEHPVENTQLQNEKLYLYYLQNGRDMYVDQELDINRLSDYDVDHIVPQSFLKDDSIDNKVLTRSDKARGKSDNVPSEEVVKKMKNYWRQLLNAKLITQRKFDNLTKAERGGLSELDKAGFIKRQLVETRQITKHVAQILDSRMNTKYDENDKLIREVKVITLKSKLVSDFRKDFQFYKVREINNYHHAHDAYLNAVVGTALIKKYPKLESEFVYGDYKVYDVRKMIAKSEQEIGKATAKYFFYSNIMNFFKTEITLANGEIRKRPLIETNGETGEIVWDKGRDFATVRKVLSMPQVNIVKKTEVQTGGFSKESILPKRNSDKLIARKKDWDPKKYGGFDSPTVAYSVLVVAKVEKGKSKKLKSVKELLGITIMERSSFEKNPIDFLEAKGYKEVKKDLIIKLPKYSLFELENGRKRMLASAGELQKGNELALPSKYVNFLYLASHYEKLKGSPEDNEQKQLFVEQHKHYLDEIIEQISEFSKRVILADANLDKVLSAYNKHRDKPIREQAENIIHLFTLTNLGAPAAFKYFDTTIDRKRYTSTKEVLDATLIHQSITGLYETRIDLSQLGGDGGGGSGGSGGSGGSGGSGGTLNIEDEYRLHETSKEPDVSLGSTWLSDFPQAWAETGGMGLAVRQAPLIIPLKATSTPVSIKQYPMSQEARLGIKPHIQRLLDQGILVPCQSPWNTPLLPVKKPGTNDYRPVQDLREVNKRVEDIHPTVPNPYNLLSGLPPSHQWYTVLDLKDAFFCLRLHPTSQPLFAFEWRDPEMGISGQLTWTRLPQGFKNSPTLFNEALHRDLAGFRIQHPDLILLQYVDDLLLAATSELDCQQGTRALLQTLGDLGYRASAKKAQICQKQVKYLGYLLKEGQRWLTEARKETVMGQPIPKTPRQLREFLGTAGFCRLWIPGFAEMAAPLYPLTKPGTLFNWGPDQQKAFQEIKQALLTAPALGLPDLTKPFELFVDEKQGYAKGVLTQKLGPWRRPVAYLSKKLDPVAAGWPPCLRMVAAIAVLTKDAGKLTMGQPLVILAPHAVEALVKQPPDRWLSNARMTHYQALLLDTDRVQFGPVVALNPATLLPLPEEGLQHDCLDILAEAHGTRSDLMDQPLPDADHTWYTDGSSFLQEGQRKAGAAVTTETEVIWARALPAGTSAQRAELIALTQALKMAEGKKLNVYTDSRYAFATAHIHGEIYRRRGWLTSEGKEIKNKDEILALLKALFLPKRLSIIHCPGHQKGNSAEARGNRMADQAAREVATRETPETSTLLAGKRTADGSEFEKRTADGSEFESPKKKAKVE

SEQ ID NO: 6068 - protein, 2100 aa, synthetic construct
MPAAKRVKLDGGDKKYSIGLDIGTNSVGWAVITDEYKVPSKKFKVLGNTDRHSIKKNLIGALLFDSGETAEATRLKRTARRRYTRRKNRICYLQEIFSNEMAKVDDSFFHRLEESFLVEEDKKHERHPIFGNIVDEVAYHEKYPTIYHLRKKLVDSTDKADLRLIYLALAHMIKFRGHFLIEGDLNPDNSDVDKLFIQLVQTYNQLFEENPINASGVDAKAILSARLSKSRRLENLIAQLPGEKKNGLFGNLIALSLGLTPNFKSNFDLAEDAKLQLSKDTYDDDLDNLLAQIGDQYADLFLAAKNLSDAILLSDILRVNTEITKAPLSASMIKRYDEHHQDLTLLKALVRQQLPEKYKEIFFDQSKNGYAGYIDGGASQEEFYKFIKPILEKMDGTEELLVKLNREDLLRKQRTFDNGSIPHQIHLGELHAILRRQEDFYPFLKDNREKIEKILTFRIPYYVGPLARGNSRFAWMTRKSEETITPWNFEEVVDKGASAQSFIERMTNFDKNLPNEKVLPKHSLLYEYFTVYNELTKVKYVTEGMRKPAFLSGEQKKAIVDLLFKTNRKVTVKQLKEDYFKKIECFDSVEISGVEDRFNASLGTYHDLLKIIKDKDFLDNEENEDILEDIVLTLTLFEDREMIEERLKTYAHLFDDKVMKQLKRRRYTGWGRLSRKLINGIRDKQSGKTILDFLKSDGFANRNFMQLIHDDSLTFKEDIQKAQVSGQGDSLHEHIANLAGSPAIKKGILQTVKVVDELVKVMGRHKPENIVIEMARENQTTQKGQKNSRERMKRIEEGIKELGSQILKEHPVENTQLQNEKLYLYYLQNGRDMYVDQELDINRLSDYDVDHIVPQSFLKDDSIDNKVLTRSDKARGKSDNVPSEEVVKKMKNYWRQLLNAKLITQRKFDNLTKAERGGLSELDKAGFIKRQLVETRQITKHVAQILDSRMNTKYDENDKLIREVKVITLKSKLVSDFRKDFQFYKVREINNYHHAHDAYLNAVVGTALIKKYPKLESEFVYGDYKVYDVRKMIAKSEQEIGKATAKYFFYSNIMNFFKTEITLANGEIRKRPLIETNGETGEIVWDKGRDFATVRKVLSMPQVNIVKKTEVQTGGFSKESILPKRNSDKLIARKKDWDPKKYGGFDSPTVAYSVLVVAKVEKGKSKKLKSVKELLGITIMERSSFEKNPIDFLEAKGYKEVKKDLIIKLPKYSLFELENGRKRMLASAGELQKGNELALPSKYVNFLYLASHYEKLKGSPEDNEQKQLFVEQHKHYLDEIIEQISEFSKRVILADANLDKVLSAYNKHRDKPIREQAENIIHLFTLTNLGAPAAFKYFDTTIDRKRYTSTKEVLDATLIHQSITGLYETRIDLSQLGGDGGGGSGGSGGSGGSGGSGGTLNIEDEHRLHETSKEPDVSLGSTWLSDFPQAWAETGGMGLAVRQAPLIIPLKATSTPVSIKQYPMSQEARLGIKPHIQRLLDQGILVPCQSPWNTPLLPVKKPGTNDYRPVQDLREVNKRVEDIHPTVPNPYNLLSGLPPSHQWYTVLDLKDAFFCLRLHPTSQPLFAFEWRDPEMGISGQLTWTRLPQGFKNSPTLFDEALHRDLADFRIQHPDLILLQYVDDLLLAATSELDCQQGTRALLQTLGNLGYRASAKKAQICQKQVKYLGYLLKEGQRWLTEARKETVMGQPTPKTPRQLREFLGTAGFCRLWIPGFAEMAAPLYPLTKTGTLFNWGPDQQKAYQEIKQALLTAPALGLPDLTKPFELFVDEKQGYAKGVLTQKLGPWRRPVAYLSKKLDPVAAGWPPCLRMVAAIAVLTKDAGKLTMGQPLVILAPHAVEALVKQPPDRWLSNARMTHYQALLLDTDRVQFGPVVALNPATLLPLPEEGLQHNCLDILAEAHGTRPDLTDQPLPDADHTWYTDGSSLLQEGQRKAGAAVTTETEVIWAKALPAGTSAQRAELIALTQALKMAEGKKLNVYTDSRYAFATAHIHGEIYRRRGLLTSEGKEIKNKDEILALLKALFLPKRLSIIHCPGHQKGHSAEARGNRMADQAARKAAITETPDTSTLLAGKRTADGSEFEKRTADGSEFESPKKKAKVE

SEQ ID NO: 6069 - protein, 2094 aa, synthetic construct
MPAAKRVKLDGGDKKYSIGLDIGTNSVGWAVITDEYKVPSKKFKVLGNTDRHSIKKNLIGALLFDSGETAEATRLKRTARRRYTRRKNRICYLQEIFSNEMAKVDDSFFHRLEESFLVEEDKKHERHPIFGNIVDEVAYHEKYPTIYHLRKKLVDSTDKADLRLIYLALAHMIKFRGHFLIEGDLNPDNSDVDKLFIQLVQTYNQLFEENPINASGVDAKAILSARLSKSRRLENLIAQLPGEKKNGLFGNLIALSLGLTPNFKSNFDLAEDAKLQLSKDTYDDDLDNLLAQIGDQYADLFLAAKNLSDAILLSDILRVNTEITKAPLSASMIKRYDEHHQDLTLLKALVRQQLPEKYKEIFFDQSKNGYAGYIDGGASQEEFYKFIKPILEKMDGTEELLVKLNREDLLRKQRTFDNGSIPHQIHLGELHAILRRQEDFYPFLKDNREKIEKILTFRIPYYVGPLARGNSRFAWMTRKSEETITPWNFEEVVDKGASAQSFIERMTNFDKNLPNEKVLPKHSLLYEYFTVYNELTKVKYVTEGMRKPAFLSGEQKKAIVDLLFKTNRKVTVKQLKEDYFKKIECFDSVEISGVEDRFNASLGTYHDLLKIIKDKDFLDNEENEDILEDIVLTLTLFEDREMIEERLKTYAHLFDDKVMKQLKRRRYTGWGRLSRKLINGIRDKQSGKTILDFLKSDGFANRNFMQLIHDDSLTFKEDIQKAQVSGQGDSLHEHIANLAGSPAIKKGILQTVKVVDELVKVMGRHKPENIVIEMARENQTTQKGQKNSRERMKRIEEGIKELGSQILKEHPVENTQLQNEKLYLYYLQNGRDMYVDQELDINRLSDYDVDHIVPQSFLKDDSIDNKVLTRSDKARGKSDNVPSEEVVKKMKNYWRQLLNAKLITQRKFDNLTKAERGGLSELDKAGFIKRQLVETRQITKHVAQILDSRMNTKYDENDKLIREVKVITLKSKLVSDFRKDFQFYKVREINNYHHAHDAYLNAVVGTALIKKYPKLESEFVYGDYKVYDVRKMIAKSEQEIGKATAKYFFYSNIMNFFKTEITLANGEIRKRPLIETNGETGEIVWDKGRDFATVRKVLSMPQVNIVKKTEVQTGGFSKESILPKRNSDKLIARKKDWDPKKYGGFDSPTVAYSVLVVAKVEKGKSKKLKSVKELLGITIMERSSFEKNPIDFLEAKGYKEVKKDLIIKLPKYSLFELENGRKRMLASAGELQKGNELALPSKYVNFLYLASHYEKLKGSPEDNEQKQLFVEQHKHYLDEIIEQISEFSKRVILADANLDKVLSAYNKHRDKPIREQAENIIHLFTLTNLGAPAAFKYFDTTIDRKRYTSTKEVLDATLIHQSITGLYETRIDLSQLGGDGGGGSGGSGGSGGSGGSGGTLQLDDEYRLYSPLVKPDQNIQFWLEQFPQAWAETAGMGLAKQVPPQVIQLKASATPVSVRQYPLSKEAQEGIRPHVQRLIQQGILVPVQSPWNTPLLPVRKPGTNDYRPVQDLREVNKRVQDIHPTVPNPYNLLCALPPQRSWYTVLDLKDAFFCLRLHPTSQPLFAFEWRDPGTGRTGQLTWTRLPQGFKNSPTIFDEALHRDLANFRIQHPQVTLLQYVDDLLLAGATKQDCLEGTKALLLELSDLGYRASAKKAQICRREVTYLGYSLRDGQRWLTEARKKTVVQIPAPTTAKQVREFLGTAGFCRLWIPGFATLAAPLYPLTKEKGEFSWAPEHQKAFDAIKKALLSAPALALPDVTKPFTLYVDERKGVARGVLTQTLGPWRRPVAYLSKKLDPVASGWPVCLKAIAAVAILVKDADKLTLGQNITVIAPHALENIVRQPPDRWMTNARMTHYQSLLLTERVTFAPPAALNPATLLPEETDEPVTHDCHQLLIEETGVRKDLTDIPLTGEVLTWFTDGSSYVVEGKRMAGAAVVDGTRTIWASSLPEGTSAQKAELMALTQALRLAEGKSINIYTDSRYAFATAHVHGAIYKQRGLLTSAGREIKNKEEILSLLEALHLPKRLAIIHCPGHQKAKDPISRGNQMADRVAKQAAQGVNLLAGKRTADGSEFEKRTADGSEFESPKKKAKVE

SEQ ID NO: 6070 - protein, 2094 aa, synthetic construct; identical to SEQ ID NO: 6069

SEQ ID NO: 6071 - protein, 2180 aa, synthetic construct
MPAAKRVKLDGGDKKYSIGLDIGTNSVGWAVITDEYKVPSKKFKVLGNTDRHSIKKNLIGALLFDSGETAEATRLKRTARRRYTRRKNRICYLQEIFSNEMAKVDDSFFHRLEESFLVEEDKKHERHPIFGNIVDEVAYHEKYPTIYHLRKKLVDSTDKADLRLIYLALAHMIKFRGHFLIEGDLNPDNSDVDKLFIQLVQTYNQLFEENPINASGVDAKAILSARLSKSRRLENLIAQLPGEKKNGLFGNLIALSLGLTPNFKSNFDLAEDAKLQLSKDTYDDDLDNLLAQIGDQYADLFLAAKNLSDAILLSDILRVNTEITKAPLSASMIKRYDEHHQDLTLLKALVRQQLPEKYKEIFFDQSKNGYAGYIDGGASQEEFYKFIKPILEKMDGTEELLVKLNREDLLRKQRTFDNGSIPHQIHLGELHAILRRQEDFYPFLKDNREKIEKILTFRIPYYVGPLARGNSRFAWMTRKSEETITPWNFEEVVDKGASAQSFIERMTNFDKNLPNEKVLPKHSLLYEYFTVYNELTKVKYVTEGMRKPAFLSGEQKKAIVDLLFKTNRKVTVKQLKEDYFKKIECFDSVEISGVEDRFNASLGTYHDLLKIIKDKDFLDNEENEDILEDIVLTLTLFEDREMIEERLKTYAHLFDDKVMKQLKRRRYTGWGRLSRKLINGIRDKQSGKTILDFLKSDGFANRNFMQLIHDDSLTFKEDIQKAQVSGQGDSLHEHIANLAGSPAIKKGILQTVKVVDELVKVMGRHKPENIVIEMARENQTTQKGQKNSRERMKRIEEGIKELGSQILKEHPVENTQLQNEKLYLYYLQNGRDMYVDQELDINRLSDYDVDHIVPQSFLKDDSIDNKVLTRSDKARGKSDNVPSEEVVKKMKNYWRQLLNAKLITQRKFDNLTKAERGGLSELDKAGFIKRQLVETRQITKHVAQILDSRMNTKYDENDKLIREVKVITLKSKLVSDFRKDFQFYKVREINNYHHAHDAYLNAVVGTALIKKYPKLESEFVYGDYKVYDVRKMIAKSEQEIGKATAKYFFYSNIMNFFKTEITLANGEIRKRPLIETNGETGEIVWDKGRDFATVRKVLSMPQVNIVKKTEVQTGGFSKESILPKRNSDKLIARKKDWDPKKYGGFDSPTVAYSVLVVAKVEKGKSKKLKSVKELLGITIMERSSFEKNPIDFLEAKGYKEVKKDLIIKLPKYSLFELENGRKRMLASAGELQKGNELALPSKYVNFLYLASHYEKLKGSPEDNEQKQLFVEQHKHYLDEIIEQISEFSKRVILADANLDKVLSAYNKHRDKPIREQAENIIHLFTLTNLGAPAAFKYFDTTIDRKRYTSTKEVLDATLIHQSITGLYETRIDLSQLGGDGGGGSGGSGGSGGSGGSGGMDPLQLLQPLEAEIKGTKLKAHWNSGATITCVPQAFLEEEVPIKNIWIKTIHGEKEQPVYYLTFKIQGRKVEAEVISSPYDYILVSPSDIPWLMKKPLQLTTLVPLQEYEERLLKQTMLTGSYKEKLQSLFLKYDALWQHWENQVGHRRIKPHHIATGTVNPRPQKQYPINPKAKASIQTVINDLLKQGVLIQQNSIMNTPVYPVPKPDGKWRMVLDYREVNKTIPLIAAQNQHSAGILSSIFRGKYKTTLDLSNGFWAHSITPESYWLTAFTWLGQQYCWTRLPQGFLNSPALFNADVVDLLKEVPNVQVYVDDIYISHDDPREHLEQLEKVFSLLLNAGYVVSLKKSEIAQHEVEFLGFNITKEGRGLTETFKQKLLNITPPRDLKQLQSILGLLNFARNFIPNFSELVKPLYNIIATAPGKYITWTTDNSQQLQNIISMLNSAENLEERNPEVRLIMKVNTSPSAGYIRFYNEFAKRPIMYLNYVYTKAEVKFTNTEKLLTTIHKGLIKALDLGMGQEILVYSPIVSMTKIQKTPLPERKALPIRWITWMSYLEDPRIQFHYDKTLPELQQVPTVTDDIIAKIKHPSEFSMVFYTDGSAIKHPNVNKSHNAGMGIAQVQFKPEFTVINTWSIPLGDHTAQLAEVAAVEFACKKALKIDGPVLIVTDSFYVAESVNKELPYWQSNGFFNNKKKPLKHVSKWKSIADCIQLKPDIIIIHEKGHQPTASTFHTEGNNLADKLATQGSYVVNAGKRTADGSEFEKRTADGSEFESPKKKAKVE

SEQ ID NO: 6072 - protein, 2180 aa, synthetic construct
MPAAKRVKLDGGDKKYSIGLDIGTNSVGWAVITDEYKVPSKKFKVLGNTDRHSIKKNLIGALLFDSGETAEATRLKRTARRRYTRRKNRICYLQEIFSNEMAKVDDSFFHRLEESFLVEEDKKHERHPIFGNIVDEVAYHEKYPTIYHLRKKLVDSTDKADLRLIYLALAHMIKFRGHFLIEGDLNPDNSDVDKLFIQLVQTYNQLFEENPINASGVDAKAILSARLSKSRRLENLIAQLPGEKKNGLFGNLIALSLGLTPNFKSNFDLAEDAKLQLSKDTYDDDLDNLLAQIGDQYADLFLAAKNLSDAILLSDILRVNTEITKAPLSASMIKRYDEHHQDLTLLKALVRQQLPEKYKEIFFDQSKNGYAGYIDGGASQEEFYKFIKPILEKMDGTEELLVKLNREDLLRKQRTFDNGSIPHQIHLGELHAILRRQEDFYPFLKDNREKIEKILTFRIPYYVGPLARGNSRFAWMTRKSEETITPWNFEEVVDKGASAQSFIERMTNFDKNLPNEKVLPKHSLLYEYFTVYNELTKVKYVTEGMRKPAFLSGEQKKAIVDLLFKTNRKVTVKQLKEDYFKKIECFDSVEISGVEDRFNASLGTYHDLLKIIKDKDFLDNEENEDILEDIVLTLTLFEDREMIEERLKTYAHLFDDKVMKQLKRRRYTGWGRLSRKLINGIRDKQSGKTILDFLKSDGFANRNFMQLIHDDSLTFKEDIQKAQVSGQGDSLHEHIANLAGSPAIKKGILQTVKVVDELVKVMGRHKPENIVIEMARENQTTQKGQKNSRERMKRIEEGIKELGSQILKEHPVENTQLQNEKLYLYYLQNGRDMYVDQELDINRLSDYDVDHIVPQSFLKDDSIDNKVLTRSDKARGKSDNVPSEEVVKKMKNYWRQLLNAKLITQRKFDNLTKAERGGLSELDKAGFIKRQLVETRQITKHVAQILDSRMNTKYDENDKLIREVKVITLKSKLVSDFRKDFQFYKVREINNYHHAHDAYLNAVVGTALIKKYPKLESEFVYGDYKVYDVRKMIAKSEQEIGKATAKYFFYSNIMNFFKTEITLANGEIRKRPLIETNGETGEIVWDKGRDFATVRKVLSMPQVNIVKKTEVQTGGFSKESILPKRNSDKLIARKKDWDPKKYGGFDSPTVAYSVLVVAKVEKGKSKKLKSVKELLGITIMERSSFEKNPIDFLEAKGYKEVKKDLIIKLPKYSLFELENGRKRMLASAGELQKGNELALPSKYVNFLYLASHYEKLKGSPEDNEQKQLFVEQHKHYLDEIIEQISEFSKRVILADANLDKVLSAYNKHRDKPIREQAENIIHLFTLTNLGAPAAFKYFDTTIDRKRYTSTKEVLDATLIHQSITGLYETRIDLSQLGGDGGGGSGGSGGSGGSGGSGGMDPLQLLQPLEAEIKGTKLKAHWNSGATITCVPQAFLEEEVPIKNIWIKTIHGEKEQPVYYLTFKIQGRKVEAEVISSPYDYILVSPSDIPWLMKKPLQLTTLVPLQEYEERLLKQTMLTGSYKEKLQSLFLKYDALWQHWENQVGHRRIKPHHIATGTVNPRPQKQYPINPKAKASIQTVINDLLKQGVLIQQNSIMNTPVYPVPKPDGKWRMVLDYREVNKTIPLIAAQNQHSAGILSSIFRGKYKTTLDLSNGFWAHSITPESYWLTAFTWLGQQYCWTRLPQGFLNSPALFNADVVDLLKEVPNVQVYVDDIYISHDDPREHLEQLEKVFSLLLNAGYVVSLKKSEIAQHEVEFLGFNITKEGRGLTETFKQKLLNITPPRDLKQLQSILGKLNFARNFIPNFSELVKPLYNIIATAPGKYITWTTDNSQQLQNIISMLNSAENLEERNPEVRLIMKVNTSPSAGYIRFYNEFAKRPIMYLNYVYTKAEVKFTNTEKLLTTIHKGLIKALDLGMGQEILVYSPIVSMTKIQKTPLPERKALPIRWITWMSYLEDPRIQFHYDKTLPELQQVPTVTDDIIAKIKHPSEFSMVFYTDGSAIKHPNVNKSHNAGMGIAQVQFKPEFTVINTWSIPLGDHTAQLAEVAAVEFACKKALKIDGPVLIVTDSFYVAESVNKELPYWQSNGFFNNKKKPLKHVSKWKSIADCIQLKPDIIIIHEKGHQPTASTFHTEGNNLADKLATQGSYVVNAGKRTADGSEFEKRTADGSEFESPKKKAKVE

SEQ ID NO: 6073 - protein, 2098 aa, synthetic construct; identical to SEQ ID NO: 4502

SEQ ID NO: 6074 - protein, 2098 aa, synthetic construct
MPAAKRVKLDGGDKKYSIGLDIGTNSVGWAVITDEYKVPSKKFKVLGNTDRHSIKKNLIGALLFDSGETAEATRLKRTARRRYTRRKNRICYLQEIFSNEMAKVDDSFFHRLEESFLVEEDKKHERHPIFGNIVDEVAYHEKYPTIYHLRKKLVDSTDKADLRLIYLALAHMIKFRGHFLIEGDLNPDNSDVDKLFIQLVQTYNQLFEENPINASGVDAKAILSARLSKSRRLENLIAQLPGEKKNGLFGNLIALSLGLTPNFKSNFDLAEDAKLQLSKDTYDDDLDNLLAQIGDQYADLFLAAKNLSDAILLSDILRVNTEITKAPLSASMIKRYDEHHQDLTLLKALVRQQLPEKYKEIFFDQSKNGYAGYIDGGASQEEFYKFIKPILEKMDGTEELLVKLNREDLLRKQRTFDNGSIPHQIHLGELHAILRRQEDFYPFLKDNREKIEKILTFRIPYYVGPLARGNSRFAWMTRKSEETITPWNFEEVVDKGASAQSFIERMTNFDKNLPNEKVLPKHSLLYEYFTVYNELTKVKYVTEGMRKPAFLSGEQKKAIVDLLFKTNRKVTVKQLKEDYFKKIECFDSVEISGVEDRFNASLGTYHDLLKIIKDKDFLDNEENEDILEDIVLTLTLFEDREMIEERLKTYAHLFDDKVMKQLKRRRYTGWGRLSRKLINGIRDKQSGKTILDFLKSDGFANRNFMQLIHDDSLTFKEDIQKAQVSGQGDSLHEHIANLAGSPAIKKGILQTVKVVDELVKVMGRHKPENIVIEMARENQTTQKGQKNSRERMKRIEEGIKELGSQILKEHPVENTQLQNEKLYLYYLQNGRDMYVDQELDINRLSDYDVDHIVPQSFLKDDSIDNKVLTRSDKARGKSDNVPSEEVVKKMKNYWRQLLNAKLITQRKFDNLTKAERGGLSELDKAGFIKRQLVETRQITKHVAQILDSRMNTKYDENDKLIREVKVITLKSKLVSDFRKDFQFYKVREINNYHHAHDAYLNAVVGTALIKKYPKLESEFVYGDYKVYDVRKMIAKSEQEIGKATAKYFFYSNIMNFFKTEITLANGEIRKRPLIETNGETGEIVWDKGRDFATVRKVLSMPQVNIVKKTEVQTGGFSKESILPKRNSDKLIARKKDWDPKKYGGFDSPTVAYSVLVVAKVEKGKSKKLKSVKELLGITIMERSSFEKNPIDFLEAKGYKEVKKDLIIKLPKYSLFELENGRKRMLASAGELQKGNELALPSKYVNFLYLASHYEKLKGSPEDNEQKQLFVEQHKHYLDEIIEQISEFSKRVILADANLDKVLSAYNKHRDKPIREQAENIIHLFTLTNLGAPAAFKYFDTTIDRKRYTSTKEVLDATLIHQSITGLYETRIDLSQLGGDGGGGSGGSGGSGGSGGSGGVLNLEEEYRLHEKPVPSSIDPSWLQLFPTVWAERAGMGLANQVPPVVVELRSGASPVAVRQYPMSKEAREGIRPHIQRFLDLGVLVPCQSPWNTPLLPVKKPGTNDYRPVQDLREINKRVQDIHPTVPNPYNLLSSLPPSHTWYSVLDLKDAFFCLKLHPNSQPLFAFEWRDPEKGNTGQLTWTRLPQGFKNSPTLFNEALHRDLAPFRALNPQVVLLQYVDDLLVAAPTYRDCKEGTQKLLQELSKLGYRVSAKKAQLCQKEVTYLGYLLKEGKRWLTPARKATVMKIPPPTTPRQVREFLGKAGFCRLFIPGFASLAAPLYPLTKPSIPFIWTEEHQKAFDRIKEALLSAPALALPDLTKPFTLYVDERAGVARGVLTQTLGPWRRPVAYLSKKLDPVASGWPTCLKAVAAVALLLKDADKLTLGQNVTVIASHSLESIVRQPPDRWMTNARMTHYQSLLLNERVSFAPPAVLNPATLLPVESEATPVHRCSEILAEETGTRRDLKDQPLPGVPAWYTDGSSFIAEGKRRAGAAIVDGKRTVWASSLPEGTSAQKAELVALTQALRLAEGKDINIYTDSRYAFATAHIHGAIYKQRGWLTSAGKDIKNKEEILALLEAIHLPKRVAIIHCPGHQKGNDPVATGNRRADEAAKQAALSTRVLAETTKPAGKRTADGSEFEKRTADGSEFESPKKKAKVE

SEQ ID NO: 6075 - protein, 2100 aa, synthetic construct
MPAAKRVKLDGGDKKYSIGLDIGTNSVGWAVITDEYKVPSKKFKVLGNTDRHSIKKNLIGALLFDSGETAEATRLKRTARRRYTRRKNRICYLQEIFSNEMAKVDDSFFHRLEESFLVEEDKKHERHPIFGNIVDEVAYHEKYPTIYHLRKKLVDSTDKADLRLIYLALAHMIKFRGHFLIEGDLNPDNSDVDKLFIQLVQTYNQLFEENPINASGVDAKAILSARLSKSRRLENLIAQLPGEKKNGLFGNLIALSLGLTPNFKSNFDLAEDAKLQLSKDTYDDDLDNLLAQIGDQYADLFLAAKNLSDAILLSDILRVNTEITKAPLSASMIKRYDEHHQDLTLLKALVRQQLPEKYKEIFFDQSKNGYAGYIDGGASQEEFYKFIKPILEKMDGTEELLVKLNREDLLRKQRTFDNGSIPHQIHLGELHAILRRQEDFYPFLKDNREKIEKILTFRIPYYVGPLARGNSRFAWMTRKSEETITPWNFEEVVDKGASAQSFIERMTNFDKNLPNEKVLPKHSLLYEYFTVYNELTKVKYVTEGMRKPAFLSGEQKKAIVDLLFKTNRKVTVKQLKEDYFKKIECFDSVEISGVEDRFNASLGTYHDLLKIIKDKDFLDNEENEDILEDIVLTLTLFEDREMIEERLKTYAHLFDDKVMKQLKRRRYTGWGRLSRKLINGIRDKQSGKTILDFLKSDGFANRNFMQLIHDDSLTFKEDIQKAQVSGQGDSLHEHIANLAGSPAIKKGILQTVKVVDELVKVMGRHKPENIVIEMARENQTTQKGQKNSRERMKRIEEGIKELGSQILKEHPVENTQLQNEKLYLYYLQNGRDMYVDQELDINRLSDYDVDHIVPQSFLKDDSIDNKVLTRSDKARGKSDNVPSEEVVKKMKNYWRQLLNAKLITQRKFDNLTKAERGGLSELDKAGFIKRQLVETRQITKHVAQILDSRMNTKYDENDKLIREVKVITLKSKLVSDFRKDFQFYKVREINNYHHAHDAYLNAVVGTALIKKYPKLESEFVYGDYKVYDVRKMIAKSEQEIGKATAKYFFYSNIMNFFKTEITLANGEIRKRPLIETNGETGEIVWDKGRDFATVRKVLSMPQVNIVKKTEVQTGGFSKESILPKRNSDKLIARKKDWDPKKYGGFDSPTVAYSVLVVAKVEKGKSKKLKSVKELLGITIMERSSFEKNPIDFLEAKGYKEVKKDLIIKLPKYSLFELENGRKRMLASAGELQKGNELALPSKYVNFLYLASHYEKLKGSPEDNEQKQLFVEQHKHYLDEIIEQISEFSKRVILADANLDKVLSAYNKHRDKPIREQAENIIHLFTLTNLGAPAAFKYFDTTIDRKRYTSTKEVLDATLIHQSITGLYETRIDLSQLGGDGGGGSGGSGGSGGSGGSGGTLNIEDEYRLHETSKEPDVPLGSTWLSDFPQAWAETGGMGLAVRQAPLIIPLKATSTPVSIKQYPMSQEARLGIKPHIQRLLDQGILVPCQSPWNTPLLPVKKPGTNDYRPVQDLREVNKRVEDIHPTVPNPYNLLSGLPPSHQWYTVLDLKDAFFCLRLHPTSQPLFAFEWRDPEMGISGQLTWTRLPQGFKNSPTLFNEALHRDLADFRIQHPDLILLQYVDDLLLAATSEQDCQRGTRALLQTLGNLGYRASAKKAQICQKQVKYLGYLLKEGQRWLTEARKETVMGQPTPKTPRQLREFLGKAGFCRLFIPGFAEMAAPLYPLTKPGTLFNWGPDQQKAYQEIKQALLTAPALGLPDLTKPFELFVDEKQGYAKGVLTQKLGPWRRPVAYLSKKLDPVAAGWPPCLRMVAAIAVLTKDAGKLTMGQPLVILAPHAVEALVKQPPDRWLSNARMTHYQAMLLDTDRVQFGPVVALNPATLLPLPEKEAPHDCLEILAETHGTRPDLTDQPIPDADYTWYTDGSSFLQEGQRRAGAAVTTETEVIWARALPAGTSAQRAELIALTQALKMAEGKKLNVYTDSRYAFATAHVHGEIYRRRGWLTSEGREIKNKNEILALLKALFLPKRLSIIHCPGHQKGNSAEARGNRMADQAAREAAMKAVLETSTLLAGKRTADGSEFEKRTADGSEFESPKKKAKVE

SEQ ID NO: 6076 - protein, 2105 aa, synthetic construct
MPAAKRVKLDGGDKKYSIGLDIGTNSVGWAVITDEYKVPSKKFKVLGNTDRHSIKKNLIGALLFDSGETAEATRLKRTARRRYTRRKNRICYLQEIFSNEMAKVDDSFFHRLEESFLVEEDKKHERHPIFGNIVDEVAYHEKYPTIYHLRKKLVDSTDKADLRLIYLALAHMIKFRGHFLIEGDLNPDNSDVDKLFIQLVQTYNQLFEENPINASGVDAKAILSARLSKSRRLENLIAQLPGEKKNGLFGNLIALSLGLTPNFKSNFDLAEDAKLQLSKDTYDDDLDNLLAQIGDQYADLFLAAKNLSDAILLSDILRVNTEITKAPLSASMIKRYDEHHQDLTLLKALVRQQLPEKYKEIFFDQSKNGYAGYIDGGASQEEFYKFIKPILEKMDGTEELLVKLNREDLLRKQRTFDNGSIPHQIHLGELHAILRRQEDFYPFLKDNREKIEKILTFRIPYYVGPLARGNSRFAWMTRKSEETITPWNFEEVVDKGASAQSFIERMTNFDKNLPNEKVLPKHSLLYEYFTVYNELTKVKYVTEGMRKPAFLSGEQKKAIVDLLFKTNRKVTVKQLKEDYFKKIECFDSVEISGVEDRFNASLGTYHDLLKIIKDKDFLDNEENEDILEDIVLTLTLFEDREMIEERLKTYAHLFDDKVMKQLKRRRYTGWGRLSRKLINGIRDKQSGKTILDFLKSDGFANRNFMQLIHDDSLTFKEDIQKAQVSGQGDSLHEHIANLAGSPAIKKGILQTVKVVDELVKVMGRHKPENIVIEMARENQTTQKGQKNSRERMKRIEEGIKELGSQILKEHPVENTQLQNEKLYLYYLQNGRDMYVDQELDINRLSDYDVDHIVPQSFLKDDSIDNKVLTRSDKARGKSDNVPSEEVVKKMKNYWRQLLNAKLITQRKFDNLTKAERGGLSELDKAGFIKRQLVETRQITKHVAQILDSRMNTKYDENDKLIREVKVITLKSKLVSDFRKDFQFYKVREINNYHHAHDAYLNAVVGTALIKKYPKLESEFVYGDYKVYDVRKMIAKSEQEIGKATAKYFFYSNIMNFFKTEITLANGEIRKRPLIETNGETGEIVWDKGRDFATVRKVLSMPQVNIVKKTEVQTGGFSKESILPKRNSDKLIARKKDWDPKKYGGFDSPTVAYSVLVVAKVEKGKSKKLKSVKELLGITIMERSSFEKNPIDFLEAKGYKEVKKDLIIKLPKYSLFELENGRKRMLASAGELQKGNELALPSKYVNFLYLASHYEKLKGSPEDNEQKQLFVEQHKHYLDEIIEQISEFSKRVILADANLDKVLSAYNKHRDKPIREQAENIIHLFTLTNLGAPAAFKYFDTTIDRKRYTSTKEVLDATLIHQSITGLYETRIDLSQLGGDGGGGSGGSGGSGGSGGSGGSGGTAPLEEEYRLFLEAPIQNVTLLEQWKREIPKVWAEINPPGLASTQAPIHVQLLSTALPVRVRQYPITLEAKRSLRETIRKFRAAGILRPVHSPWNTPLLPVRKSGTSEYRMVQDLREVNKRVETIHPTVPNPYTLLSLLPPDRIWYSVLDLKDAFFCIPLAPESQLIFAFEWADAEEGESGQLTWTRLPQGFKNSPTLFDEALNRDLQGFRLDHPSVSLLQYVDDLLIAADTQAACLSATRDLLMTLAELGYRVSGKKAQLCQEEVTYLGFKIHKGSRSLSNSRTQAILQIPVPKTKRQVREFLGTIGYCRLWIPGFAELAQPLYAATRGGNDPLVWGEKEEEAFQSLKLALTQPPALALPSLDKPFQLFVEETSGAAKGVLTQALGPWKRPVAYLSKRLDPVAAGWPRCLRAIAAAALLTREASKLTFGQDIEITSSHNLESLLRSPPDKWLTNARITQYQVLLLDPPRVRFKQTAALNPATLLPETDDTLPIHHCLDTLDSLTSTRPDLTDQPLAQAEATLFTDGSSYIRDGKRYAGAAVVTLDSVIWAEPLPIGTSAQKAELIALTKALEWSKDKSVNIYTDSRYAFATLHVHGMIYRERGLLTAGGKAIKNAPEILALLTAVWLPKRVAVMHCKGHQKDDAPTSTGNRRADEVAREVAIRPLSTQATISAGKRTADGSEFEKRTADGSEFESPKKKAKVE

SEQ ID NO: 6077 - protein, 2105 aa, synthetic construct
MPAAKRVKLDGGDKKYSIGLDIGTNSVGWAVITDEYKVPSKKFKVLGNTDRHSIKKNLIGALLFDSGETAEATRLKRTARRRYTRRKNRICYLQEIFSNEMAKVDDSFFHRLEESFLVEEDKKHERHPIFGNIVDEVAYHEKYPTIYHLRKKLVDSTDKADLRLIYLALAHMIKFRGHFLIEGDLNPDNSDVDKLFIQLVQTYNQLFEENPINASGVDAKAILSARLSKSRRLENLIAQLPGEKKNGLFGNLIALSLGLTPNFKSNFDLAEDAKLQLSKDTYDDDLDNLLAQIGDQYADLFLAAKNLSDAILLSDILRVNTEITKAPLSASMIKRYDEHHQDLTLLKALVRQQLPEKYKEIFFDQSKNGYAGYIDGGASQEEFYKFIKPILEKMDGTEELLVKLNREDLLRKQRTFDNGSIPHQIHLGELHAILRRQEDFYPFLKDNREKIEKILTFRIPYYVGPLARGNSRFAWMTRKSEETITPWNFEEVVDKGASAQSFIERMTNFDKNLPNEKVLPKHSLLYEYFTVYNELTKVKYVTEGMRKPAFLSGEQKKAIVDLLFKTNRKVTVKQLKEDYFKKIECFDSVEISGVEDRFNASLGTYHDLLKIIKDKDFLDNEENEDILEDIVLTLTLFEDREMIEERLKTYAHLFDDKVMKQLKRRRYTGWGRLSRKLINGIRDKQSGKTILDFLKSDGFANRNFMQLIHDDSLTFKEDIQKAQVSGQGDSLHEHIANLAGSPAIKKGILQTVKVVDELVKVMGRHKPENIVIEMARENQTTQKGQKNSRERMKRIEEGIKELGSQILKEHPVENTQLQNEKLYLYYLQNGRDMYVDQELDINRLSDYDVDHIVPQSFLKDDSIDNKVLTRSDKARGKSDNVPSEEVVKKMKNYWRQLLNAKLITQRKFDNLTKAERGGLSELDKAGFIKRQLVETRQITKHVAQILDSRMNTKYDENDKLIREVKVITLKSKLVSDFRKDFQFYKVREINNYHHAHDAYLNAVVGTALIKKYPKLESEFVYGDYKVYDVRKMIAKSEQEIGKATAKYFFYSNIMNFFKTEITLANGEIRKRPLIETNGETGEIVWDKGRDFATVRKVLSMPQVNIVKKTEVQTGGFSKESILPKRNSDKLIARKKDWDPKKYGGFDSPTVAYSVLVVAKVEKGKSKKLKSVKELLGITIMERSSFEKNPIDFLEAKGYKEVKKDLIIKLPKYSLFELENGRKRMLASAGELQKGNELALPSKYVNFLYLASHYEKLKGSPEDNEQKQLFVEQHKHYLDEIIEQISEFSKRVILADANLDKVLSAYNKHRDKPIREQAENIIHLFTLTNLGAPAAFKYFDTTIDRKRYTSTKEVLDATLIHQSITGLYETRIDLSQLGGDGGGGSGGSGGSGGSGGSGGSGGTAPLEEEYRLFLEAPIQNVTLLEQWKREIPKVWAEINPPGLASTQAPIHVQLLSTALPVRVRQYPITLEAKRSLRETIRKFRAAGILRPVHSPWNTPLLPVRKSGTSEYRMVQDLREVNKRVETIHPTVPNPYTLLSLLPPDRIWYSVLDLKDAFFCIPLAPESQLIFAFEWADAEEGESGQLTWTRLPQGFKNSPTLFNEALNRDLQGFRLDHPSVSLLQYVDDLLIAADTQAACLSATRDLLMTLAELGYRVSGKKAQLCQEEVTYLGFKIHKGSRSLSNSRTQAILQIPVPKTKRQVREFLGTIGYCRLWIPGFAELAQPLYAATRPGNDPLVWGEKEEEAFQSLKLALTQPPALALPSLDKPFQLFVEETSGAAKGVLTQALGPWKRPVAYLSKRLDPVAAGWPRCLRAIAAAALLTREASKLTFGQDIEITSSHNLESLLRSPPDKWLTNARITQYQVLLLDPPRVRFKQTAALNPATLLPETDDTLPIHHCLDTLDSLTSTRPDLTDQPLAQAEATLFTDGSSYIRDGKRYAGAAVVTLDSVIWAEPLPIGTSAQKAELIALTKALEWSKDKSVNIYTDSRYAFATLHVHGMIYRERGWLTAGGKAIKNAPEILALLTAVWLPKRVAVMHCKGHQKDDAPTSTGNRRADEVAREVAIRPLSTQATISAGKRTADGSEFEKRTADGSEFESPKKKAKVE

SEQ ID NO: 6078 - protein, 2105 aa, synthetic construct
MPAAKRVKLDGGDKKYSIGLDIGTNSVGWAVITDEYKVPSKKFKVLGNTDRHSIKKNLIGALLFDSGETAEATRLKRTARRRYTRRKNRICYLQEIFSNEMAKVDDSFFHRLEESFLVEEDKKHERHPIFGNIVDEVAYHEKYPTIYHLRKKLVDSTDKADLRLIYLALAHMIKFRGHFLIEGDLNPDNSDVDKLFIQLVQTYNQLFEENPINASGVDAKAILSARLSKSRRLENLIAQLPGEKKNGLFGNLIALSLGLTPNFKSNFDLAEDAKLQLSKDTYDDDLDNLLAQIGDQYADLFLAAKNLSDAILLSDILRVNTEITKAPLSASMIKRYDEHHQDLTLLKALVRQQLPEKYKEIFFDQSKNGYAGYIDGGASQEEFYKFIKPILEKMDGTEELLVKLNREDLLRKQRTFDNGSIPHQIHLGELHAILRRQEDFYPFLKDNREKIEKILTFRIPYYVGPLARGNSRFAWMTRKSEETITPWNFEEVVDKGASAQSFIERMTNFDKNLPNEKVLPKHSLLYEYFTVYNELTKVKYVTEGMRKPAFLSGEQKKAIVDLLFKTNRKVTVKQLKEDYFKKIECFDSVEISGVEDRFNASLGTYHDLLKIIKDKDFLDNEENEDILEDIVLTLTLFEDREMIEERLKTYAHLFDDKVMKQLKRRRYTGWGRLSRKLINGIRDKQSGKTILDFLKSDGFANRNFMQLIHDDSLTFKEDIQKAQVSGQGDSLHEHIANLAGSPAIKKGILQTVKVVDELVKVMGRHKPENIVIEMARENQTTQKGQKNSRERMKRIEEGIKELGSQILKEHPVENTQLQNEKLYLYYLQNGRDMYVDQELDINRLSDYDVDHIVPQSFLKDDSIDNKVLTRSDKARGKSDNVPSEEVVKKMKNYWRQLLNAKLITQRKFDNLTKAERGGLSELDKAGFIKRQLVETRQITKHVAQILDSRMNTKYDENDKLIREVKVITLKSKLVSDFRKDFQFYKVREINNYHHAHDAYLNAVVGTALIKKYPKLESEFVYGDYKVYDVRKMIAKSEQEIGKATAKYFFYSNIMNFFKTEITLANGEIRKRPLIETNGETGEIVWDKGRDFATVRKVLSMPQVNIVKKTEVQTGGFSKESILPKRNSDKLIARKKDWDPKKYGGFDSPTVAYSVLVVAKVEKGKSKKLKSVKELLGITIMERSSFEKNPIDFLEAKGYKEVKKDLIIKLPKYSLFELENGRKRMLASAGELQKGNELALPSKYVNFLYLASHYEKLKGSPEDNEQKQLFVEQHKHYLDEIIEQISEFSKRVILADANLDKVLSAYNKHRDKPIREQAENIIHLFTLTNLGAPAAFKYFDTTIDRKRYTSTKEVLDATLIHQSITGLYETRIDLSQLGGDGGGGSGGSGGSGGSGGSGGSGGTAPLEEEYRLFLEAPIQNVTLLEQWKREIPKVWAEINPPGLASTQAPIHVQLLSTALPVRVRQYPITLEAKRSLRETIRKFRAAGILRPVHSPWNTPLLPVRKSGTSEYRMVQDLREVNKRVETIHPTVPNPYTLLSLLPPDRIWYSVLDLKDAFFCIPLAPESQLIFAFEWADAEEGESGQLTWTRLPQGFKNSPTLFNEALNRDLQGFRLDHPSVSLLQYVDDLLIAADTQAACLSATRDLLMTLAELGYRVSGKKAQLCQEEVTYLGFKIHKGSRSLSNSRTQAILQIPVPKTKRQVREFLGKIGYCRLFIPGFAELAQPLYAATRPGNDPLVWGEKEEEAFQSLKLALTQPPALALPSLDKPFQLFVEETSGAAKGVLTQALGPWKRPVAYLSKRLDPVAAGWPRCLRAIAAAALLTREASKLTFGQDIEITSSHNLESLLRSPPDKWLTNARITQYQVLLLDPPRVRFKQTAALNPATLLPETDDTLPIHHCLDTLDSLTSTRPDLTDQPLAQAEATLFTDGSSYIRDGKRYAGAAVVTLDSVIWAEPLPIGTSAQKAELIALTKALEWSKDKSVNIYTDSRYAFATLHVHGMIYRERGWLTAGGKAIKNAPEILALLTAVWLPKRVAVMHCKGHQKDDAPTSTGNRRADEVAREVAIRPLSTQATISAGKRTADGSEFEKRTADGSEFESPKKKAKVE

SEQ ID NO: 6079 - protein, 2109 aa, synthetic construct
MPAAKRVKLDGGDKKYSIGLDIGTNSVGWAVITDEYKVPSKKFKVLGNTDRHSIKKNLIGALLFDSGETAEATRLKRTARRRYTRRKNRICYLQEIFSNEMAKVDDSFFHRLEESFLVEEDKKHERHPIFGNIVDEVAYHEKYPTIYHLRKKLVDSTDKADLRLIYLALAHMIKFRGHFLIEGDLNPDNSDVDKLFIQLVQTYNQLFEENPINASGVDAKAILSARLSKSRRLENLIAQLPGEKKNGLFGNLIALSLGLTPNFKSNFDLAEDAKLQLSKDTYDDDLDNLLAQIGDQYADLFLAAKNLSDAILLSDILRVNTEITKAPLSASMIKRYDEHHQDLTLLKALVRQQLPEKYKEIFFDQSKNGYAGYIDGGASQEEFYKFIKPILEKMDGTEELLVKLNREDLLRKQRTFDNGSIPHQIHLGELHAILRRQEDFYPFLKDNREKIEKILTFRIPYYVGPLARGNSRFAWMTRKSEETITPWNFEEVVDKGASAQSFIERMTNFDKNLPNEKVLPKHSLLYEYFTVYNELTKVKYVTEGMRKPAFLSGEQKKAIVDLLFKTNRKVTVKQLKEDYFKKIECFDSVEISGVEDRFNASLGTYHDLLKIIKDKDFLDNEENEDILEDIVLTLTLFEDREMIEERLKTYAHLFDDKVMKQLKRRRYTGWGRLSRKLINGIRDKQSGKTILDFLKSDGFANRNFMQLIHDDSLTFKEDIQKAQVSGQGDSLHEHIANLAGSPAIKKGILQTVKVVDELVKVMGRHKPENIVIEMARENQTTQKGQKNSRERMKRIEEGIKELGSQILKEHPVENTQLQNEKLYLYYLQNGRDMYVDQELDINRLSDYDVDHIVPQSFLKDDSIDNKVLTRSDKARGKSDNVPSEEVVKKMKNYWRQLLNAKLITQRKFDNLTKAERGGLSELDKAGFIKRQLVETRQITKHVAQILDSRMNTKYDENDKLIREVKVITLKSKLVSDFRKDFQFYKVREINNYHHAHDAYLNAVVGTALIKKYPKLESEFVYGDYKVYDVRKMIAKSEQEIGKATAKYFFYSNIMNFFKTEITLANGEIRKRPLIETNGETGEIVWDKGRDFATVRKVLSMPQVNIVKKTEVQTGGFSKESILPKRNSDKLIARKKDWDPKKYGGFDSPTVAYSVLVVAKVEKGKSKKLKSVKELLGITIMERSSFEKNPIDFLEAKGYKEVKKDLIIKLPKYSLFELENGRKRMLASAGELQKGNELALPSKYVNFLYLASHYEKLKGSPEDNEQKQLFVEQHKHYLDEIIEQISEFSKRVILADANLDKVLSAYNKHRDKPIREQAENIIHLFTLTNLGAPAAFKYFDTTIDRKRYTSTKEVLDATLIHQSITGLYETRIDLSQLGGDGGGGSGGSGGSGGSGGSGGSGGTVSLQDEHRLFDIPVTTSLPDVWLQDFPQAWAETGGLGRAKCQAPIIIDLKPTAVPVSIKQYPMSLEAHMGIRQHIIKFLELGVLRPCRSPWNTPLLPVKKPGTQDYRPVQDLREINKRTVDIHPTVPNPYNLLSTLKPDYSWYTVLDLKDAFFCLPLAPQSQELFAFEWKDPERGISGQLTWTRLPQGFKNSPTLFNEALHRDLTDFRTQHPEVTLLQYVDDLLLAAPTKKACTQGTRHLLQELGEKGYRASAKKAQICQTKVTYLGYILSEGKRWLTPGRIETVARIPPPRNPREVREFLGTAGFCRLWIPGFAELAAPLYALTKPSTPFTWQTEHQLAFEALKKALLSAPALGLPDTSKPFTLFLDERQGIAKGVLTQKLGPWKRPVAYLSKKLDPVAAGWPPCLRIMAATAMLVKDSAKLTLGQPLTVITPHTLEAIVRQPPDRWITNARLTHYQALLLDTDRVQFGPPVTLNPATLLPVPENQPSPHDCRQVLAETHGTREDLKDQELPDADHTWYTDGSSYLDSGTRRAGAAVVDGHNTIWAQSLPPGTSAQKAELIALTKALELSKGKKANIYTDSRYAFATAHTHGSIYERRGWLTSEGKEIKNKAEIIALLKALFLPQEVAIIHCPGHQKGQDPVAVGNRQADRVARQAAMAEVLTLATEPDNTSHITAGKRTADGSEFEKRTADGSEFESPKKKAKVE

SEQ ID NO: 6080 - protein, 2094 aa, synthetic construct
MPAAKRVKLDGGDKKYSIGLDIGTNSVGWAVITDEYKVPSKKFKVLGNTDRHSIKKNLIGALLFDSGETAEATRLKRTARRRYTRRKNRICYLQEIFSNEMAKVDDSFFHRLEESFLVEEDKKHERHPIFGNIVDEVAYHEKYPTIYHLRKKLVDSTDKADLRLIYLALAHMIKFRGHFLIEGDLNPDNSDVDKLFIQLVQTYNQLFEENPINASGVDAKAILSARLSKSRRLENLIAQLPGEKKNGLFGNLIALSLGLTPNFKSNFDLAEDAKLQLSKDTYDDDLDNLLAQIGDQYADLFLAAKNLSDAILLSDILRVNTEITKAPLSASMIKRYDEHHQDLTLLKALVRQQLPEKYKEIFFDQSKNGYAGYIDGGASQEEFYKFIKPILEKMDGTEELLVKLNREDLLRKQRTFDNGSIPHQIHLGELHAILRRQEDFYPFLKDNREKIEKILTFRIPYYVGPLARGNSRFAWMTRKSEETITPWNFEEVVDKGASAQSFIERMTNFDKNLPNEKVLPKHSLLYEYFTVYNELTKVKYVTEGMRKPAFLSGEQKKAIVDLLFKTNRKVTVKQLKEDYFKKIECFDSVEISGVEDRFNASLGTYHDLLKIIKDKDFLDNEENEDILEDIVLTLTLFEDREMIEERLKTYAHLFDDKVMKQLKRRRYTGWGRLSRKLINGIRDKQSGKTILDFLKSDGFANRNFMQLIHDDSLTFKEDIQKAQVSGQGDSLHEHIANLAGSPAIKKGILQTVKVVDELVKVMGRHKPENIVIEMARENQTTQKGQKNSRERMKRIEEGIKELGSQILKEHPVENTQLQNEKLYLYYLQNGRDMYVDQELDINRLSDYDVDHIVPQSFLKDDSIDNKVLTRSDKARGKSDNVPSEEVVKKMKNYWRQLLNAKLITQRKFDNLTKAERGGLSELDKAGFIKRQLVETRQITKHVAQILDSRMNTKYDENDKLIREVKVITLKSKLVSDFRKDFQFYKVREINNYHHAHDAYLNAVVGTALIKKYPKLESEFVYGDYKVYDVRKMIAKSEQEIGKATAKYFFYSNIMNFFKTEITLANGEIRKRPLIETNGETGEIVWDKGRDFATVRKVLSMPQVNIVKKTEVQTGGFSKESILPKRNSDKLIARKKDWDPKKYGGFDSPTVAYSVLVVAKVEKGKSKKLKSVKELLGITIMERSSFEKNPIDFLEAKGYKEVKKDLIIKLPKYSLFELENGRKRMLASAGELQKGNELALPSKYVNFLYLASHYEKLKGSPEDNEQKQLFVEQHKHYLDEIIEQISEFSKRVILADANLDKVLSAYNKHRDKPIREQAENIIHLFTLTNLGAPAAFKYFDTTIDRKRYTSTKEVLDATLIHQSITGLYETRIDLSQLGGDGGGGSGGSGGSGGSGGSGGSGGVPWILKKPLELTIKLDLEEQQGTLLNNSILSKKGKEELKQLFEKYSALWQSWENQVGHRRIRPHKIATGTVKPTPQKQYHINPKAKPDIQIVINDLLKQGVLIQKESTMNTPVYPVPKPNGRWRMVLDYRAVNKVTPLIAVQNQHSYGILGSLFKGRYKTTIDLSNGFWAHPIVPEDYWITAFTWQGKQYCWTVLPQGFLNSPGLFTGDVVDLLQGIPNVEVYVDDVYISHDSEKEHLEYLDILFNRLKEAGYIISLKKSNIANSIVDFLGFQITNEGRGLTDTFKEKLENITAPTTLKQLQSILGLLNFARNFIPDFTELIAPLYALIPKSTKNYVPWQIEHSTTLETLITKLNGAEYLQGRKGDKTLIMKVNASYTTGYIRYYNEGEKKPISYVSIVFSKTELKFTELEKLLTTVHKGLLKALDLSMGQNIHVYSPIVSMQNIQKTPQTAKKALASRWLSWLSYLEDPRIRFFYDPQMPALKDLPAVDTGKDNKKHPSNFQHIFYTDGSAITSPTKEGHLNAGMGIVYFINKDGNLQKQQEWSISLGNHTAQFAEIAAFEFALKKCLPLGGNILVVTDSNYVAKAYNEELDVWASNGFVNNRKKPLKHISKWKSVADLKRLRPDVVVTHEPGHQKLDSSPHAYGNNLADQLATQASFKVHAGKRTADGSEFEKRTADGSEFESPKKKAKVE

SEQ ID NO: 6081 - protein, 2180 aa, synthetic construct
MPAAKRVKLDGGDKKYSIGLDIGTNSVGWAVITDEYKVPSKKFKVLGNTDRHSIKKNLIGALLFDSGETAEATRLKRTARRRYTRRKNRICYLQEIFSNEMAKVDDSFFHRLEESFLVEEDKKHERHPIFGNIVDEVAYHEKYPTIYHLRKKLVDSTDKADLRLIYLALAHMIKFRGHFLIEGDLNPDNSDVDKLFIQLVQTYNQLFEENPINASGVDAKAILSARLSKSRRLENLIAQLPGEKKNGLFGNLIALSLGLTPNFKSNFDLAEDAKLQLSKDTYDDDLDNLLAQIGDQYADLFLAAKNLSDAILLSDILRVNTEITKAPLSASMIKRYDEHHQDLTLLKALVRQQLPEKYKEIFFDQSKNGYAGYIDGGASQEEFYKFIKPILEKMDGTEELLVKLNREDLLRKQRTFDNGSIPHQIHLGELHAILRRQEDFYPFLKDNREKIEKILTFRIPYYVGPLARGNSRFAWMTRKSEETITPWNFEEVVDKGASAQSFIERMTNFDKNLPNEKVLPKHSLLYEYFTVYNELTKVKYVTEGMRKPAFLSGEQKKAIVDLLFKTNRKVTVKQLKEDYFKKIECFDSVEISGVEDRFNASLGTYHDLLKIIKDKDFLDNEENEDILEDIVLTLTLFEDREMIEERLKTYAHLFDDKVMKQLKRRRYTGWGRLSRKLINGIRDKQSGKTILDFLKSDGFANRNFMQLIHDDSLTFKEDIQKAQVSGQGDSLHEHIANLAGSPAIKKGILQTVKVVDELVKVMGRHKPENIVIEMARENQTTQKGQKNSRERMKRIEEGIKELGSQILKEHPVENTQLQNEKLYLYYLQNGRDMYVDQELDINRLSDYDVDHIVPQSFLKDDSIDNKVLTRSDKARGKSDNVPSEEVVKKMKNYWRQLLNAKLITQRKFDNLTKAERGGLSELDKAGFIKRQLVETRQITKHVAQILDSRMNTKYDENDKLIREVKVITLKSKLVSDFRKDFQFYKVREINNYHHAHDAYLNAVVGTALIKKYPKLESEFVYGDYKVYDVRKMIAKSEQEIGKATAKYFFYSNIMNFFKTEITLANGEIRKRPLIETNGETGEIVWDKGRDFATVRKVLSMPQVNIVKKTEVQTGGFSKESILPKRNSDKLIARKKDWDPKKYGGFDSPTVAYSVLVVAKVEKGKSKKLKSVKELLGITIMERSSFEKNPIDFLEAKGYKEVKKDLIIKLPKYSLFELENGRKRMLASAGELQKGNELALPSKYVNFLYLASHYEKLKGSPEDNEQKQLFVEQHKHYLDEIIEQISEFSKRVILADANLDKVLSAYNKHRDKPIREQAENIIHLFTLTNLGAPAAFKYFDTTIDRKRYTSTKEVLDATLIHQSITGLYETRIDLSQLGGDGGGGSGGSGGSGGSGGSGGSGGMDLLKPLTVERKGVKIKGYWNSQADITCVPKDLLQGEEPVRQQNVTTIHGTQEGDVYYVNLKIDGRRINTEVIGTTLDYAIITPGDVPWILKKPLELTIKLDLEEQQGTLLNNSILSKKGKEELKQLFEKYSALWQSWENQVGHRRIRPHKIATGTVKPTPQKQYHINPKAKPDIQIVINDLLKQGVLIQKESTMNTPVYPVPKPNGRWRMVLDYRAVNKVTPLIAVQNQHSYGILGSLFKGRYKTTIDLSNGFWAHPIVPEDYWITAFTWQGKQYCWTVLPQGFLNSPGLFNGDVVDLLQGIPNVEVYVDDVYISHDSEKEHLEYLDILFNRLKEAGYIISLKKSNIANSIVDFLGFQITNEGRGLTDTFKEKLENITAPTTLKQLQSILGLLNFARNFIPDFTELIAPLYALIPKSPKNYVPWQIEHSTTLETLITKLNGAEYLQGRKGDKTLIMKVNASYTTGYIRYYNEGEKKPISYVSIVFSKTELKFTELEKLLTTVHKGLLKALDLSMGQNIHVYSPIVSMQNIQKTPQTAKKALASRWLSWLSYLEDPRIRFFYDPQMPALKDLPAVDTGKDNKKHPSNFQHIFYTDGSAITSPTKEGHLNAGMGIVYFINKDGNLQKQQEWSISLGNHTAQFAEIAAFEFALKKCLPLGGNILVVTDSNYVAKAYNEELDVWASNGFVNNRKKPLKHISKWKSVADLKRLRPDVVVTHEPGHQKLDSSPHAYGNNLADQLATQASFKVHAGKRTADGSEFEKRTADGSEFESPKKKAKVE

SEQ ID NO: 6082 - protein, 2102 aa, synthetic construct
MPAAKRVKLDGGDKKYSIGLDIGTNSVGWAVITDEYKVPSKKFKVLGNTDRHSIKKNLIGALLFDSGETAEATRLKRTARRRYTRRKNRICYLQEIFSNEMAKVDDSFFHRLEESFLVEEDKKHERHPIFGNIVDEVAYHEKYPTIYHLRKKLVDSTDKADLRLIYLALAHMIKFRGHFLIEGDLNPDNSDVDKLFIQLVQTYNQLFEENPINASGVDAKAILSARLSKSRRLENLIAQLPGEKKNGLFGNLIALSLGLTPNFKSNFDLAEDAKLQLSKDTYDDDLDNLLAQIGDQYADLFLAAKNLSDAILLSDILRVNTEITKAPLSASMIKRYDEHHQDLTLLKALVRQQLPEKYKEIFFDQSKNGYAGYIDGGASQEEFYKFIKPILEKMDGTEELLVKLNREDLLRKQRTFDNGSIPHQIHLGELHAILRRQEDFYPFLKDNREKIEKILTFRIPYYVGPLARGNSRFAWMTRKSEETITPWNFEEVVDKGASAQSFIERMTNFDKNLPNEKVLPKHSLLYEYFTVYNELTKVKYVTEGMRKPAFLSGEQKKAIVDLLFKTNRKVTVKQLKEDYFKKIECFDSVEISGVEDRFNASLGTYHDLLKIIKDKDFLDNEENEDILEDIVLTLTLFEDREMIEERLKTYAHLFDDKVMKQLKRRRYTGWGRLSRKLINGIRDKQSGKTILDFLKSDGFANRNFMQLIHDDSLTFKEDIQKAQVSGQGDSLHEHIANLAGSPAIKKGILQTVKVVDELVKVMGRHKPENIVIEMARENQTTQKGQKNSRERMKRIEEGIKELGSQILKEHPVENTQLQNEKLYLYYLQNGRDMYVDQELDINRLSDYDVDHIVPQSFLKDDSIDNKVLTRSDKARGKSDNVPSEEVVKKMKNYWRQLLNAKLITQRKFDNLTKAERGGLSELDKAGFIKRQLVETRQITKHVAQILDSRMNTKYDENDKLIREVKVITLKSKLVSDFRKDFQFYKVREINNYHHAHDAYLNAVVGTALIKKYPKLESEFVYGDYKVYDVRKMIAKSEQEIGKATAKYFFYSNIMNFFKTEITLANGEIRKRPLIETNGETGEIVWDKGRDFATVRKVLSMPQVNIVKKTEVQTGGFSKESILPKRNSDKLIARKKDWDPKKYGGFDSPTVAYSVLVVAKVEKGKSKKLKSVKELLGITIMERSSFEKNPIDFLEAKGYKEVKKDLIIKLPKYSLFELENGRKRMLASAGELQKGNELALPSKYVNFLYLASHYEKLKGSPEDNEQKQLFVEQHKHYLDEIIEQISEFSKRVILADANLDKVLSAYNKHRDKPIREQAENIIHLFTLTNLGAPAAFKYFDTTIDRKRYTSTKEVLDATLIHQSITGLYETRIDLSQLGGDGGGGSGGSGGSGGSGGSGGSGGTLQLEEEYRLFEPESTQKQEMDIWLKNFPQAWAETGGMGTAHCQAPVLIQLKATATPISIRQYPMPHEAYQGIKPHIRRMLDQGILKPCQSPWNTPLLPVKKPGTEDYRPVQDLREVNKRVEDIHPTVPNPYNLLSTLPPSHPWYTVLDLKDAFFCLRLHSESQLLFAFEWRDPEIGLSGQLTWTRLPQGFKNSPTLFNEALHSDLADFRVRYPALVLLQYVDDLLLAAATRTECLEGTKALLETLGNKGYRASAKKAQICLQEVTYLGYSLKDGQRWLTKARKEAILSIPVPKNSRQVREFLGKAGYCRLFIPGFAELAAPLYPLTRPGTLFQWGTEQQLAFEDIKKALLSSPALGLPDITKPFELFIDENSGFAKGVLVQKLGPWKRPVAYLSKKLDTVASGWPPCLRMVAAIAILVKDAGKLTLGQPLTILTSHPVEALVRQPPNKWLSNARMTHYQAMLLDAERVHFGPTVSLNPATLLPLPSGGNHHDCLQILAETHGTRPDLTDQPLPDADLTWYTDGSSFIRNGEREAGAAVTTESEVIWAAPLPPGTSAQRAELIALTQALKMAEGKKLTVYTDSRYAFATTHVHGEIYRRRGWLTSEGKEIKNKNEILALLEALFLPKRLSIIHCPGHQKGDSPQAKGNRLADDTAKKAATETHSSLTVLPAGKRTADGSEFEKRTADGSEFESPKKKAKVE

SEQ ID NO: 6083 - protein, 2094 aa, synthetic construct
MPAAKRVKLDGGDKKYSIGLDIGTNSVGWAVITDEYKVPSKKFKVLGNTDRHSIKKNLIGALLFDSGETAEATRLKRTARRRYTRRKNRICYLQEIFSNEMAKVDDSFFHRLEESFLVEEDKKHERHPIFGNIVDEVAYHEKYPTIYHLRKKLVDSTDKADLRLIYLALAHMIKFRGHFLIEGDLNPDNSDVDKLFIQLVQTYNQLFEENPINASGVDAKAILSARLSKSRRLENLIAQLPGEKKNGLFGNLIALSLGLTPNFKSNFDLAEDAKLQLSKDTYDDDLDNLLAQIGDQYADLFLAAKNLSDAILLSDILRVNTEITKAPLSASMIKRYDEHHQDLTLLKALVRQQLPEKYKEIFFDQSKNGYAGYIDGGASQEEFYKFIKPILEKMDGTEELLVKLNREDLLRKQRTFDNGSIPHQIHLGELHAILRRQEDFYPFLKDNREKIEKILTFRIPYYVGPLARGNSRFAWMTRKSEETITPWNFEEVVDKGASAQSFIERMTNFDKNLPNEKVLPKHSLLYEYFTVYNELTKVKYVTEGMRKPAFLSGEQKKAIVDLLFKTNRKVTVKQLKEDYFKKIECFDSVEISGVEDRFNASLGTYHDLLKIIKDKDFLDNEENEDILEDIVLTLTLFEDREMIEERLKTYAHLFDDKVMKQLKRRRYTGWGRLSRKLINGIRDKQSGKTILDFLKSDGFANRNFMQLIHDDSLTFKEDIQKAQVSGQGDSLHEHIANLAGSPAIKKGILQTVKVVDELVKVMGRHKPENIVIEMARENQTTQKGQKNSRERMKRIEEGIKELGSQILKEHPVENTQLQNEKLYLYYLQNGRDMYVDQELDINRLSDYDVDHIVPQSFLKDDSIDNKVLTRSDKARGKSDNVPSEEVVKKMKNYWRQLLNAKLITQRKFDNLTKAERGGLSELDKAGFIKRQLVETRQITKHVAQILDSRMNTKYDENDKLIREVKVITLKSKLVSDFRKDFQFYKVREINNYHHAHDAYLNAVVGTALIKKYPKLESEFVYGDYKVYDVRKMIAKSEQEIGKATAKYFFYSNIMNFFKTEITLANGEIRKRPLIETNGETGEIVWDKGRDFATVRKVLSMPQVNIVKKTEVQTGGFSKESILPKRNSDKLIARKKDWDPKKYGGFDSPTVAYSVLVVAKVEKGKSKKLKSVKELLGITIMERSSFEKNPIDFLEAKGYKEVKKDLIIKLPKYSLFELENGRKRMLASAGELQKGNELALPSKYVNFLYLASHYEKLKGSPEDNEQKQLFVEQHKHYLDEIIEQISEFSKRVILADANLDKVLSAYNKHRDKPIREQAENIIHLFTLTNLGAPAAFKYFDTTIDRKRYTSTKEVLDATLIHQSITGLYETRIDLSQLGGDGGGGSGGSGGSGGSGGSGGSGGVPWLTQQPLQLTILVPLQEYQEKILSKTALPEDQKQQLKTLFVKYDNLWQHWENQVGHRKIRPHNIATGDYPPRPQKQYPINPKAKPSIQIVIDDLLKQGVLTPQNSTMNTPVYPVPKPDGRWRMVLDYREVNKTIPLTAAQNQHSAGILATIVRQKYKTTLDLANGFWAHPITPESYWLTAFTWQGKQYCWTRLPQGFLNSPALFNADVVDLLKEIPNVQVYVDDIYLSHDDPKEHVQQLEKVFQILLQAGYVVSLKKSEIGQKTVEFLGFNITKEGRGLTDTFKTKLLNITPPKDLKQLQSILGLLNFARNFIPNFAELVQPLYNLIAPAKGKYIEWSEENTKQLNMVIEALNTASNLEERLPEQRLVIKVNTSPSAGYVRYYNETGKKPIMYLNYVFSKAELKFSMLEKLLTTMHKALIKAMDLAMGQEILVYSPIVSMTKIQKTPLPERKALPIRWITWMTYLEDPRIQFHYDKTLPELKHIPDVYTSSQSPVKHPSQYEGVFYTDGSAIKSPDPTKSNNAGMGIVHATYKPEYQVLNQWSIPLGNHTAQMAEIAAVEFACKKALKIPGPVLVITDSFYVAESANKELPYWKSNGFVNNKKKPLKHISKWKSIAECLSMKPDITIQHEKGISLQIPVFILKGNALADKLATQGSYVVNAGKRTADGSEFEKRTADGSEFESPKKKAKVE

SEQ ID NO: 6084 - protein, 2101 aa, synthetic construct
MPAAKRVKLDGGDKKYSIGLDIGTNSVGWAVITDEYKVPSKKFKVLGNTDRHSIKKNLIGALLFDSGETAEATRLKRTARRRYTRRKNRICYLQEIFSNEMAKVDDSFFHRLEESFLVEEDKKHERHPIFGNIVDEVAYHEKYPTIYHLRKKLVDSTDKADLRLIYLALAHMIKFRGHFLIEGDLNPDNSDVDKLFIQLVQTYNQLFEENPINASGVDAKAILSARLSKSRRLENLIAQLPGEKKNGLFGNLIALSLGLTPNFKSNFDLAEDAKLQLSKDTYDDDLDNLLAQIGDQYADLFLAAKNLSDAILLSDILRVNTEITKAPLSASMIKRYDEHHQDLTLLKALVRQQLPEKYKEIFFDQSKNGYAGYIDGGASQEEFYKFIKPILEKMDGTEELLVKLNREDLLRKQRTFDNGSIPHQIHLGELHAILRRQEDFYPFLKDNREKIEKILTFRIPYYVGPLARGNSRFAWMTRKSEETITPWNFEEVVDKGASAQSFIERMTNFDKNLPNEKVLPKHSLLYEYFTVYNELTKVKYVTEGMRKPAFLSGEQKKAIVDLLFKTNRKVTVKQLKEDYFKKIECFDSVEISGVEDRFNASLGTYHDLLKIIKDKDFLDNEENEDILEDIVLTLTLFEDREMIEERLKTYAHLFDDKVMKQLKRRRYTGWGRLSRKLINGIRDKQSGKTILDFLKSDGFANRNFMQLIHDDSLTFKEDIQKAQVSGQGDSLHEHIANLAGSPAIKKGILQTVKVVDELVKVMGRHKPENIVIEMARENQTTQKGQKNSRERMKRIEEGIKELGSQILKEHPVENTQLQNEKLYLYYLQNGRDMYVDQELDINRLSDYDVDHIVPQSFLKDDSIDNKVLTRSDKARGKSDNVPSEEVVKKMKNYWRQLLNAKLITQRKFDNLTKAERGGLSELDKAGFIKRQLVETRQITKHVAQILDSRMNTKYDENDKLIREVKVITLKSKLVSDFRKDFQFYKVREINNYHHAHDAYLNAVVGTALIKKYPKLESEFVYGDYKVYDVRKMIAKSEQEIGKATAKYFFYSNIMNFFKTEITLANGEIRKRPLIETNGETGEIVWDKGRDFATVRKVLSMPQVNIVKKTEVQTGGFSKESILPKRNSDKLIARKKDWDPKKYGGFDSPTVAYSVLVVAKVEKGKSKKLKSVKELLGITIMERSSFEKNPIDFLEAKGYKEVKKDLIIKLPKYSLFELENGRKRMLASAGELQKGNELALPSKYVNFLYLASHYEKLKGSPEDNEQKQLFVEQHKHYLDEIIEQISEFSKRVILADANLDKVLSAYNKHRDKPIREQAENIIHLFTLTNLGAPAAFKYFDTTIDRKRYTSTKEVLDATLIHQSITGLYETRIDLSQLGGDGGGGSGGSGGSGGSGGSGGSGGVLNLEEEYRLHEKPVPSSIDPSWLQLFPTVWAERAGMGLANQVPPVVVELRSGASPVAVRQYPMSKEAREGIRPHIQKFLDLGVLVPCRSPWNTPLLPVKKPGTNDYRPVQDLREINKRVQDIHPTVPNPYNLLSSLPPSYTWYSVLDLKDAFFCLRLHPNSQPLFAFEWKDPEKGNTGQLTWTRLPQGFKNSPTLFNEALHRDLAPFRALNPQVVLLQYVDDLLVAAPTYEDCKKGTQKLLQELSKLGYRVSAKKAQLCQREVTYLGYLLKEGKRWLTPARKATVMKIPVPTTPRQVREFLGKAGFCRLFIPGFASLAAPLYPLTKPSIPFIWTEEHQQAFDHIKKALLSAPALALPDLTKPFTLYIDERAGVARGVLTQTLGPWRRPVAYLSKKLDPVASGWPTCLKAVAAVALLLKDADKLTLGQNVTVIASHSLESIVRQPPDRWMTNARMTHYQSLLLNERVSFAPPAVLNPATLLPVESEATPVHRCSEILAEETGTRRDLEDQPLPGVPTWYTDGSSFITEGKRRAGAPIVDGKRTVWASSLPEGTSAQKAELVALTQALRLAEGKNINIYTDSRYAFATAHIHGAIYKQRGWLTSAGKDIKNKEEILALLEAIHLPRRVAIIHCPGHQRGSNPVATGNRRADEAAKQAALSTRVLAGTTKPAGKRTADGSEFEKRTADGSEFESPKKKAKVE

SEQ ID NO: 6085 - protein, 2020 aa, synthetic construct
MPAAKRVKLDGGDKKYSIGLDIGTNSVGWAVITDEYKVPSKKFKVLGNTDRHSIKKNLIGALLFDSGETAEATRLKRTARRRYTRRKNRICYLQEIFSNEMAKVDDSFFHRLEESFLVEEDKKHERHPIFGNIVDEVAYHEKYPTIYHLRKKLVDSTDKADLRLIYLALAHMIKFRGHFLIEGDLNPDNSDVDKLFIQLVQTYNQLFEENPINASGVDAKAILSARLSKSRRLENLIAQLPGEKKNGLFGNLIALSLGLTPNFKSNFDLAEDAKLQLSKDTYDDDLDNLLAQIGDQYADLFLAAKNLSDAILLSDILRVNTEITKAPLSASMIKRYDEHHQDLTLLKALVRQQLPEKYKEIFFDQSKNGYAGYIDGGASQEEFYKFIKPILEKMDGTEELLVKLNREDLLRKQRTFDNGSIPHQIHLGELHAILRRQEDFYPFLKDNREKIEKILTFRIPYYVGPLARGNSRFAWMTRKSEETITPWNFEEVVDKGASAQSFIERMTNFDKNLPNEKVLPKHSLLYEYFTVYNELTKVKYVTEGMRKPAFLSGEQKKAIVDLLFKTNRKVTVKQLKEDYFKKIECFDSVEISGVEDRFNASLGTYHDLLKIIKDKDFLDNEENEDILEDIVLTLTLFEDREMIEERLKTYAHLFDDKVMKQLKRRRYTGWGRLSRKLINGIRDKQSGKTILDFLKSDGFANRNFMQLIHDDSLTFKEDIQKAQVSGQGDSLHEHIANLAGSPAIKKGILQTVKVVDELVKVMGRHKPENIVIEMARENQTTQKGQKNSRERMKRIEEGIKELGSQILKEHPVENTQLQNEKLYLYYLQNGRDMYVDQELDINRLSDYDVDHIVPQSFLKDDSIDNKVLTRSDKARGKSDNVPSEEVVKKMKNYWRQLLNAKLITQRKFDNLTKAERGGLSELDKAGFIKRQLVETRQITKHVAQILDSRMNTKYDENDKLIREVKVITLKSKLVSDFRKDFQFYKVREINNYHHAHDAYLNAVVGTALIKKYPKLESEFVYGDYKVYDVRKMIAKSEQEIGKATAKYFFYSNIMNFFKTEITLANGEIRKRPLIETNGETGEIVWDKGRDFATVRKVLSMPQVNIVKKTEVQTGGFSKESILPKRNSDKLIARKKDWDPKKYGGFDSPTVAYSVLVVAKVEKGKSKKLKSVKELLGITIMERSSFEKNPIDFLEAKGYKEVKKDLIIKLPKYSLFELENGRKRMLASAGELQKGNELALPSKYVNFLYLASHYEKLKGSPEDNEQKQLFVEQHKHYLDEIIEQISEFSKRVILADANLDKVLSAYNKHRDKPIREQAENIIHLFTLTNLGAPAAFKYFDTTIDRKRYTSTKEVLDATLIHQSITGLYETRIDLSQLGGDGGGGSGGSGGSGGSGGSGGSGGAVLGLEHLPRPPQISQFPLNPERLQALQHLVRKALEAGHIEPYTGPGNNPVFPVKKANGTWRFIHDLRATNSLTIDLSSSSPGPPDLSSLPTTLAHLQTIDLRDAFFQIPLPKQFQPYFAFTVPQQCNYGPGTRYAWKVLPQGFKNSPTLFEMQLAHILQPIRQAFPQCTILQYMDDILLASPSHEDLLLLSEATMASLISHGLPVSENKTQQTPGTIKFLGQIISPNHLTYDAVPTVPIRSRWALPELQALLGEIQWVSKGTPTLRQPLHSLYCALQRHTDPRDQIYLNPSQVQSLVQLRQALSQNCRSRLVQTLPLLGAIMLTLTGTTTVVFQSKEQWPLVWLHAPLPHTSQCPWGQLLASAVLLLDKYTLQSYGLLCQTIHHNISTQTFNQFIQTSDHPSVPILLHHSHRFKNLGAQTGELWNTFLKTAAPLAPVKALMPVFTLSPVIINTAPCLFSDGSTSRAAYILWDKQILSQRSFPLPPPHKSAQRAELLGLLHGLSSARSWRCLNIFLDSKYLYHYLRTLALGTFQGRSSQAPFQALLPRLLSRKVVYLHHVRSHTNLPDPISRLNALTDALLITPVLQLAGKRTADGSEFEKRTADGSEFESPKKKAKVE

SEQ ID NO: 6086 - protein, 2016 aa, synthetic construct
MPAAKRVKLDGGDKKYSIGLDIGTNSVGWAVITDEYKVPSKKFKVLGNTDRHSIKKNLIGALLFDSGETAEATRLKRTARRRYTRRKNRICYLQEIFSNEMAKVDDSFFHRLEESFLVEEDKKHERHPIFGNIVDEVAYHEKYPTIYHLRKKLVDSTDKADLRLIYLALAHMIKFRGHFLIEGDLNPDNSDVDKLFIQLVQTYNQLFEENPINASGVDAKAILSARLSKSRRLENLIAQLPGEKKNGLFGNLIALSLGLTPNFKSNFDLAEDAKLQLSKDTYDDDLDNLLAQIGDQYADLFLAAKNLSDAILLSDILRVNTEITKAPLSASMIKRYDEHHQDLTLLKALVRQQLPEKYKEIFFDQSKNGYAGYIDGGASQEEFYKFIKPILEKMDGTEELLVKLNREDLLRKQRTFDNGSIPHQIHLGELHAILRRQEDFYPFLKDNREKIEKILTFRIPYYVGPLARGNSRFAWMTRKSEETITPWNFEEVVDKGASAQSFIERMTNFDKNLPNEKVLPKHSLLYEYFTVYNELTKVKYVTEGMRKPAFLSGEQKKAIVDLLFKTNRKVTVKQLKEDYFKKIECFDSVEISGVEDRFNASLGTYHDLLKIIKDKDFLDNEENEDILEDIVLTLTLFEDREMIEERLKTYAHLFDDKVMKQLKRRRYTGWGRLSRKLINGIRDKQSGKTILDFLKSDGFANRNFMQLIHDDSLTFKEDIQKAQVSGQGDSLHEHIANLAGSPAIKKGILQTVKVVDELVKVMGRHKPENIVIEMARENQTTQKGQKNSRERMKRIEEGIKELGSQILKEHPVENTQLQNEKLYLYYLQNGRDMYVDQELDINRLSDYDVDHIVPQSFLKDDSIDNKVLTRSDKARGKSDNVPSEEVVKKMKNYWRQLLNAKLITQRKFDNLTKAERGGLSELDKAGFIKRQLVETRQITKHVAQILDSRMNTKYDENDKLIREVKVITLKSKLVSDFRKDFQFYKVREINNYHHAHDAYLNAVVGTALIKKYPKLESEFVYGDYKVYDVRKMIAKSEQEIGKATAKYFFYSNIMNFFKTEITLANGEIRKRPLIETNGETGEIVWDKGRDFATVRKVLSMPQVNIVKKTEVQTGGFSKESILPKRNSDKLIARKKDWDPKKYGGFDSPTVAYSVLVVAKVEKGKSKKLKSVKELLGITIMERSSFEKNPIDFLEAKGYKEVKKDLIIKLPKYSLFELENGRKRMLASAGELQKGNELALPSKYVNFLYLASHYEKLKGSPEDNEQKQLFVEQHKHYLDEIIEQISEFSKRVILADANLDKVLSAYNKHRDKPIREQAENIIHLFTLTNLGAPAAFKYFDTTIDRKRYTSTKEVLDATLIHQSITGLYETRIDLSQLGGDGGGGSGGSGGSGGSGGSGGSGGGLEHLPPPPEVSQFPLNPERLQALTDLVSRALEAKHIEPYQGPGNNPIFPVKKPNGKWRFIHDLRATNSLTRDLASPSPGPPDLTSPPQDLPHLRTIDLTDAFFQIPLPAVFQPYFAFTLPQPNNHGPGTRYSWRVLPQGFKNSPTLFQQQLSHILAPVRKAFPNSLIIQYMDDILLASPALRELTALTDKVTNALTKEGLPMSLEKTQATPGSIHFLGQVISPDCITYETLPSIHVKSIWSLAELQSMLGELQWVSKGTPVLRSSLHQLYLALRGHRDPRDTIELTSTQVQALKTIQKALALNCRSRLVSQLPILALIILRPTGTTAVLFQTKQKWPLVWLHTPHPATSLRPWGQLLANAIITLDKYSLQHYGQICKSFHHNISNQALTYYLHTSDQSSVAILLQHSHRFHNLGAQPSGPWRSLLQVPQIFQNIDVLRPPFIISPVVIDHAPCLFSDGATSKAAFILWDKQVIHQQVLPLPSTCSAQAGELFGLLAGLQKSKPWPALNIFLDSKFLIGHLRRMAWGAFLGPSTQCDLHARLFPLLQGKTVYVHHVRSHTLLQDPISRLNEATDALMLAPLLPLAGKRTADGSEFEKRTADGSEFESPKKKAKVE

SEQ ID NO: 6087 - protein, 2013 aa, synthetic construct
MPAAKRVKLDGGDKKYSIGLDIGTNSVGWAVITDEYKVPSKKFKVLGNTDRHSIKKNLIGALLFDSGETAEATRLKRTARRRYTRRKNRICYLQEIFSNEMAKVDDSFFHRLEESFLVEEDKKHERHPIFGNIVDEVAYHEKYPTIYHLRKKLVDSTDKADLRLIYLALAHMIKFRGHFLIEGDLNPDNSDVDKLFIQLVQTYNQLFEENPINASGVDAKAILSARLSKSRRLENLIAQLPGEKKNGLFGNLIALSLGLTPNFKSNFDLAEDAKLQLSKDTYDDDLDNLLAQIGDQYADLFLAAKNLSDAILLSDILRVNTEITKAPLSASMIKRYDEHHQDLTLLKALVRQQLPEKYKEIFFDQSKNGYAGYIDGGASQEEFYKFIKPILEKMDGTEELLVKLNREDLLRKQRTFDNGSIPHQIHLGELHAILRRQEDFYPFLKDNREKIEKILTFRIPYYVGPLARGNSRFAWMTRKSEETITPWNFEEVVDKGASAQSFIERMTNFDKNLPNEKVLPKHSLLYEYFTVYNELTKVKYVTEGMRKPAFLSGEQKKAIVDLLFKTNRKVTVKQLKEDYFKKIECFDSVEISGVEDRFNASLGTYHDLLKIIKDKDFLDNEENEDILEDIVLTLTLFEDREMIEERLKTYAHLFDDKVMKQLKRRRYTGWGRLSRKLINGIRDKQSGKTILDFLKSDGFANRNFMQLIHDDSLTFKEDIQKAQVSGQGDSLHEHIANLAGSPAIKKGILQTVKVVDELVKVMGRHKPENIVIEMARENQTTQKGQKNSRERMKRIEEGIKELGSQILKEHPVENTQLQNEKLYLYYLQNGRDMYVDQELDINRLSDYDVDHIVPQSFLKDDSIDNKVLTRSDKARGKSDNVPSEEVVKKMKNYWRQLLNAKLITQRKFDNLTKAERGGLSELDKAGFIKRQLVETRQITKHVAQILDSRMNTKYDENDKLIREVKVITLKSKLVSDFRKDFQFYKVREINNYHHAHDAYLNAVVGTALIKKYPKLESEFVYGDYKVYDVRKMIAKSEQEIGKATAKYFFYSNIMNFFKTEITLANGEIRKRPLIETNGETGEIVWDKGRDFATVRKVLSMPQVNIVKKTEVQTGGFSKESILPKRNSDKLIARKKDWDPKKYGGFDSPTVAYSVLVVAKVEKGKSKKLKSVKELLGITIMERSSFEKNPIDFLEAKGYKEVKKDLIIKLPKYSLFELENGRKRMLASAGELQKGNELALPSKYVNFLYLASHYEKLKGSPEDNEQKQLFVEQHKHYLDEIIEQISEFSKRVILADANLDKVLSAYNKHRDKPIREQAENIIHLFTLTNLGAPAAFKYFDTTIDRKRYTSTKEVLDATLIHQSITGLYETRIDLSQLGGDGGGGSGGSGGSGGSGGSGGSGGPLGTSDSPVTHADPIDWKSEEPVWVDQWPLTQEKLSAAQQLVQEQLRLGHIEPSTSAWNSPIFVIKKKSGKWRLLQDLRKVNETMMHMGALQPGLPTPSPIPDKSYIIVIDLKDCFYTIPLAPQDCKRFAFSLPSVNFKEPMQRYQWRVLPQGMTNSPTLCQKFVATAIAPVRQRFPQLYLVHYMDDILLAHTDEHLLYQAFSILKQHLSLNGLVIADEKIQTHFPYNYLGFSLYPRVYNTQLVKLQTDHLKTLNDFQKLLGDINWIRPYLKLPTYTLQPLFDILKGDSDPASPRTLSLEGRTALQSIEEAIRQQQITYCDYQRSWGLYILPTPRAPTGVLYQDKPLRWIYLSATPTKHLLPYYELVAKIIAKGRHEAIQYFGMEPPFICVPYALEQQDWLFQFSDNWSIAFANYPGQITHHYPSDKLLQFASSHAFIFPKIVRRQPIPEATLIFTDGSSNGTAALIINHQTYYAQTSFSSAQVVELFAVHQALLTVPTSFNLFTDSSYVVGALQMIETVPIIGTTSPEVLNLFTLIQQVLHCRQHPCFFGHIRAHSTLPGALVQGNHTADVLTKQVFFQSAGKRTADGSEFEKRTADGSEFESPKKKAKVE

SEQ ID NO: 6088 - protein, 2134 aa, synthetic construct
MPAAKRVKLDGGDKKYSIGLDIGTNSVGWAVITDEYKVPSKKFKVLGNTDRHSIKKNLIGALLFDSGETAEATRLKRTARRRYTRRKNRICYLQEIFSNEMAKVDDSFFHRLEESFLVEEDKKHERHPIFGNIVDEVAYHEKYPTIYHLRKKLVDSTDKADLRLIYLALAHMIKFRGHFLIEGDLNPDNSDVDKLFIQLVQTYNQLFEENPINASGVDAKAILSARLSKSRRLENLIAQLPGEKKNGLFGNLIALSLGLTPNFKSNFDLAEDAKLQLSKDTYDDDLDNLLAQIGDQYADLFLAAKNLSDAILLSDILRVNTEITKAPLSASMIKRYDEHHQDLTLLKALVRQQLPEKYKEIFFDQSKNGYAGYIDGGASQEEFYKFIKPILEKMDGTEELLVKLNREDLLRKQRTFDNGSIPHQIHLGELHAILRRQEDFYPFLKDNREKIEKILTFRIPYYVGPLARGNSRFAWMTRKSEETITPWNFEEVVDKGASAQSFIERMTNFDKNLPNEKVLPKHSLLYEYFTVYNELTKVKYVTEGMRKPAFLSGEQKKAIVDLLFKTNRKVTVKQLKEDYFKKIECFDSVEISGVEDRFNASLGTYHDLLKIIKDKDFLDNEENEDILEDIVLTLTLFEDREMIEERLKTYAHLFDDKVMKQLKRRRYTGWGRLSRKLINGIRDKQSGKTILDFLKSDGFANRNFMQLIHDDSLTFKEDIQKAQVSGQGDSLHEHIANLAGSPAIKKGILQTVKVVDELVKVMGRHKPENIVIEMARENQTTQKGQKNSRERMKRIEEGIKELGSQILKEHPVENTQLQNEKLYLYYLQNGRDMYVDQELDINRLSDYDVDHIVPQSFLKDDSIDNKVLTRSDKARGKSDNVPSEEVVKKMKNYWRQLLNAKLITQRKFDNLTKAERGGLSELDKAGFIKRQLVETRQITKHVAQILDSRMNTKYDENDKLIREVKVITLKSKLVSDFRKDFQFYKVREINNYHHAHDAYLNAVVGTALIKKYPKLESEFVYGDYKVYDVRKMIAKSEQEIGKATAKYFFYSNIMNFFKTEITLANGEIRKRPLIETNGETGEIVWDKGRDFATVRKVLSMPQVNIVKKTEVQTGGFSKESILPKRNSDKLIARKKDWDPKKYGGFDSPTVAYSVLVVAKVEKGKSKKLKSVKELLGITIMERSSFEKNPIDFLEAKGYKEVKKDLIIKLPKYSLFELENGRKRMLASAGELQKGNELALPSKYVNFLYLASHYEKLKGSPEDNEQKQLFVEQHKHYLDEIIEQISEFSKRVILADANLDKVLSAYNKHRDKPIREQAENIIHLFTLTNLGAPAAFKYFDTTIDRKRYTSTKEVLDATLIHQSITGLYETRIDLSQLGGDGGGGSGGSGGSGGSGGSGGSGGLLGRDLLTKLKAQIQFSTEGPQVTWEDRPAMCLVLNLEEEYRLHEKPVPPSIDPSWLQLFPMVWAEKAGMGLANQVPPVVVELKSDASPVAVRQYPMSKEAREGIRPHIQRFLDLGILVPCQSPWNTPLLPVKKPGTNDYRPVQDLREVNKRVQDIHPTVPNPYNLLSSLPPSHTWYSVLDLKDAFFCLKLHPNSQPLFAFEWRDPEKGNTGQLTWTRLPQGFKNSPTLFNEALHRDLASFRALNPQVVMLQYVDDLLVAAPTYRDCKEGTRRLLQELSKLGYRVSAKKAQLCREEVTYLGYLLKGGKRWLTPARKATVMKIPTPTTPRQVREFLGKAGFCRLFIPGFASLAAPLYPLTRPKVPFTWTEAHQEAFGRIKEALLSAPALALPDLTKPFALYVDEKEGVARGVLTQTLGPWRRPVAYLSKKLDPVASGWPTCLKAIAAVALLLKDADKLTLGQNVLVIAPHNLESIVRQPPDRWMTNARMTHYQSLLLNERVSFAPPAILNPATLLPVESDDTPIHICSEILAEETGTRPDLRDQPLPGVPAWYTDGSSFIMDGRRQAGAAIVDNKRTVWASNLPEGTSAQKAELIALTQALRLAEGKSINIYTDSRYAFATAHVHGAIYKQRGWLTSAGKDIKNKEEILALLEAIHLPKRVAIIHCPGHQRGTDPVATGNRKADEAAKQAAQSTRILTETTKNAGKRTADGSEFEKRTADGSEFESPKKKAKVE

SEQ ID NO: 6089 - protein, 2225 aa, synthetic construct
MPAAKRVKLDGGDKKYSIGLDIGTNSVGWAVITDEYKVPSKKFKVLGNTDRHSIKKNLIGALLFDSGETAEATRLKRTARRRYTRRKNRICYLQEIFSNEMAKVDDSFFHRLEESFLVEEDKKHERHPIFGNIVDEVAYHEKYPTIYHLRKKLVDSTDKADLRLIYLALAHMIKFRGHFLIEGDLNPDNSDVDKLFIQLVQTYNQLFEENPINASGVDAKAILSARLSKSRRLENLIAQLPGEKKNGLFGNLIALSLGLTPNFKSNFDLAEDAKLQLSKDTYDDDLDNLLAQIGDQYADLFLAAKNLSDAILLSDILRVNTEITKAPLSASMIKRYDEHHQDLTLLKALVRQQLPEKYKEIFFDQSKNGYAGYIDGGASQEEFYKFIKPILEKMDGTEELLVKLNREDLLRKQRTFDNGSIPHQIHLGELHAILRRQEDFYPFLKDNREKIEKILTFRIPYYVGPLARGNSRFAWMTRKSEETITPWNFEEVVDKGASAQSFIERMTNFDKNLPNEKVLPKHSLLYEYFTVYNELTKVKYVTEGMRKPAFLSGEQKKAIVDLLFKTNRKVTVKQLKEDYFKKIECFDSVEISGVEDRFNASLGTYHDLLKIIKDKDFLDNEENEDILEDIVLTLTLFEDREMIEERLKTYAHLFDDKVMKQLKRRRYTGWGRLSRKLINGIRDKQSGKTILDFLKSDGFANRNFMQLIHDDSLTFKEDIQKAQVSGQGDSLHEHIANLAGSPAIKKGILQTVKVVDELVKVMGRHKPENIVIEMARENQTTQKGQKNSRERMKRIEEGIKELGSQILKEHPVENTQLQNEKLYLYYLQNGRDMYVDQELDINRLSDYDVDHIVPQSFLKDDSIDNKVLTRSDKARGKSDNVPSEEVVKKMKNYWRQLLNAKLITQRKFDNLTKAERGGLSELDKAGFIKRQLVETRQITKHVAQILDSRMNTKYDENDKLIREVKVITLKSKLVSDFRKDFQFYKVREINNYHHAHDAYLNAVVGTALIKKYPKLESEFVYGDYKVYDVRKMIAKSEQEIGKATAKYFFYSNIMNFFKTEITLANGEIRKRPLIETNGETGEIVWDKGRDFATVRKVLSMPQVNIVKKTEVQTGGFSKESILPKRNSDKLIARKKDWDPKKYGGFDSPTVAYSVLVVAKVEKGKSKKLKSVKELLGITIMERSSFEKNPIDFLEAKGYKEVKKDLIIKLPKYSLFELENGRKRMLASAGELQKGNELALPSKYVNFLYLASHYEKLKGSPEDNEQKQLFVEQHKHYLDEIIEQISEFSKRVILADANLDKVLSAYNKHRDKPIREQAENIIHLFTLTNLGAPAAFKYFDTTIDRKRYTSTKEVLDATLIHQSITGLYETRIDLSQLGGDGGGGSGGSGGSGGSGGSGGSGGTLGDQGSRGSDPLPEPRVTLTVEGIPTEFLVNTGAEHSVLTKPMGKMGSKRTVVAGATGSKVYPWTTKRLLKIGQKQVTHSFLVIPECPAPLLGRDLLTKLKAQIQFSTEGPQVTWEDRPAMCLVLNLEEEYRLHEKPVPPSIDPSWLQLFPMVWAEKAGMGLANQVPPVVVELKSDASPVAVRQYPMSKEAREGIRPHIQRFLDLGILVPCQSPWNTPLLPVKKPGTNDYRPVQDLREVNKRVQDIHPTVPNPYNLLSSLPPSHTWYSVLDLKDAFFCLKLHPNSQPLFAFEWRDPEKGNTGQLTWTRLPQGFKNSPTLFNEALHRDLASFRALNPQVVMLQYVDDLLVAAPTYRDCKEGTRRLLQELSKLGYRVSAKKAQLCREEVTYLGYLLKGGKRWLTPARKATVMKIPTPTTPRQVREFLGKAGFCRLFIPGFASLAAPLYPLTRPKVPFTWTEAHQEAFGRIKEALLSAPALALPDLTKPFALYVDEKEGVARGVLTQTLGPWRRPVAYLSKKLDPVASGWPTCLKAIAAVALLLKDADKLTLGQNVLVIAPHNLESIVRQPPDRWMTNARMTHYQSLLLNERVSFAPPAILNPATLLPVESDDTPIHICSEILAEETGTRPDLRDQPLPGVPAWYTDGSSFIMDGRRQAGAAIVDNKRTVWASNLPEGTSAQKAELIALTQALRLAEGKSINIYTDSRYAFATAHVHGAIYKQRGWLTSAGKDIKNKEEILALLEAIHLPKRVAIIHCPGHQRGTDPVATGNRKADEAAKQAAQSTRILTETTKNAGKRTADGSEFEKRTADGSEFESPKKKAKVE

SEQ ID NO: 6090 - protein, 2103 aa, synthetic construct; identical to SEQ ID NO: 4503

SEQ ID NO: 6091 - protein, 2103 aa, synthetic construct; identical to SEQ ID NO: 4503

SEQ ID NO: 6092 - protein, 2103 aa, synthetic construct
MPAAKRVKLDGGDKKYSIGLDIGTNSVGWAVITDEYKVPSKKFKVLGNTDRHSIKKNLIGALLFDSGETAEATRLKRTARRRYTRRKNRICYLQEIFSNEMAKVDDSFFHRLEESFLVEEDKKHERHPIFGNIVDEVAYHEKYPTIYHLRKKLVDSTDKADLRLIYLALAHMIKFRGHFLIEGDLNPDNSDVDKLFIQLVQTYNQLFEENPINASGVDAKAILSARLSKSRRLENLIAQLPGEKKNGLFGNLIALSLGLTPNFKSNFDLAEDAKLQLSKDTYDDDLDNLLAQIGDQYADLFLAAKNLSDAILLSDILRVNTEITKAPLSASMIKRYDEHHQDLTLLKALVRQQLPEKYKEIFFDQSKNGYAGYIDGGASQEEFYKFIKPILEKMDGTEELLVKLNREDLLRKQRTFDNGSIPHQIHLGELHAILRRQEDFYPFLKDNREKIEKILTFRIPYYVGPLARGNSRFAWMTRKSEETITPWNFEEVVDKGASAQSFIERMTNFDKNLPNEKVLPKHSLLYEYFTVYNELTKVKYVTEGMRKPAFLSGEQKKAIVDLLFKTNRKVTVKQLKEDYFKKIECFDSVEISGVEDRFNASLGTYHDLLKIIKDKDFLDNEENEDILEDIVLTLTLFEDREMIEERLKTYAHLFDDKVMKQLKRRRYTGWGRLSRKLINGIRDKQSGKTILDFLKSDGFANRNFMQLIHDDSLTFKEDIQKAQVSGQGDSLHEHIANLAGSPAIKKGILQTVKVVDELVKVMGRHKPENIVIEMARENQTTQKGQKNSRERMKRIEEGIKELGSQILKEHPVENTQLQNEKLYLYYLQNGRDMYVDQELDINRLSDYDVDHIVPQSFLKDDSIDNKVLTRSDKARGKSDNVPSEEVVKKMKNYWRQLLNAKLITQRKFDNLTKAERGGLSELDKAGFIKRQLVETRQITKHVAQILDSRMNTKYDENDKLIREVKVITLKSKLVSDFRKDFQFYKVREINNYHHAHDAYLNAVVGTALIKKYPKLESEFVYGDYKVYDVRKMIAKSEQEIGKATAKYFFYSNIMNFFKTEITLANGEIRKRPLIETNGETGEIVWDKGRDFATVRKVLSMPQVNIVKKTEVQTGGFSKESILPKRNSDKLIARKKDWDPKKYGGFDSPTVAYSVLVVAKVEKGKSKKLKSVKELLGITIMERSSFEKNPIDFLEAKGYKEVKKDLIIKLPKYSLFELENGRKRMLASAGELQKGNELALPSKYVNFLYLASHYEKLKGSPEDNEQKQLFVEQHKHYLDEIIEQISEFSKRVILADANLDKVLSAYNKHRDKPIREQAENIIHLFTLTNLGAPAAFKYFDTTIDRKRYTSTKEVLDATLIHQSITGLYETRIDLSQLGGDGGGGSGGSGGSGGSGGSGGSGGTLGIEDEYRLHETSTEPDVSLGSTWLSDFPQAWAETGGMGLAVRQAPLIIPLKATSTPVSIQQYPMSHEARLGIKPHIQRLLDQGILVPCQSPWNTPLLPVKKPGTNDYRPVQDLREVNKRVEDIHPTVPNPYNLLSGLPPSHQWYTVLDLKDAFFCLRLHPTSQPLFAFEWRDPGMGISGQLTWTRLPQGFKNSPTLFDEALHRDLADFRIQHPDLILLQYVDDILLAATSELDCQQGTRALLQTLGDLGYRASAKKAQICQKQVKYLGYLLREGQRWLTEARKETVMGQPVPKTPRQLREFLGTAGFCRLWIPGFAEMAAPLYPLTKTGTLFSWGPDQQKAYQEIKQALLTAPALGLPDLTKPFELFVDEKQGYAKGVLTQKLGPWRRPVAYLSKKLDPVAAGWPPCLRMVAAIAVLTKDAGKLTMGQPLVILAPHAVEALVKQPPDRWLSNARMTHYQAMLLDTDRVQFGPVVALNPATLLPLPEEGAPHDCLEILAETHGTRPDLTDQPIPDADHTWYTDGSSFLQEGQRKAGAAVTTETEVIWAGALPAGTSAQRAELIALTQALKMAEGKRLNVYTDSRYAFATAHIHGEIYRRRGLLTSEGREIKNKSEILALLKALFLPKRLSIIHCLGHQKGDSAEARGNRLADQAAREAAIKTPPDTSTLLAGKRTADGSEFEKRTADGSEFESPKKKAKVE

SEQ ID NO: 6093 - protein, 2103 aa, synthetic construct
MPAAKRVKLDGGDKKYSIGLDIGTNSVGWAVITDEYKVPSKKFKVLGNTDRHSIKKNLIGALLFDSGETAEATRLKRTARRRYTRRKNRICYLQEIFSNEMAKVDDSFFHRLEESFLVEEDKKHERHPIFGNIVDEVAYHEKYPTIYHLRKKLVDSTDKADLRLIYLALAHMIKFRGHFLIEGDLNPDNSDVDKLFIQLVQTYNQLFEENPINASGVDAKAILSARLSKSRRLENLIAQLPGEKKNGLFGNLIALSLGLTPNFKSNFDLAEDAKLQLSKDTYDDDLDNLLAQIGDQYADLFLAAKNLSDAILLSDILRVNTEITKAPLSASMIKRYDEHHQDLTLLKALVRQQLPEKYKEIFFDQSKNGYAGYIDGGASQEEFYKFIKPILEKMDGTEELLVKLNREDLLRKQRTFDNGSIPHQIHLGELHAILRRQEDFYPFLKDNREKIEKILTFRIPYYVGPLARGNSRFAWMTRKSEETITPWNFEEVVDKGASAQSFIERMTNFDKNLPNEKVLPKHSLLYEYFTVYNELTKVKYVTEGMRKPAFLSGEQKKAIVDLLFKTNRKVTVKQLKEDYFKKIECFDSVEISGVEDRFNASLGTYHDLLKIIKDKDFLDNEENEDILEDIVLTLTLFEDREMIEERLKTYAHLFDDKVMKQLKRRRYTGWGRLSRKLINGIRDKQSGKTILDFLKSDGFANRNFMQLIHDDSLTFKEDIQKAQVSGQGDSLHEHIANLAGSPAIKKGILQTVKVVDELVKVMGRHKPENIVIEMARENQTTQKGQKNSRERMKRIEEGIKELGSQILKEHPVENTQLQNEKLYLYYLQNGRDMYVDQELDINRLSDYDVDHIVPQSFLKDDSIDNKVLTRSDKARGKSDNVPSEEVVKKMKNYWRQLLNAKLITQRKFDNLTKAERGGLSELDKAGFIKRQLVETRQITKHVAQILDSRMNTKYDENDKLIREVKVITLKSKLVSDFRKDFQFYKVREINNYHHAHDAYLNAVVGTALIKKYPKLESEFVYGDYKVYDVRKMIAKSEQEIGKATAKYFFYSNIMNFFKTEITLANGEIRKRPLIETNGETGEIVWDKGRDFATVRKVLSMPQVNIVKKTEVQTGGFSKESILPKRNSDKLIARKKDWDPKKYGGFDSPTVAYSVLVVAKVEKGKSKKLKSVKELLGITIMERSSFEKNPIDFLEAKGYKEVKKDLIIKLPKYSLFELENGRKRMLASAGELQKGNELALPSKYVNFLYLASHYEKLKGSPEDNEQKQLFVEQHKHYLDEIIEQISEFSKRVILADANLDKVLSAYNKHRDKPIREQAENIIHLFTLTNLGAPAAFKYFDTTIDRKRYTSTKEVLDATLIHQSITGLYETRIDLSQLGGDGGGGSGGSGGSGGSGGSGGSGGTLGIEDEYRLHETSTEPDVSLGSTWLSDFPQAWAETGGMGLAVRQAPLIIPLKATSTPVSIQQYPMSHEARLGIKPHIQRLLDQGILVPCQSPWNTPLLPVKKPGTNDYRPVQDLREVNKRVEDIHPTVPNPYNLLSGLPPSHQWYTVLDLKDAFFCLRLHPTSQPLFAFEWRDPGMGISGQLTWTRLPQGFKNSPTLFNEALHRDLADFRIQHPDLILLQYVDDILLAATSELDCQQGTRALLQTLGDLGYRASAKKAQICQKQVKYLGYLLREGQRWLTEARKETVMGQPVPKTPRQLREFLGTAGFCRLWIPGFAEMAAPLYPLTKPGTLFSWGPDQQKAYQEIKQALLTAPALGLPDLTKPFELFVDEKQGYAKGVLTQKLGPWRRPVAYLSKKLDPVAAGWPPCLRMVAAIAVLTKDAGKLTMGQPLVILAPHAVEALVKQPPDRWLSNARMTHYQAMLLDTDRVQFGPVVALNPATLLPLPEEGAPHDCLEILAETHGTRPDLTDQPIPDADHTWYTDGSSFLQEGQRKAGAAVTTETEVIWAGALPAGTSAQRAELIALTQALKMAEGKRLNVYTDSRYAFATAHIHGEIYRRRGWLTSEGREIKNKSEILALLKALFLPKRLSIIHCLGHQKGDSAEARGNRLADQAAREAAIKTPPDTSTLLAGKRTADGSEFEKRTADGSEFESPKKKAKVE

SEQ ID NO: 6094 - protein, 2103 aa, synthetic construct
MPAAKRVKLDGGDKKYSIGLDIGTNSVGWAVITDEYKVPSKKFKVLGNTDRHSIKKNLIGALLFDSGETAEATRLKRTARRRYTRRKNRICYLQEIFSNEMAKVDDSFFHRLEESFLVEEDKKHERHPIFGNIVDEVAYHEKYPTIYHLRKKLVDSTDKADLRLIYLALAHMIKFRGHFLIEGDLNPDNSDVDKLFIQLVQTYNQLFEENPINASGVDAKAILSARLSKSRRLENLIAQLPGEKKNGLFGNLIALSLGLTPNFKSNFDLAEDAKLQLSKDTYDDDLDNLLAQIGDQYADLFLAAKNLSDAILLSDILRVNTEITKAPLSASMIKRYDEHHQDLTLLKALVRQQLPEKYKEIFFDQSKNGYAGYIDGGASQEEFYKFIKPILEKMDGTEELLVKLNREDLLRKQRTFDNGSIPHQIHLGELHAILRRQEDFYPFLKDNREKIEKILTFRIPYYVGPLARGNSRFAWMTRKSEETITPWNFEEVVDKGASAQSFIERMTNFDKNLPNEKVLPKHSLLYEYFTVYNELTKVKYVTEGMRKPAFLSGEQKKAIVDLLFKTNRKVTVKQLKEDYFKKIECFDSVEISGVEDRFNASLGTYHDLLKIIKDKDFLDNEENEDILEDIVLTLTLFEDREMIEERLKTYAHLFDDKVMKQLKRRRYTGWGRLSRKLINGIRDKQSGKTILDFLKSDGFANRNFMQLIHDDSLTFKEDIQKAQVSGQGDSLHEHIANLAGSPAIKKGILQTVKVVDELVKVMGRHKPENIVIEMARENQTTQKGQKNSRERMKRIEEGIKELGSQILKEHPVENTQLQNEKLYLYYLQNGRDMYVDQELDINRLSDYDVDHIVPQSFLKDDSIDNKVLTRSDKARGKSDNVPSEEVVKKMKNYWRQLLNAKLITQRKFDNLTKAERGGLSELDKAGFIKRQLVETRQITKHVAQILDSRMNTKYDENDKLIREVKVITLKSKLVSDFRKDFQFYKVREINNYHHAHDAYLNAVVGTALIKKYPKLESEFVYGDYKVYDVRKMIAKSEQEIGKATAKYFFYSNIMNFFKTEITLANGEIRKRPLIETNGETGEIVWDKGRDFATVRKVLSMPQVNIVKKTEVQTGGFSKESILPKRNSDKLIARKKDWDPKKYGGFDSPTVAYSVLVVAKVEKGKSKKLKSVKELLGITIMERSSFEKNPIDFLEAKGYKEVKKDLIIKLPKYSLFELENGRKRMLASAGELQKGNELALPSKYVNFLYLASHYEKLKGSPEDNEQKQLFVEQHKHYLDEIIEQISEFSKRVILADANLDKVLSAYNKHRDKPIREQAENIIHLFTLTNLGAPAAFKYFDTTIDRKRYTSTKEVLDATLIHQSITGLYETRIDLSQLGGDGGGGSGGSGGSGGSGGSGGSGGTLNIEDEYRLHETSKEPDVSLGSTWLSDFPQAWAETGGMGLAVRQAPLIIPLKATSTPVSIKQYPMSQEARLGIKPHIQRLLDQGILVPCQSPWNTPLLPVKKPGTNDYRPVQDLREVNKRVEDIHPTVPNPYNLLSGLPPSHQWYTVLDLKDAFFCLRLHPTSQPLFAFEWRDPEMGISGQLTWTRLPQGFKNSPTLFNEALHRDLAGFRIQHPDLILLQYVDDLLLAATSELDCQQGTRALLQTLGDLGYRASAKKAQICQKQVKYLGYLLKEGQRWLTEARKETVMGQPIPKTPRQLREFLGTAGFCRLWIPGFAEMAAPLYPLTKPGTLFNWGPDQQKAFQEIKQALLTAPALGLPDLTKPFELFVDEKQGYAKGVLTQKLGPWRRPVAYLSKKLDPVAAGWPPCLRMVAAIAVLTKDAGKLTMGQPLVILAPHAVEALVKQPPDRWLSNARMTHYQALLLDTDRVQFGPVVALNPATLLPLPEEGLQHDCLDILAEAHGTRSDLMDQPLPDADHTWYTDGSSFLQEGQRKAGAAVTTETEVIWARALPAGTSAQRAELIALTQALKMAEGKKLNVYTDSRYAFATAHIHGEIYRRRGWLTSEGKEIKNKDEILALLKALFLPKRLSIIHCPGHQKGNSAEARGNRMADQAAREVATRETPETSTLLAGKRTADGSEFEKRTADGSEFESPKKKAKVE

SEQ ID NO: 6095 - protein, 2103 aa, synthetic construct
MPAAKRVKLDGGDKKYSIGLDIGTNSVGWAVITDEYKVPSKKFKVLGNTDRHSIKKNLIGALLFDSGETAEATRLKRTARRRYTRRKNRICYLQEIFSNEMAKVDDSFFHRLEESFLVEEDKKHERHPIFGNIVDEVAYHEKYPTIYHLRKKLVDSTDKADLRLIYLALAHMIKFRGHFLIEGDLNPDNSDVDKLFIQLVQTYNQLFEENPINASGVDAKAILSARLSKSRRLENLIAQLPGEKKNGLFGNLIALSLGLTPNFKSNFDLAEDAKLQLSKDTYDDDLDNLLAQIGDQYADLFLAAKNLSDAILLSDILRVNTEITKAPLSASMIKRYDEHHQDLTLLKALVRQQLPEKYKEIFFDQSKNGYAGYIDGGASQEEFYKFIKPILEKMDGTEELLVKLNREDLLRKQRTFDNGSIPHQIHLGELHAILRRQEDFYPFLKDNREKIEKILTFRIPYYVGPLARGNSRFAWMTRKSEETITPWNFEEVVDKGASAQSFIERMTNFDKNLPNEKVLPKHSLLYEYFTVYNELTKVKYVTEGMRKPAFLSGEQKKAIVDLLFKTNRKVTVKQLKEDYFKKIECFDSVEISGVEDRFNASLGTYHDLLKIIKDKDFLDNEENEDILEDIVLTLTLFEDREMIEERLKTYAHLFDDKVMKQLKRRRYTGWGRLSRKLINGIRDKQSGKTILDFLKSDGFANRNFMQLIHDDSLTFKEDIQKAQVSGQGDSLHEHIANLAGSPAIKKGILQTVKVVDELVKVMGRHKPENIVIEMARENQTTQKGQKNSRERMKRIEEGIKELGSQILKEHPVENTQLQNEKLYLYYLQNGRDMYVDQELDINRLSDYDVDHIVPQSFLKDDSIDNKVLTRSDKARGKSDNVPSEEVVKKMKNYWRQLLNAKLITQRKFDNLTKAERGGLSELDKAGFIKRQLVETRQITKHVAQILDSRMNTKYDENDKLIREVKVITLKSKLVSDFRKDFQFYKVREINNYHHAHDAYLNAVVGTALIKKYPKLESEFVYGDYKVYDVRKMIAKSEQEIGKATAKYFFYSNIMNFFKTEITLANGEIRKRPLIETNGETGEIVWDKGRDFATVRKVLSMPQVNIVKKTEVQTGGFSKESILPKRNSDKLIARKKDWDPKKYGGFDSPTVAYSVLVVAKVEKGKSKKLKSVKELLGITIMERSSFEKNPIDFLEAKGYKEVKKDLIIKLPKYSLFELENGRKRMLASAGELQKGNELALPSKYVNFLYLASHYEKLKGSPEDNEQKQLFVEQHKHYLDEIIEQISEFSKRVILADANLDKVLSAYNKHRDKPIREQAENIIHLFTLTNLGAPAAFKYFDTTIDRKRYTSTKEVLDATLIHQSITGLYETRIDLSQLGGDGGGGSGGSGGSGGSGGSGGSGGTLNIEDEYRLHETSKGPDVPLGSTWLSDFPQAWAETGGMGLAFRQAPLIISLKATSTPVSIKQYPMSQEARLGIKPHIQRLLDQGILVPCQSPWNTPLLPVKKPGTNDYRPVQDLREVNKRVEDIHPTVPNPYNLLSGLPPSHQWYTVLDLKDAFFCLRLHPTSQSLFAFEWKDPEMGISGQLTWTRLPQGFKNSPTLFNEALHRDLADFRIQHPDLILLQYVDDLLLAATSELDCQQGTRALLQTLGDLGYRASAKKAQICQKQVKYLGYLLKEGQRWLTEARKETVMGQPTPKTPRQLREFLGKAGLCRLFIPGFAEMAAPLYPLTKPGTLFKWGPDQQKAYQEIKQALLTAPALGLPDLTKPFELFVDEKQGYAKGVLTQKLGPWRRPVAYLSKKLDPVAAGWPPCLRMVAAIAVLTKDVGKLTMGQPLVILAPHAVEALVKQPPDRWLSNARMTHYQALLLDTDRVQFGPIVALNPATLLPLPEEGLQHDCLDILAEAHGTRPDLTDQPLPDADHTWYTDGSSFLQEGQRRAGAAVTTETEVIWAKALPAGTSAQRAELIALTQALKMAAGKKLNVYTDSRYAFATAHIHGEIYRRRGWLTSEGKEIKNKDEILALLKALFLPKRLSIIHCPGHQKGNHAEARGNRMADQAAREVATRETPETSTLLAGKRTADGSEFEKRTADGSEFESPKKKAKVE

SEQ ID NO: 6096 - protein, 2103 aa, synthetic construct
MPAAKRVKLDGGDKKYSIGLDIGTNSVGWAVITDEYKVPSKKFKVLGNTDRHSIKKNLIGALLFDSGETAEATRLKRTARRRYTRRKNRICYLQEIFSNEMAKVDDSFFHRLEESFLVEEDKKHERHPIFGNIVDEVAYHEKYPTIYHLRKKLVDSTDKADLRLIYLALAHMIKFRGHFLIEGDLNPDNSDVDKLFIQLVQTYNQLFEENPINASGVDAKAILSARLSKSRRLENLIAQLPGEKKNGLFGNLIALSLGLTPNFKSNFDLAEDAKLQLSKDTYDDDLDNLLAQIGDQYADLFLAAKNLSDAILLSDILRVNTEITKAPLSASMIKRYDEHHQDLTLLKALVRQQLPEKYKEIFFDQSKNGYAGYIDGGASQEEFYKFIKPILEKMDGTEELLVKLNREDLLRKQRTFDNGSIPHQIHLGELHAILRRQEDFYPFLKDNREKIEKILTFRIPYYVGPLARGNSRFAWMTRKSEETITPWNFEEVVDKGASAQSFIERMTNFDKNLPNEKVLPKHSLLYEYFTVYNELTKVKYVTEGMRKPAFLSGEQKKAIVDLLFKTNRKVTVKQLKEDYFKKIECFDSVEISGVEDRFNASLGTYHDLLKIIKDKDFLDNEENEDILEDIVLTLTLFEDREMIEERLKTYAHLFDDKVMKQLKRRRYTGWGRLSRKLINGIRDKQSGKTILDFLKSDGFANRNFMQLIHDDSLTFKEDIQKAQVSGQGDSLHEHIANLAGSPAIKKGILQTVKVVDELVKVMGRHKPENIVIEMARENQTTQKGQKNSRERMKRIEEGIKELGSQILKEHPVENTQLQNEKLYLYYLQNGRDMYVDQELDINRLSDYDVDHIVPQSFLKDDSIDNKVLTRSDKARGKSDNVPSEEVVKKMKNYWRQLLNAKLITQRKFDNLTKAERGGLSELDKAGFIKRQLVETRQITKHVAQILDSRMNTKYDENDKLIREVKVITLKSKLVSDFRKDFQFYKVREINNYHHAHDAYLNAVVGTALIKKYPKLESEFVYGDYKVYDVRKMIAKSEQEIGKATAKYFFYSNIMNFFKTEITLANGEIRKRPLIETNGETGEIVWDKGRDFATVRKVLSMPQVNIVKKTEVQTGGFSKESILPKRNSDKLIARKKDWDPKKYGGFDSPTVAYSVLVVAKVEKGKSKKLKSVKELLGITIMERSSFEKNPIDFLEAKGYKEVKKDLIIKLPKYSLFELENGRKRMLASAGELQKGNELALPSKYVNFLYLASHYEKLKGSPEDNEQKQLFVEQHKHYLDEIIEQISEFSKRVILADANLDKVLSAYNKHRDKPIREQAENIIHLFTLTNLGAPAAFKYFDTTIDRKRYTSTKEVLDATLIHQSITGLYETRIDLSQLGGDGGGGSGGSGGSGGSGGSGGSGGTLNIEDEYRLHETSKGPDVPLGSTWLSDFPQAWAETGGMGLAVRQAPLIIPLKATSTPVSIKQYPMSQEARLGIKPHIQRLLDQGILVPCQSPWNTPLLPVKKPGTNDYRPVQDLREVNKRVEDIHPTVPNPYNLLSGLPPSHQWYTVLDLKDAFFCLRLHPTSQSLFAFEWRDPEMGISGQLTWTRLPQGFKNSPTLFNEALHRDLADFRIQHPDLILLQYVDDLLLAATSELDCQQGTRALLQTLGDLGYRASAKKAQICQKQVKYLGYLLKEGQRWLTEARKETVMGQPTPKTPRQLREFLGTAGFCRLWIPGFAEMAAPLYPLTKPGTLFEWGPDQQKAYQEIKQALLTAPALGLPDLTKPFELFVDEKQGYAKGVLTQKLGPWRRPVAYLSKKLDPVAAGWPPCLRMVAAIAVLTKDAGKLTMGQPLVILAPHAVEALVKQPPDRWLSNARMTHYQALLLDTDRVQFGPIVALNPATLLPLPEEGLQHDCLDILAEAHGTRPDLTDQPLPDADHTWYTDGSSFLQEGQRKAGAAVTTETEVVWAKALPAGTSAQRAELIALTQALKMAEGKKLNVYTDSRYAFATAHIHGEIYRRRGWLTSEGKEIKNKDEILALLKALFLPKRLSIIHCPGHQKGNRAEARGNRMADQAAREVATRETPETSTLLAGKRTADGSEFEKRTADGSEFESPKKKAKVE

SEQ ID NO: 6097 - protein, 2103 aa, synthetic construct
MPAAKRVKLDGGDKKYSIGLDIGTNSVGWAVITDEYKVPSKKFKVLGNTDRHSIKKNLIGALLFDSGETAEATRLKRTARRRYTRRKNRICYLQEIFSNEMAKVDDSFFHRLEESFLVEEDKKHERHPIFGNIVDEVAYHEKYPTIYHLRKKLVDSTDKADLRLIYLALAHMIKFRGHFLIEGDLNPDNSDVDKLFIQLVQTYNQLFEENPINASGVDAKAILSARLSKSRRLENLIAQLPGEKKNGLFGNLIALSLGLTPNFKSNFDLAEDAKLQLSKDTYDDDLDNLLAQIGDQYADLFLAAKNLSDAILLSDILRVNTEITKAPLSASMIKRYDEHHQDLTLLKALVRQQLPEKYKEIFFDQSKNGYAGYIDGGASQEEFYKFIKPILEKMDGTEELLVKLNREDLLRKQRTFDNGSIPHQIHLGELHAILRRQEDFYPFLKDNREKIEKILTFRIPYYVGPLARGNSRFAWMTRKSEETITPWNFEEVVDKGASAQSFIERMTNFDKNLPNEKVLPKHSLLYEYFTVYNELTKVKYVTEGMRKPAFLSGEQKKAIVDLLFKTNRKVTVKQLKEDYFKKIECFDSVEISGVEDRFNASLGTYHDLLKIIKDKDFLDNEENEDILEDIVLTLTLFEDREMIEERLKTYAHLFDDKVMKQLKRRRYTGWGRLSRKLINGIRDKQSGKTILDFLKSDGFANRNFMQLIHDDSLTFKEDIQKAQVSGQGDSLHEHIANLAGSPAIKKGILQTVKVVDELVKVMGRHKPENIVIEMARENQTTQKGQKNSRERMKRIEEGIKELGSQILKEHPVENTQLQNEKLYLYYLQNGRDMYVDQELDINRLSDYDVDHIVPQSFLKDDSIDNKVLTRSDKARGKSDNVPSEEVVKKMKNYWRQLLNAKLITQRKFDNLTKAERGGLSELDKAGFIKRQLVETRQITKHVAQILDSRMNTKYDENDKLIREVKVITLKSKLVSDFRKDFQFYKVREINNYHHAHDAYLNAVVGTALIKKYPKLESEFVYGDYKVYDVRKMIAKSEQEIGKATAKYFFYSNIMNFFKTEITLANGEIRKRPLIETNGETGEIVWDKGRDFATVRKVLSMPQVNIVKKTEVQTGGFSKESILPKRNSDKLIARKKDWDPKKYGGFDSPTVAYSVLVVAKVEKGKSKKLKSVKELLGITIMERSSFEKNPIDFLEAKGYKEVKKDLIIKLPKYSLFELENGRKRMLASAGELQKGNELALPSKYVNFLYLASHYEKLKGSPEDNEQKQLFVEQHKHYLDEIIEQISEFSKRVILADANLDKVLSAYNKHRDKPIREQAENIIHLFTLTNLGAPAAFKYFDTTIDRKRYTSTKEVLDATLIHQSITGLYETRIDLSQLGGDGGGGSGGSGGSGGSGGSGGSGGTLNIEDEHRLHETSKEPDVSLGSTWLSDFPQAWAETGGMGLAVRQAPLIIPLKATSTPVSIKQYPMSQEARLGIKPHIQRLLDQGILVPCQSPWNTPLLPVKKPGTNDYRPVQDLREVNKRVEDIHPTVPNPYNLLSGLPPSHQWYTVLDLKDAFFCLRLHPTSQPLFAFEWRDPEMGISGQLTWTRLPQGFKNSPTLFDEALHRDLADFRIQHPDLILLQYVDDLLLAATSELDCQQGTRALLQTLGNLGYRASAKKAQICQKQVKYLGYLLKEGQRWLTEARKETVMGQPTPKTPRQLREFLGTAGFCRLWIPGFAEMAAPLYPLTKTGTLFNWGPDQQKAYQEIKQALLTAPALGLPDLTKPFELFVDEKQGYAKGVLTQKLGPWRRPVAYLSKKLDPVAAGWPPCLRMVAAIAVLTKDAGKLTMGQPLVILAPHAVEALVKQPPDRWLSNARMTHYQALLLDTDRVQFGPVVALNPATLLPLPEEGLQHNCLDILAEAHGTRPDLTDQPLPDADHTWYTDGSSLLQEGQRKAGAAVTTETEVIWAKALPAGTSAQRAELIALTQALKMAEGKKLNVYTDSRYAFATAHIHGEIYRRRGLLTSEGKEIKNKDEILALLKALFLPKRLSIIHCPGHQKGHSAEARGNRMADQAARKAAITETPDTSTLLAGKRTADGSEFEKRTADGSEFESPKKKAKVE

SEQ ID NO: 6098 - protein, 2103 aa, synthetic construct
MPAAKRVKLDGGDKKYSIGLDIGTNSVGWAVITDEYKVPSKKFKVLGNTDRHSIKKNLIGALLFDSGETAEATRLKRTARRRYTRRKNRICYLQEIFSNEMAKVDDSFFHRLEESFLVEEDKKHERHPIFGNIVDEVAYHEKYPTIYHLRKKLVDSTDKADLRLIYLALAHMIKFRGHFLIEGDLNPDNSDVDKLFIQLVQTYNQLFEENPINASGVDAKAILSARLSKSRRLENLIAQLPGEKKNGLFGNLIALSLGLTPNFKSNFDLAEDAKLQLSKDTYDDDLDNLLAQIGDQYADLFLAAKNLSDAILLSDILRVNTEITKAPLSASMIKRYDEHHQDLTLLKALVRQQLPEKYKEIFFDQSKNGYAGYIDGGASQEEFYKFIKPILEKMDGTEELLVKLNREDLLRKQRTFDNGSIPHQIHLGELHAILRRQEDFYPFLKDNREKIEKILTFRIPYYVGPLARGNSRFAWMTRKSEETITPWNFEEVVDKGASAQSFIERMTNFDKNLPNEKVLPKHSLLYEYFTVYNELTKVKYVTEGMRKPAFLSGEQKKAIVDLLFKTNRKVTVKQLKEDYFKKIECFDSVEISGVEDRFNASLGTYHDLLKIIKDKDFLDNEENEDILEDIVLTLTLFEDREMIEERLKTYAHLFDDKVMKQLKRRRYTGWGRLSRKLINGIRDKQSGKTILDFLKSDGFANRNFMQLIHDDSLTFKEDIQKAQVSGQGDSLHEHIANLAGSPAIKKGILQTVKVVDELVKVMGRHKPENIVIEMARENQTTQKGQKNSRERMKRIEEGIKELGSQILKEHPVENTQLQNEKLYLYYLQNGRDMYVDQELDINRLSDYDVDHIVPQSFLKDDSIDNKVLTRSDKARGKSDNVPSEEVVKKMKNYWRQLLNAKLITQRKFDNLTKAERGGLSELDKAGFIKRQLVETRQITKHVAQILDSRMNTKYDENDKLIREVKVITLKSKLVSDFRKDFQFYKVREINNYHHAHDAYLNAVVGTALIKKYPKLESEFVYGDYKVYDVRKMIAKSEQEIGKATAKYFFYSNIMNFFKTEITLANGEIRKRPLIETNGETGEIVWDKGRDFATVRKVLSMPQVNIVKKTEVQTGGFSKESILPKRNSDKLIARKKDWDPKKYGGFDSPTVAYSVLVVAKVEKGKSKKLKSVKELLGITIMERSSFEKNPIDFLEAKGYKEVKKDLIIKLPKYSLFELENGRKRMLASAGELQKGNELALPSKYVNFLYLASHYEKLKGSPEDNEQKQLFVEQHKHYLDEIIEQISEFSKRVILADANLDKVLSAYNKHRDKPIREQAENIIHLFTLTNLGAPAAFKYFDTTIDRKRYTSTKEVLDATLIHQSITGLYETRIDLSQLGGDGGGGSGGSGGSGGSGGSGGSGGTLNIEDEHRLHETSKEPDVSLGSTWLSDFPQAWAETGGMGLAVRQAPLIIPLKATSTPVSIKQYPMSQEARLGIKPHIQRLLDQGILVPCQSPWNTPLLPVKKPGTNDYRPVQDLREVNKRVEDIHPTVPNPYNLLSGLPPSHQWYTVLDLKDAFFCLRLHPTSQPLFAFEWRDPEMGISGQLTWTRLPQGFKNSPTLFNEALHRDLADFRIQHPDLILLQYVDDLLLAATSELDCQQGTRALLQTLGNLGYRASAKKAQICQKQVKYLGYLLKEGQRWLTEARKETVMGQPTPKTPRQLREFLGTAGFCRLWIPGFAEMAAPLYPLTKPGTLFNWGPDQQKAYQEIKQALLTAPALGLPDLTKPFELFVDEKQGYAKGVLTQKLGPWRRPVAYLSKKLDPVAAGWPPCLRMVAAIAVLTKDAGKLTMGQPLVILAPHAVEALVKQPPDRWLSNARMTHYQALLLDTDRVQFGPVVALNPATLLPLPEEGLQHNCLDILAEAHGTRPDLTDQPLPDADHTWYTDGSSLLQEGQRKAGAAVTTETEVIWAKALPAGTSAQRAELIALTQALKMAEGKKLNVYTDSRYAFATAHIHGEIYRRRGWLTSEGKEIKNKDEILALLKALFLPKRLSIIHCPGHQKGHSAEARGNRMADQAARKAAITETPDTSTLLAGKRTADGSEFEKRTADGSEFESPKKKAKVE

SEQ ID NO: 6099 - protein, 2103 aa, synthetic construct; identical to SEQ ID NO: 6098

SEQ ID NO: 6100 - protein, 2017 aa, synthetic construct
MPAAKRVKLDGGDKKYSIGLDIGTNSVGWAVITDEYKVPSKKFKVLGNTDRHSIKKNLIGALLFDSGETAEATRLKRTARRRYTRRKNRICYLQEIFSNEMAKVDDSFFHRLEESFLVEEDKKHERHPIFGNIVDEVAYHEKYPTIYHLRKKLVDSTDKADLRLIYLALAHMIKFRGHFLIEGDLNPDNSDVDKLFIQLVQTYNQLFEENPINASGVDAKAILSARLSKSRRLENLIAQLPGEKKNGLFGNLIALSLGLTPNFKSNFDLAEDAKLQLSKDTYDDDLDNLLAQIGDQYADLFLAAKNLSDAILLSDILRVNTEITKAPLSASMIKRYDEHHQDLTLLKALVRQQLPEKYKEIFFDQSKNGYAGYIDGGASQEEFYKFIKPILEKMDGTEELLVKLNREDLLRKQRTFDNGSIPHQIHLGELHAILRRQEDFYPFLKDNREKIEKILTFRIPYYVGPLARGNSRFAWMTRKSEETITPWNFEEVVDKGASAQSFIERMTNFDKNLPNEKVLPKHSLLYEYFTVYNELTKVKYVTEGMRKPAFLSGEQKKAIVDLLFKTNRKVTVKQLKEDYFKKIECFDSVEISGVEDRFNASLGTYHDLLKIIKDKDFLDNEENEDILEDIVLTLTLFEDREMIEERLKTYAHLFDDKVMKQLKRRRYTGWGRLSRKLINGIRDKQSGKTILDFLKSDGFANRNFMQLIHDDSLTFKEDIQKAQVSGQGDSLHEHIANLAGSPAIKKGILQTVKVVDELVKVMGRHKPENIVIEMARENQTTQKGQKNSRERMKRIEEGIKELGSQILKEHPVENTQLQNEKLYLYYLQNGRDMYVDQELDINRLSDYDVDHIVPQSFLKDDSIDNKVLTRSDKARGKSDNVPSEEVVKKMKNYWRQLLNAKLITQRKFDNLTKAERGGLSELDKAGFIKRQLVETRQITKHVAQILDSRMNTKYDENDKLIREVKVITLKSKLVSDFRKDFQFYKVREINNYHHAHDAYLNAVVGTALIKKYPKLESEFVYGDYKVYDVRKMIAKSEQEIGKATAKYFFYSNIMNFFKTEITLANGEIRKRPLIETNGETGEIVWDKGRDFATVRKVLSMPQVNIVKKTEVQTGGFSKESILPKRNSDKLIARKKDWDPKKYGGFDSPTVAYSVLVVAKVEKGKSKKLKSVKELLGITIMERSSFEKNPIDFLEAKGYKEVKKDLIIKLPKYSLFELENGRKRMLASAGELQKGNELALPSKYVNFLYLASHYEKLKGSPEDNEQKQLFVEQHKHYLDEIIEQISEFSKRVILADANLDKVLSAYNKHRDKPIREQAENIIHLFTLTNLGAPAAFKYFDTTIDRKRYTSTKEVLDATLIHQSITGLYETRIDLSQLGGDGGGGSGGSGGSGGSGGSGGSGGLTAAIDILAPQQCAEPITWKSDEPVWVDQWPLTNDKLAAAQQLVQEQLEAGHITESSSPWNTPIFVIKKKSGKWRLLQDLRAVNATMVLMGALQPGLPSPVAPPQGYLKIIIDLKDCFFSIPLHPSDQKRFAFSLPSTNFKEPMQRFQWKVLPQGMANSPTLCQKYVATAIHKVRHAWKQMYIIHYMDDILIAGKDGQQVLQCFDQLKQELTAAGLHIAPEKVQLQDPYTYLGFELNGPKITNQKAVIRKDKLQTLNDFQKLLGDINWLRPYLKLTTGDLKPLFDTLKPDSDPNSHRSLSKEALASLEKVETAIAEQFVTHINYSLPLIFLIFNTALTPTGLFWQDNPIMWIHLPASPKKVLLPYYDAIADLIILGRDHSKKYFGIEPSTIIQPYSKSQIDWLMQNTEMWPIACASFVGILDNHYPPNKLIQFCKLHTFVFPQIISKTPLNNALLVFTDGSSTGMAAYTLTDTTIKFQTNLNSAQLVELQALIAVLSAFPNQPLNIYTDSAYLAHSIPLLETVAQIKHISETAKLFLQCQQLIYNRSIPFYIGHVRAHSGLPGPIAQGNQRADLATKIVASNINTAGKRTADGSEFEKRTADGSEFESPKKKAKVE

SEQ ID NO: 6101 - protein, 2183 aa, synthetic construct
MPAAKRVKLDGGDKKYSIGLDIGTNSVGWAVITDEYKVPSKKFKVLGNTDRHSIKKNLIGALLFDSGETAEATRLKRTARRRYTRRKNRICYLQEIFSNEMAKVDDSFFHRLEESFLVEEDKKHERHPIFGNIVDEVAYHEKYPTIYHLRKKLVDSTDKADLRLIYLALAHMIKFRGHFLIEGDLNPDNSDVDKLFIQLVQTYNQLFEENPINASGVDAKAILSARLSKSRRLENLIAQLPGEKKNGLFGNLIALSLGLTPNFKSNFDLAEDAKLQLSKDTYDDDLDNLLAQIGDQYADLFLAAKNLSDAILLSDILRVNTEITKAPLSASMIKRYDEHHQDLTLLKALVRQQLPEKYKEIFFDQSKNGYAGYIDGGASQEEFYKFIKPILEKMDGTEELLVKLNREDLLRKQRTFDNGSIPHQIHLGELHAILRRQEDFYPFLKDNREKIEKILTFRIPYYVGPLARGNSRFAWMTRKSEETITPWNFEEVVDKGASAQSFIERMTNFDKNLPNEKVLPKHSLLYEYFTVYNELTKVKYVTEGMRKPAFLSGEQKKAIVDLLFKTNRKVTVKQLKEDYFKKIECFDSVEISGVEDRFNASLGTYHDLLKIIKDKDFLDNEENEDILEDIVLTLTLFEDREMIEERLKTYAHLFDDKVMKQLKRRRYTGWGRLSRKLINGIRDKQSGKTILDFLKSDGFANRNFMQLIHDDSLTFKEDIQKAQVSGQGDSLHEHIANLAGSPAIKKGILQTVKVVDELVKVMGRHKPENIVIEMARENQTTQKGQKNSRERMKRIEEGIKELGSQILKEHPVENTQLQNEKLYLYYLQNGRDMYVDQELDINRLSDYDVDHIVPQSFLKDDSIDNKVLTRSDKARGKSDNVPSEEVVKKMKNYWRQLLNAKLITQRKFDNLTKAERGGLSELDKAGFIKRQLVETRQITKHVAQILDSRMNTKYDENDKLIREVKVITLKSKLVSDFRKDFQFYKVREINNYHHAHDAYLNAVVGTALIKKYPKLESEFVYGDYKVYDVRKMIAKSEQEIGKATAKYFFYSNIMNFFKTEITLANGEIRKRPLIETNGETGEIVWDKGRDFATVRKVLSMPQVNIVKKTEVQTGGFSKESILPKRNSDKLIARKKDWDPKKYGGFDSPTVAYSVLVVAKVEKGKSKKLKSVKELLGITIMERSSFEKNPIDFLEAKGYKEVKKDLIIKLPKYSLFELENGRKRMLASAGELQKGNELALPSKYVNFLYLASHYEKLKGSPEDNEQKQLFVEQHKHYLDEIIEQISEFSKRVILADANLDKVLSAYNKHRDKPIREQAENIIHLFTLTNLGAPAAFKYFDTTIDRKRYTSTKEVLDATLIHQSITGLYETRIDLSQLGGDGGGGSGGSGGSGGSGGSGGSGGMDPLQLLQPLEAEIKGTKLKAHWNSGATITCVPQAFLEEEVPIKNIWIKTIHGEKEQPVYYLTFKIQGRKVEAEVISSPYDYILVSPSDIPWLMKKPLQLTTLVPLQEYEERLLKQTMLTGSYKEKLQSLFLKYDALWQHWENQVGHRRIKPHHIATGTVNPRPQKQYPINPKAKASIQTVINDLLKQGVLIQQNSIMNTPVYPVPKPDGKWRMVLDYREVNKTIPLIAAQNQHSAGILSSIFRGKYKTTLDLSNGFWAHSITPESYWLTAFTWLGQQYCWTRLPQGFLNSPALFTADVVDLLKEVPNVQVYVDDIYISHDDPREHLEQLEKVFSLLLNAGYVVSLKKSEIAQHEVEFLGFNITKEGRGLTETFKQKLLNITPPRDLKQLQSILGLLNFARNFIPNFSELVKPLYNIIATANGKYITWTTDNSQQLQNIISMLNSAENLEERNPEVRLIMKVNTSPSAGYIRFYNEFAKRPIMYLNYVYTKAEVKFTNTEKLLTTIHKGLIKALDLGMGQEILVYSPIVSMTKIQKTPLPERKALPIRWITWMSYLEDPRIQFHYDKTLPELQQVPTVTDDIIAKIKHPSEFSMVFYTDGSAIKHPNVNKSHNAGMGIAQVQFKPEFTVINTWSIPLGDHTAQLAEVAAVEFACKKALKIDGPVLIVTDSFYVAESVNKELPYWQSNGFFNNKKKPLKHVSKWKSIADCIQLKPDIIIIHEKGHQPTASTFHTEGNNLADKLATQGSYVVNAGKRTADGSEFEKRTADGSEFESPKKKAKVE

SEQ ID NO: 6102 - protein, 2094 aa, synthetic construct
MPAAKRVKLDGGDKKYSIGLDIGTNSVGWAVITDEYKVPSKKFKVLGNTDRHSIKKNLIGALLFDSGETAEATRLKRTARRRYTRRKNRICYLQEIFSNEMAKVDDSFFHRLEESFLVEEDKKHERHPIFGNIVDEVAYHEKYPTIYHLRKKLVDSTDKADLRLIYLALAHMIKFRGHFLIEGDLNPDNSDVDKLFIQLVQTYNQLFEENPINASGVDAKAILSARLSKSRRLENLIAQLPGEKKNGLFGNLIALSLGLTPNFKSNFDLAEDAKLQLSKDTYDDDLDNLLAQIGDQYADLFLAAKNLSDAILLSDILRVNTEITKAPLSASMIKRYDEHHQDLTLLKALVRQQLPEKYKEIFFDQSKNGYAGYIDGGASQEEFYKFIKPILEKMDGTEELLVKLNREDLLRKQRTFDNGSIPHQIHLGELHAILRRQEDFYPFLKDNREKIEKILTFRIPYYVGPLARGNSRFAWMTRKSEETITPWNFEEVVDKGASAQSFIERMTNFDKNLPNEKVLPKHSLLYEYFTVYNELTKVKYVTEGMRKPAFLSGEQKKAIVDLLFKTNRKVTVKQLKEDYFKKIECFDSVEISGVEDRFNASLGTYHDLLKIIKDKDFLDNEENEDILEDIVLTLTLFEDREMIEERLKTYAHLFDDKVMKQLKRRRYTGWGRLSRKLINGIRDKQSGKTILDFLKSDGFANRNFMQLIHDDSLTFKEDIQKAQVSGQGDSLHEHIANLAGSPAIKKGILQTVKVVDELVKVMGRHKPENIVIEMARENQTTQKGQKNSRERMKRIEEGIKELGSQILKEHPVENTQLQNEKLYLYYLQNGRDMYVDQELDINRLSDYDVDHIVPQSFLKDDSIDNKVLTRSDKARGKSDNVPSEEVVKKMKNYWRQLLNAKLITQRKFDNLTKAERGGLSELDKAGFIKRQLVETRQITKHVAQILDSRMNTKYDENDKLIREVKVITLKSKLVSDFRKDFQFYKVREINNYHHAHDAYLNAVVGTALIKKYPKLESEFVYGDYKVYDVRKMIAKSEQEIGKATAKYFFYSNIMNFFKTEITLANGEIRKRPLIETNGETGEIVWDKGRDFATVRKVLSMPQVNIVKKTEVQTGGFSKESILPKRNSDKLIARKKDWDPKKYGGFDSPTVAYSVLVVAKVEKGKSKKLKSVKELLGITIMERSSFEKNPIDFLEAKGYKEVKKDLIIKLPKYSLFELENGRKRMLASAGELQKGNELALPSKYVNFLYLASHYEKLKGSPEDNEQKQLFVEQHKHYLDEIIEQISEFSKRVILADANLDKVLSAYNKHRDKPIREQAENIIHLFTLTNLGAPAAFKYFDTTIDRKRYTSTKEVLDATLIHQSITGLYETRIDLSQLGGDGGGGSGGSGGSGGSGGSGGSGGIPWLMKKPLQLTTLVPLQEYEERLLKQTMLTGSYKEKLQSLFLKYDALWQHWENQVGHRRIKPHHIATGTVNPRPQKQYPINPKAKASIQTVINDLLKQGVLIQQNSIMNTPVYPVPKPDGKWRMVLDYREVNKTIPLIAAQNQHSAGILSSIFRGKYKTTLDLSNGFWAHSITPESYWLTAFTWLGQQYCWTRLPQGFLNSPALFNADVVDLLKEVPNVQVYVDDIYISHDDPREHLEQLEKVFSLLLNAGYVVSLKKSEIAQHEVEFLGFNITKEGRGLTETFKQKLLNITPPRDLKQLQSILGLLNFARNFIPNFSELVKPLYNIIATAPGKYITWTTDNSQQLQNIISMLNSAENLEERNPEVRLIMKVNTSPSAGYIRFYNEFAKRPIMYLNYVYTKAEVKFTNTEKLLTTIHKGLIKALDLGMGQEILVYSPIVSMTKIQKTPLPERKALPIRWITWMSYLEDPRIQFHYDKTLPELQQVPTVTDDIIAKIKHPSEFSMVFYTDGSAIKHPNVNKSHNAGMGIAQVQFKPEFTVINTWSIPLGDHTAQLAEVAAVEFACKKALKIDGPVLIVTDSFYVAESVNKELPYWQSNGFFNNKKKPLKHVSKWKSIADCIQLKPDIIIIHEKGHQPTASTFHTEGNNLADKLATQGSYVVNAGKRTADGSEFEKRTADGSEFESPKKKAKVE

SEQ ID NO: 6103 - protein, 2094 aa, synthetic construct
MPAAKRVKLDGGDKKYSIGLDIGTNSVGWAVITDEYKVPSKKFKVLGNTDRHSIKKNLIGALLFDSGETAEATRLKRTARRRYTRRKNRICYLQEIFSNEMAKVDDSFFHRLEESFLVEEDKKHERHPIFGNIVDEVAYHEKYPTIYHLRKKLVDSTDKADLRLIYLALAHMIKFRGHFLIEGDLNPDNSDVDKLFIQLVQTYNQLFEENPINASGVDAKAILSARLSKSRRLENLIAQLPGEKKNGLFGNLIALSLGLTPNFKSNFDLAEDAKLQLSKDTYDDDLDNLLAQIGDQYADLFLAAKNLSDAILLSDILRVNTEITKAPLSASMIKRYDEHHQDLTLLKALVRQQLPEKYKEIFFDQSKNGYAGYIDGGASQEEFYKFIKPILEKMDGTEELLVKLNREDLLRKQRTFDNGSIPHQIHLGELHAILRRQEDFYPFLKDNREKIEKILTFRIPYYVGPLARGNSRFAWMTRKSEETITPWNFEEVVDKGASAQSFIERMTNFDKNLPNEKVLPKHSLLYEYFTVYNELTKVKYVTEGMRKPAFLSGEQKKAIVDLLFKTNRKVTVKQLKEDYFKKIECFDSVEISGVEDRFNASLGTYHDLLKIIKDKDFLDNEENEDILEDIVLTLTLFEDREMIEERLKTYAHLFDDKVMKQLKRRRYTGWGRLSRKLINGIRDKQSGKTILDFLKSDGFANRNFMQLIHDDSLTFKEDIQKAQVSGQGDSLHEHIANLAGSPAIKKGILQTVKVVDELVKVMGRHKPENIVIEMARENQTTQKGQKNSRERMKRIEEGIKELGSQILKEHPVENTQLQNEKLYLYYLQNGRDMYVDQELDINRLSDYDVDHIVPQSFLKDDSIDNKVLTRSDKARGKSDNVPSEEVVKKMKNYWRQLLNAKLITQRKFDNLTKAERGGLSELDKAGFIKRQLVETRQITKHVAQILDSRMNTKYDENDKLIREVKVITLKSKLVSDFRKDFQFYKVREINNYHHAHDAYLNAVVGTALIKKYPKLESEFVYGDYKVYDVRKMIAKSEQEIGKATAKYFFYSNIMNFFKTEITLANGEIRKRPLIETNGETGEIVWDKGRDFATVRKVLSMPQVNIVKKTEVQTGGFSKESILPKRNSDKLIARKKDWDPKKYGGFDSPTVAYSVLVVAKVEKGKSKKLKSVKELLGITIMERSSFEKNPIDFLEAKGYKEVKKDLIIKLPKYSLFELENGRKRMLASAGELQKGNELALPSKYVNFLYLASHYEKLKGSPEDNEQKQLFVEQHKHYLDEIIEQISEFSKRVILADANLDKVLSAYNKHRDKPIREQAENIIHLFTLTNLGAPAAFKYFDTTIDRKRYTSTKEVLDATLIHQSITGLYETRIDLSQLGGDGGGGSGGSGGSGGSGGSGGSGGIPWLMKKPLQLTTLVPLQEYEERLLKQTMLTGSYKEKLQSLFLKYDALWQHWENQVGHRRIKPHHIATGTVNPRPQKQYPINPKAKASIQTVINDLLKQGVLIQQNSIMNTPVYPVPKPDGKWRMVLDYREVNKTIPLIAAQNQHSAGILSSIFRGKYKTTLDLSNGFWAHSITPESYWLTAFTWLGQQYCWTRLPQGFLNSPALFNADVVDLLKEVPNVQVYVDDIYISHDDPREHLEQLEKVFSLLLNAGYVVSLKKSEIAQHEVEFLGFNITKEGRGLTETFKQKLLNITPPRDLKQLQSILGKLNFARNFIPNFSELVKPLYNIIATAPGKYITWTTDNSQQLQNIISMLNSAENLEERNPEVRLIMKVNTSPSAGYIRFYNEFAKRPIMYLNYVYTKAEVKFTNTEKLLTTIHKGLIKALDLGMGQEILVYSPIVSMTKIQKTPLPERKALPIRWITWMSYLEDPRIQFHYDKTLPELQQVPTVTDDIIAKIKHPSEFSMVFYTDGSAIKHPNVNKSHNAGMGIAQVQFKPEFTVINTWSIPLGDHTAQLAEVAAVEFACKKALKIDGPVLIVTDSFYVAESVNKELPYWQSNGFFNNKKKPLKHVSKWKSIADCIQLKPDIIIIHEKGHQPTASTFHTEGNNLADKLATQGSYVVNAGKRTADGSEFEKRTADGSEFESPKKKAKVE

SEQ ID NO: 6104 - protein, 2024 aa, synthetic construct
MPAAKRVKLDGGDKKYSIGLDIGTNSVGWAVITDEYKVPSKKFKVLGNTDRHSIKKNLIGALLFDSGETAEATRLKRTARRRYTRRKNRICYLQEIFSNEMAKVDDSFFHRLEESFLVEEDKKHERHPIFGNIVDEVAYHEKYPTIYHLRKKLVDSTDKADLRLIYLALAHMIKFRGHFLIEGDLNPDNSDVDKLFIQLVQTYNQLFEENPINASGVDAKAILSARLSKSRRLENLIAQLPGEKKNGLFGNLIALSLGLTPNFKSNFDLAEDAKLQLSKDTYDDDLDNLLAQIGDQYADLFLAAKNLSDAILLSDILRVNTEITKAPLSASMIKRYDEHHQDLTLLKALVRQQLPEKYKEIFFDQSKNGYAGYIDGGASQEEFYKFIKPILEKMDGTEELLVKLNREDLLRKQRTFDNGSIPHQIHLGELHAILRRQEDFYPFLKDNREKIEKILTFRIPYYVGPLARGNSRFAWMTRKSEETITPWNFEEVVDKGASAQSFIERMTNFDKNLPNEKVLPKHSLLYEYFTVYNELTKVKYVTEGMRKPAFLSGEQKKAIVDLLFKTNRKVTVKQLKEDYFKKIECFDSVEISGVEDRFNASLGTYHDLLKIIKDKDFLDNEENEDILEDIVLTLTLFEDREMIEERLKTYAHLFDDKVMKQLKRRRYTGWGRLSRKLINGIRDKQSGKTILDFLKSDGFANRNFMQLIHDDSLTFKEDIQKAQVSGQGDSLHEHIANLAGSPAIKKGILQTVKVVDELVKVMGRHKPENIVIEMARENQTTQKGQKNSRERMKRIEEGIKELGSQILKEHPVENTQLQNEKLYLYYLQNGRDMYVDQELDINRLSDYDVDHIVPQSFLKDDSIDNKVLTRSDKARGKSDNVPSEEVVKKMKNYWRQLLNAKLITQRKFDNLTKAERGGLSELDKAGFIKRQLVETRQITKHVAQILDSRMNTKYDENDKLIREVKVITLKSKLVSDFRKDFQFYKVREINNYHHAHDAYLNAVVGTALIKKYPKLESEFVYGDYKVYDVRKMIAKSEQEIGKATAKYFFYSNIMNFFKTEITLANGEIRKRPLIETNGETGEIVWDKGRDFATVRKVLSMPQVNIVKKTEVQTGGFSKESILPKRNSDKLIARKKDWDPKKYGGFDSPTVAYSVLVVAKVEKGKSKKLKSVKELLGITIMERSSFEKNPIDFLEAKGYKEVKKDLIIKLPKYSLFELENGRKRMLASAGELQKGNELALPSKYVNFLYLASHYEKLKGSPEDNEQKQLFVEQHKHYLDEIIEQISEFSKRVILADANLDKVLSAYNKHRDKPIREQAENIIHLFTLTNLGAPAAFKYFDTTIDRKRYTSTKEVLDATLIHQSITGLYETRIDLSQLGGDGGGGSGGSGGSGGSGGSGGSGGPRSRAIDIPVPHADKISWKITDPVWVDQWPLTYEKTLAAIALVQEQLAAGHIEPTNSPWNTPIFIIKKKSGSWRLLQDLRAVNKVMVPMGALQPGLPSPVAIPLNYHKIVIDLKDCFFTIPLHPEDRPYFAFSVPQINFQSPMPRYQWKVLPQGMANSPTLCQKFVAAAIAPVRSQWPEAYILHYMDDILLACDSAEAAKACYAHIISCLTSYGLKIAPDKVQVSEPFSYLGFELHHQQVFTPRVCLKTDHLKTLNDFQKLLGDIQWLRPYLKLPTSALVPLNNILKGDPNPLSVRALTPEAKQSLALINKAIQNQSVQQISYNLPLVLLLLPTPHTPTAVFWQPNGTDPTKNGSPLLWLHLPASPSKVLLTYPSLLAMLIIKGRYTGRQLFGRDPHSIIIPYTQDQLTWLLQTSDEWAIALSSFTGDIDNHYPSDPVIQFAKLHQFIFPKITKCAPIPQATLVFTDGSSNGIAAYVIDNQPISIKSPYLSAQLVELYAILQVFTVLAHQPFNLYTDSAYIAQSVPLLETVPFIKSSTNATPLFSKLQQLILNRQHPFFIGHLRAHLNLPGPLAEGNALADAATQIFPIISDAGKRTADGSEFEKRTADGSEFESPKKKAKVE

SEQ ID NO: 6105 - protein, 2101 aa, synthetic construct
MPAAKRVKLDGGDKKYSIGLDIGTNSVGWAVITDEYKVPSKKFKVLGNTDRHSIKKNLIGALLFDSGETAEATRLKRTARRRYTRRKNRICYLQEIFSNEMAKVDDSFFHRLEESFLVEEDKKHERHPIFGNIVDEVAYHEKYPTIYHLRKKLVDSTDKADLRLIYLALAHMIKFRGHFLIEGDLNPDNSDVDKLFIQLVQTYNQLFEENPINASGVDAKAILSARLSKSRRLENLIAQLPGEKKNGLFGNLIALSLGLTPNFKSNFDLAEDAKLQLSKDTYDDDLDNLLAQIGDQYADLFLAAKNLSDAILLSDILRVNTEITKAPLSASMIKRYDEHHQDLTLLKALVRQQLPEKYKEIFFDQSKNGYAGYIDGGASQEEFYKFIKPILEKMDGTEELLVKLNREDLLRKQRTFDNGSIPHQIHLGELHAILRRQEDFYPFLKDNREKIEKILTFRIPYYVGPLARGNSRFAWMTRKSEETITPWNFEEVVDKGASAQSFIERMTNFDKNLPNEKVLPKHSLLYEYFTVYNELTKVKYVTEGMRKPAFLSGEQKKAIVDLLFKTNRKVTVKQLKEDYFKKIECFDSVEISGVEDRFNASLGTYHDLLKIIKDKDFLDNEENEDILEDIVLTLTLFEDREMIEERLKTYAHLFDDKVMKQLKRRRYTGWGRLSRKLINGIRDKQSGKTILDFLKSDGFANRNFMQLIHDDSLTFKEDIQKAQVSGQGDSLHEHIANLAGSPAIKKGILQTVKVVDELVKVMGRHKPENIVIEMARENQTTQKGQKNSRERMKRIEEGIKELGSQILKEHPVENTQLQNEKLYLYYLQNGRDMYVDQELDINRLSDYDVDHIVPQSFLKDDSIDNKVLTRSDKARGKSDNVPSEEVVKKMKNYWRQLLNAKLITQRKFDNLTKAERGGLSELDKAGFIKRQLVETRQITKHVAQILDSRMNTKYDENDKLIREVKVITLKSKLVSDFRKDFQFYKVREINNYHHAHDAYLNAVVGTALIKKYPKLESEFVYGDYKVYDVRKMIAKSEQEIGKATAKYFFYSNIMNFFKTEITLANGEIRKRPLIETNGETGEIVWDKGRDFATVRKVLSMPQVNIVKKTEVQTGGFSKESILPKRNSDKLIARKKDWDPKKYGGFDSPTVAYSVLVVAKVEKGKSKKLKSVKELLGITIMERSSFEKNPIDFLEAKGYKEVKKDLIIKLPKYSLFELENGRKRMLASAGELQKGNELALPSKYVNFLYLASHYEKLKGSPEDNEQKQLFVEQHKHYLDEIIEQISEFSKRVILADANLDKVLSAYNKHRDKPIREQAENIIHLFTLTNLGAPAAFKYFDTTIDRKRYTSTKEVLDATLIHQSITGLYETRIDLSQLGGDGGGGSGGSGGSGGSGGSGGSGGVLNLEEEYRLHEKPVPSSIDPSWLQLFPTVWAERAGMGLANQVPPVVVELRSGASPVAVRQYPMSKEAREGIRPHIQRFLDLGVLVPCQSPWNTPLLPVKKPGTNDYRPVQDLREINKRVQDIHPTVPNPYNLLSSLPPSHTWYSVLDLKDAFFCLKLHPNSQPLFAFEWRDPEKGNTGQLTWTRLPQGFKNSPTLFDEALHRDLAPFRALNPQVVLLQYVDDLLVAAPTYRDCKEGTQKLLQELSKLGYRVSAKKAQLCQKEVTYLGYLLKEGKRWLTPARKATVMKIPPPTTPRQVREFLGTAGFCRLWIPGFASLAAPLYPLTKESIPFIWTEEHQKAFDRIKEALLSAPALALPDLTKPFTLYVDERAGVARGVLTQTLGPWRRPVAYLSKKLDPVASGWPTCLKAVAAVALLLKDADKLTLGQNVTVIASHSLESIVRQPPDRWMTNARMTHYQSLLLNERVSFAPPAVLNPATLLPVESEATPVHRCSEILAEETGTRRDLKDQPLPGVPAWYTDGSSFIAEGKRRAGAAIVDGKRTVWASSLPEGTSAQKAELVALTQALRLAEGKDINIYTDSRYAFATAHIHGAIYKQRGLLTSAGKDIKNKEEILALLEAIHLPKRVAIIHCPGHQKGNDPVATGNRRADEAAKQAALSTRVLAETTKPAGKRTADGSEFEKRTADGSEFESPKKKAKVE

SEQ ID NO: 6106 - protein, 2101 aa, synthetic construct
MPAAKRVKLDGGDKKYSIGLDIGTNSVGWAVITDEYKVPSKKFKVLGNTDRHSIKKNLIGALLFDSGETAEATRLKRTARRRYTRRKNRICYLQEIFSNEMAKVDDSFFHRLEESFLVEEDKKHERHPIFGNIVDEVAYHEKYPTIYHLRKKLVDSTDKADLRLIYLALAHMIKFRGHFLIEGDLNPDNSDVDKLFIQLVQTYNQLFEENPINASGVDAKAILSARLSKSRRLENLIAQLPGEKKNGLFGNLIALSLGLTPNFKSNFDLAEDAKLQLSKDTYDDDLDNLLAQIGDQYADLFLAAKNLSDAILLSDILRVNTEITKAPLSASMIKRYDEHHQDLTLLKALVRQQLPEKYKEIFFDQSKNGYAGYIDGGASQEEFYKFIKPILEKMDGTEELLVKLNREDLLRKQRTFDNGSIPHQIHLGELHAILRRQEDFYPFLKDNREKIEKILTFRIPYYVGPLARGNSRFAWMTRKSEETITPWNFEEVVDKGASAQSFIERMTNFDKNLPNEKVLPKHSLLYEYFTVYNELTKVKYVTEGMRKPAFLSGEQKKAIVDLLFKTNRKVTVKQLKEDYFKKIECFDSVEISGVEDRFNASLGTYHDLLKIIKDKDFLDNEENEDILEDIVLTLTLFEDREMIEERLKTYAHLFDDKVMKQLKRRRYTGWGRLSRKLINGIRDKQSGKTILDFLKSDGFANRNFMQLIHDDSLTFKEDIQKAQVSGQGDSLHEHIANLAGSPAIKKGILQTVKVVDELVKVMGRHKPENIVIEMARENQTTQKGQKNSRERMKRIEEGIKELGSQILKEHPVENTQLQNEKLYLYYLQNGRDMYVDQELDINRLSDYDVDHIVPQSFLKDDSIDNKVLTRSDKARGKSDNVPSEEVVKKMKNYWRQLLNAKLITQRKFDNLTKAERGGLSELDKAGFIKRQLVETRQITKHVAQILDSRMNTKYDENDKLIREVKVITLKSKLVSDFRKDFQFYKVREINNYHHAHDAYLNAVVGTALIKKYPKLESEFVYGDYKVYDVRKMIAKSEQEIGKATAKYFFYSNIMNFFKTEITLANGEIRKRPLIETNGETGEIVWDKGRDFATVRKVLSMPQVNIVKKTEVQTGGFSKESILPKRNSDKLIARKKDWDPKKYGGFDSPTVAYSVLVVAKVEKGKSKKLKSVKELLGITIMERSSFEKNPIDFLEAKGYKEVKKDLIIKLPKYSLFELENGRKRMLASAGELQKGNELALPSKYVNFLYLASHYEKLKGSPEDNEQKQLFVEQHKHYLDEIIEQISEFSKRVILADANLDKVLSAYNKHRDKPIREQAENIIHLFTLTNLGAPAAFKYFDTTIDRKRYTSTKEVLDATLIHQSITGLYETRIDLSQLGGDGGGGSGGSGGSGGSGGSGGSGGVLNLEEEYRLHEKPVPSSIDPSWLQLFPTVWAERAGMGLANQVPPVVVELRSGASPVAVRQYPMSKEAREGIRPHIQRFLDLGVLVPCQSPWNTPLLPVKKPGTNDYRPVQDLREINKRVQDIHPTVPNPYNLLSSLPPSHTWYSVLDLKDAFFCLKLHPNSQPLFAFEWRDPEKGNTGQLTWTRLPQGFKNSPTLFNEALHRDLAPFRALNPQVVLLQYVDDLLVAAPTYRDCKEGTQKLLQELSKLGYRVSAKKAQLCQKEVTYLGYLLKEGKRWLTPARKATVMKIPPPTTPRQVREFLGTAGFCRLWIPGFASLAAPLYPLTKPSIPFIWTEEHQKAFDRIKEALLSAPALALPDLTKPFTLYVDERAGVARGVLTQTLGPWRRPVAYLSKKLDPVASGWPTCLKAVAAVALLLKDADKLTLGQNVTVIASHSLESIVRQPPDRWMTNARMTHYQSLLLNERVSFAPPAVLNPATLLPVESEATPVHRCSEILAEETGTRRDLKDQPLPGVPAWYTDGSSFIAEGKRRAGAAIVDGKRTVWASSLPEGTSAQKAELVALTQALRLAEGKDINIYTDSRYAFATAHIHGAIYKQRGWLTSAGKDIKNKEEILALLEAIHLPKRVAIIHCPGHQKGNDPVATGNRRADEAAKQAALSTRVLAETTKPAGKRTADGSEFEKRTADGSEFESPKKKAKVE

SEQ ID NO: 6107 - protein, 2103 aa, synthetic construct
MPAAKRVKLDGGDKKYSIGLDIGTNSVGWAVITDEYKVPSKKFKVLGNTDRHSIKKNLIGALLFDSGETAEATRLKRTARRRYTRRKNRICYLQEIFSNEMAKVDDSFFHRLEESFLVEEDKKHERHPIFGNIVDEVAYHEKYPTIYHLRKKLVDSTDKADLRLIYLALAHMIKFRGHFLIEGDLNPDNSDVDKLFIQLVQTYNQLFEENPINASGVDAKAILSARLSKSRRLENLIAQLPGEKKNGLFGNLIALSLGLTPNFKSNFDLAEDAKLQLSKDTYDDDLDNLLAQIGDQYADLFLAAKNLSDAILLSDILRVNTEITKAPLSASMIKRYDEHHQDLTLLKALVRQQLPEKYKEIFFDQSKNGYAGYIDGGASQEEFYKFIKPILEKMDGTEELLVKLNREDLLRKQRTFDNGSIPHQIHLGELHAILRRQEDFYPFLKDNREKIEKILTFRIPYYVGPLARGNSRFAWMTRKSEETITPWNFEEVVDKGASAQSFIERMTNFDKNLPNEKVLPKHSLLYEYFTVYNELTKVKYVTEGMRKPAFLSGEQKKAIVDLLFKTNRKVTVKQLKEDYFKKIECFDSVEISGVEDRFNASLGTYHDLLKIIKDKDFLDNEENEDILEDIVLTLTLFEDREMIEERLKTYAHLFDDKVMKQLKRRRYTGWGRLSRKLINGIRDKQSGKTILDFLKSDGFANRNFMQLIHDDSLTFKEDIQKAQVSGQGDSLHEHIANLAGSPAIKKGILQTVKVVDELVKVMGRHKPENIVIEMARENQTTQKGQKNSRERMKRIEEGIKELGSQILKEHPVENTQLQNEKLYLYYLQNGRDMYVDQELDINRLSDYDVDHIVPQSFLKDDSIDNKVLTRSDKARGKSDNVPSEEVVKKMKNYWRQLLNAKLITQRKFDNLTKAERGGLSELDKAGFIKRQLVETRQITKHVAQILDSRMNTKYDENDKLIREVKVITLKSKLVSDFRKDFQFYKVREINNYHHAHDAYLNAVVGTALIKKYPKLESEFVYGDYKVYDVRKMIAKSEQEIGKATAKYFFYSNIMNFFKTEITLANGEIRKRPLIETNGETGEIVWDKGRDFATVRKVLSMPQVNIVKKTEVQTGGFSKESILPKRNSDKLIARKKDWDPKKYGGFDSPTVAYSVLVVAKVEKGKSKKLKSVKELLGITIMERSSFEKNPIDFLEAKGYKEVKKDLIIKLPKYSLFELENGRKRMLASAGELQKGNELALPSKYVNFLYLASHYEKLKGSPEDNEQKQLFVEQHKHYLDEIIEQISEFSKRVILADANLDKVLSAYNKHRDKPIREQAENIIHLFTLTNLGAPAAFKYFDTTIDRKRYTSTKEVLDATLIHQSITGLYETRIDLSQLGGDGGGGSGGSGGSGGSGGSGGSGGTLNIEDEYRLHETSKEPDVPLGSTWLSDFPQAWAETGGMGLAVRQAPLIIPLKATSTPVSIKQYPMSQEARLGIKPHIQRLLDQGILVPCQSPWNTPLLPVKKPGTNDYRPVQDLREVNKRVEDIHPTVPNPYNLLSGLPPSHQWYTVLDLKDAFFCLRLHPTSQPLFAFEWRDPEMGISGQLTWTRLPQGFKNSPTLFNEALHRDLADFRIQHPDLILLQYVDDLLLAATSEQDCQRGTRALLQTLGNLGYRASAKKAQICQKQVKYLGYLLKEGQRWLTEARKETVMGQPTPKTPRQLREFLGKAGFCRLFIPGFAEMAAPLYPLTKPGTLFNWGPDQQKAYQEIKQALLTAPALGLPDLTKPFELFVDEKQGYAKGVLTQKLGPWRRPVAYLSKKLDPVAAGWPPCLRMVAAIAVLTKDAGKLTMGQPLVILAPHAVEALVKQPPDRWLSNARMTHYQAMLLDTDRVQFGPVVALNPATLLPLPEKEAPHDCLEILAETHGTRPDLTDQPIPDADYTWYTDGSSFLQEGQRRAGAAVTTETEVIWARALPAGTSAQRAELIALTQALKMAEGKKLNVYTDSRYAFATAHVHGEIYRRRGWLTSEGREIKNKNEILALLKALFLPKRLSIIHCPGHQKGNSAEARGNRMADQAAREAAMKAVLETSTLLAGKRTADGSEFEKRTADGSEFESPKKKAKVE

SEQ ID NO: 6108 - protein, 2092 aa, synthetic construct
MPAAKRVKLDGGDKKYSIGLDIGTNSVGWAVITDEYKVPSKKFKVLGNTDRHSIKKNLIGALLFDSGETAEATRLKRTARRRYTRRKNRICYLQEIFSNEMAKVDDSFFHRLEESFLVEEDKKHERHPIFGNIVDEVAYHEKYPTIYHLRKKLVDSTDKADLRLIYLALAHMIKFRGHFLIEGDLNPDNSDVDKLFIQLVQTYNQLFEENPINASGVDAKAILSARLSKSRRLENLIAQLPGEKKNGLFGNLIALSLGLTPNFKSNFDLAEDAKLQLSKDTYDDDLDNLLAQIGDQYADLFLAAKNLSDAILLSDILRVNTEITKAPLSASMIKRYDEHHQDLTLLKALVRQQLPEKYKEIFFDQSKNGYAGYIDGGASQEEFYKFIKPILEKMDGTEELLVKLNREDLLRKQRTFDNGSIPHQIHLGELHAILRRQEDFYPFLKDNREKIEKILTFRIPYYVGPLARGNSRFAWMTRKSEETITPWNFEEVVDKGASAQSFIERMTNFDKNLPNEKVLPKHSLLYEYFTVYNELTKVKYVTEGMRKPAFLSGEQKKAIVDLLFKTNRKVTVKQLKEDYFKKIECFDSVEISGVEDRFNASLGTYHDLLKIIKDKDFLDNEENEDILEDIVLTLTLFEDREMIEERLKTYAHLFDDKVMKQLKRRRYTGWGRLSRKLINGIRDKQSGKTILDFLKSDGFANRNFMQLIHDDSLTFKEDIQKAQVSGQGDSLHEHIANLAGSPAIKKGILQTVKVVDELVKVMGRHKPENIVIEMARENQTTQKGQKNSRERMKRIEEGIKELGSQILKEHPVENTQLQNEKLYLYYLQNGRDMYVDQELDINRLSDYDVDHIVPQSFLKDDSIDNKVLTRSDKARGKSDNVPSEEVVKKMKNYWRQLLNAKLITQRKFDNLTKAERGGLSELDKAGFIKRQLVETRQITKHVAQILDSRMNTKYDENDKLIREVKVITLKSKLVSDFRKDFQFYKVREINNYHHAHDAYLNAVVGTALIKKYPKLESEFVYGDYKVYDVRKMIAKSEQEIGKATAKYFFYSNIMNFFKTEITLANGEIRKRPLIETNGETGEIVWDKGRDFATVRKVLSMPQVNIVKKTEVQTGGFSKESILPKRNSDKLIARKKDWDPKKYGGFDSPTVAYSVLVVAKVEKGKSKKLKSVKELLGITIMERSSFEKNPIDFLEAKGYKEVKKDLIIKLPKYSLFELENGRKRMLASAGELQKGNELALPSKYVNFLYLASHYEKLKGSPEDNEQKQLFVEQHKHYLDEIIEQISEFSKRVILADANLDKVLSAYNKHRDKPIREQAENIIHLFTLTNLGAPAAFKYFDTTIDRKRYTSTKEVLDATLIHQSITGLYETRIDLSQLGGDGGGGGGSGGTAPLEEEYRLFLEAPIQNVTLLEQWKREIPKVWAEINPPGLASTQAPIHVQLLSTALPVRVRQYPITLEAKRSLRETIRKFRAAGILRPVHSPWNTPLLPVRKSGTSEYRMVQDLREVNKRVETIHPTVPNPYTLLSLLPPDRIWYSVLDLKDAFFCIPLAPESQLIFAFEWADAEEGESGQLTWTRLPQGFKNSPTLFNEALNRDLQGFRLDHPSVSLLQYVDDLLIAADTQAACLSATRDLLMTLAELGYRVSGKKAQLCQEEVTYLGFKIHKGSRSLSNSRTQAILQIPVPKTKRQVREFLGKIGYCRLFIPGFAELAQPLYAATRPGNDPLVWGEKEEEAFQSLKLALTQPPALALPSLDKPFQLFVEETSGAAKGVLTQALGPWKRPVAYLSKRLDPVAAGWPRCLRAIAAAALLTREASKLTFGQDIEITSSHNLESLLRSPPDKWLTNARITQYQVLLLDPPRVRFKQTAALNPATLLPETDDTLPIHHCLDTLDSLTSTRPDLTDQPLAQAEATLFTDGSSYIRDGKRYAGAAVVTLDSVIWAEPLPIGTSAQKAELIALTKALEWSKDKSVNIYTDSRYAFATLHVHGMIYRERGWLTAGGKAIKNAPEILALLTAVWLPKRVAVMHCKGHQKDDAPTSTGNRRADEVAREVAIRPLSTQATISAGKRTADGSEFEKRTADGSEFESPKKKAKVE

SEQ ID NO: 6109 - protein, 2081 aa, synthetic construct
MPAAKRVKLDGGDKKYSIGLDIGTNSVGWAVITDEYKVPSKKFKVLGNTDRHSIKKNLIGALLFDSGETAEATRLKRTARRRYTRRKNRICYLQEIFSNEMAKVDDSFFHRLEESFLVEEDKKHERHPIFGNIVDEVAYHEKYPTIYHLRKKLVDSTDKADLRLIYLALAHMIKFRGHFLIEGDLNPDNSDVDKLFIQLVQTYNQLFEENPINASGVDAKAILSARLSKSRRLENLIAQLPGEKKNGLFGNLIALSLGLTPNFKSNFDLAEDAKLQLSKDTYDDDLDNLLAQIGDQYADLFLAAKNLSDAILLSDILRVNTEITKAPLSASMIKRYDEHHQDLTLLKALVRQQLPEKYKEIFFDQSKNGYAGYIDGGASQEEFYKFIKPILEKMDGTEELLVKLNREDLLRKQRTFDNGSIPHQIHLGELHAILRRQEDFYPFLKDNREKIEKILTFRIPYYVGPLARGNSRFAWMTRKSEETITPWNFEEVVDKGASAQSFIERMTNFDKNLPNEKVLPKHSLLYEYFTVYNELTKVKYVTEGMRKPAFLSGEQKKAIVDLLFKTNRKVTVKQLKEDYFKKIECFDSVEISGVEDRFNASLGTYHDLLKIIKDKDFLDNEENEDILEDIVLTLTLFEDREMIEERLKTYAHLFDDKVMKQLKRRRYTGWGRLSRKLINGIRDKQSGKTILDFLKSDGFANRNFMQLIHDDSLTFKEDIQKAQVSGQGDSLHEHIANLAGSPAIKKGILQTVKVVDELVKVMGRHKPENIVIEMARENQTTQKGQKNSRERMKRIEEGIKELGSQILKEHPVENTQLQNEKLYLYYLQNGRDMYVDQELDINRLSDYDVDHIVPQSFLKDDSIDNKVLTRSDKARGKSDNVPSEEVVKKMKNYWRQLLNAKLITQRKFDNLTKAERGGLSELDKAGFIKRQLVETRQITKHVAQILDSRMNTKYDENDKLIREVKVITLKSKLVSDFRKDFQFYKVREINNYHHAHDAYLNAVVGTALIKKYPKLESEFVYGDYKVYDVRKMIAKSEQEIGKATAKYFFYSNIMNFFKTEITLANGEIRKRPLIETNGETGEIVWDKGRDFATVRKVLSMPQVNIVKKTEVQTGGFSKESILPKRNSDKLIARKKDWDPKKYGGFDSPTVAYSVLVVAKVEKGKSKKLKSVKELLGITIMERSSFEKNPIDFLEAKGYKEVKKDLIIKLPKYSLFELENGRKRMLASAGELQKGNELALPSKYVNFLYLASHYEKLKGSPEDNEQKQLFVEQHKHYLDEIIEQISEFSKRVILADANLDKVLSAYNKHRDKPIREQAENIIHLFTLTNLGAPAAFKYFDTTIDRKRYTSTKEVLDATLIHQSITGLYETRIDLSQLGGDGGGGGGSGGVPWILKKPLELTIKLDLEEQQGTLLNNSILSKKGKEELKQLFEKYSALWQSWENQVGHRRIRPHKIATGTVKPTPQKQYHINPKAKPDIQIVINDLLKQGVLIQKESTMNTPVYPVPKPNGRWRMVLDYRAVNKVTPLIAVQNQHSYGILGSLFKGRYKTTIDLSNGFWAHPIVPEDYWITAFTWQGKQYCWTVLPQGFLNSPGLFTGDVVDLLQGIPNVEVYVDDVYISHDSEKEHLEYLDILFNRLKEAGYIISLKKSNIANSIVDFLGFQITNEGRGLTDTFKEKLENITAPTTLKQLQSILGLLNFARNFIPDFTELIAPLYALIPKSTKNYVPWQIEHSTTLETLITKLNGAEYLQGRKGDKTLIMKVNASYTTGYIRYYNEGEKKPISYVSIVFSKTELKFTELEKLLTTVHKGLLKALDLSMGQNIHVYSPIVSMQNIQKTPQTAKKALASRWLSWLSYLEDPRIRFFYDPQMPALKDLPAVDTGKDNKKHPSNFQHIFYTDGSAITSPTKEGHLNAGMGIVYFINKDGNLQKQQEWSISLGNHTAQFAEIAAFEFALKKCLPLGGNILVVTDSNYVAKAYNEELDVWASNGFVNNRKKPLKHISKWKSVADLKRLRPDVVVTHEPGHQKLDSSPHAYGNNLADQLATQASFKVHAGKRTADGSEFEKRTADGSEFESPKKKAKVE

SEQ ID NO: 6110 - protein, 2088 aa, synthetic construct
MPAAKRVKLDGGDKKYSIGLDIGTNSVGWAVITDEYKVPSKKFKVLGNTDRHSIKKNLIGALLFDSGETAEATRLKRTARRRYTRRKNRICYLQEIFSNEMAKVDDSFFHRLEESFLVEEDKKHERHPIFGNIVDEVAYHEKYPTIYHLRKKLVDSTDKADLRLIYLALAHMIKFRGHFLIEGDLNPDNSDVDKLFIQLVQTYNQLFEENPINASGVDAKAILSARLSKSRRLENLIAQLPGEKKNGLFGNLIALSLGLTPNFKSNFDLAEDAKLQLSKDTYDDDLDNLLAQIGDQYADLFLAAKNLSDAILLSDILRVNTEITKAPLSASMIKRYDEHHQDLTLLKALVRQQLPEKYKEIFFDQSKNGYAGYIDGGASQEEFYKFIKPILEKMDGTEELLVKLNREDLLRKQRTFDNGSIPHQIHLGELHAILRRQEDFYPFLKDNREKIEKILTFRIPYYVGPLARGNSRFAWMTRKSEETITPWNFEEVVDKGASAQSFIERMTNFDKNLPNEKVLPKHSLLYEYFTVYNELTKVKYVTEGMRKPAFLSGEQKKAIVDLLFKTNRKVTVKQLKEDYFKKIECFDSVEISGVEDRFNASLGTYHDLLKIIKDKDFLDNEENEDILEDIVLTLTLFEDREMIEERLKTYAHLFDDKVMKQLKRRRYTGWGRLSRKLINGIRDKQSGKTILDFLKSDGFANRNFMQLIHDDSLTFKEDIQKAQVSGQGDSLHEHIANLAGSPAIKKGILQTVKVVDELVKVMGRHKPENIVIEMARENQTTQKGQKNSRERMKRIEEGIKELGSQILKEHPVENTQLQNEKLYLYYLQNGRDMYVDQELDINRLSDYDVDHIVPQSFLKDDSIDNKVLTRSDKARGKSDNVPSEEVVKKMKNYWRQLLNAKLITQRKFDNLTKAERGGLSELDKAGFIKRQLVETRQITKHVAQILDSRMNTKYDENDKLIREVKVITLKSKLVSDFRKDFQFYKVREINNYHHAHDAYLNAVVGTALIKKYPKLESEFVYGDYKVYDVRKMIAKSEQEIGKATAKYFFYSNIMNFFKTEITLANGEIRKRPLIETNGETGEIVWDKGRDFATVRKVLSMPQVNIVKKTEVQTGGFSKESILPKRNSDKLIARKKDWDPKKYGGFDSPTVAYSVLVVAKVEKGKSKKLKSVKELLGITIMERSSFEKNPIDFLEAKGYKEVKKDLIIKLPKYSLFELENGRKRMLASAGELQKGNELALPSKYVNFLYLASHYEKLKGSPEDNEQKQLFVEQHKHYLDEIIEQISEFSKRVILADANLDKVLSAYNKHRDKPIREQAENIIHLFTLTNLGAPAAFKYFDTTIDRKRYTSTKEVLDATLIHQSITGLYETRIDLSQLGGDGGGGGGSGGVLNLEEEYRLHEKPVPSSIDPSWLQLFPTVWAERAGMGLANQVPPVVVELRSGASPVAVRQYPMSKEAREGIRPHIQKFLDLGVLVPCRSPWNTPLLPVKKPGTNDYRPVQDLREINKRVQDIHPTVPNPYNLLSSLPPSYTWYSVLDLKDAFFCLRLHPNSQPLFAFEWKDPEKGNTGQLTWTRLPQGFKNSPTLFNEALHRDLAPFRALNPQVVLLQYVDDLLVAAPTYEDCKKGTQKLLQELSKLGYRVSAKKAQLCQREVTYLGYLLKEGKRWLTPARKATVMKIPVPTTPRQVREFLGTAGFCRLWIPGFASLAAPLYPLTKPSIPFIWTEEHQQAFDHIKKALLSAPALALPDLTKPFTLYIDERAGVARGVLTQTLGPWRRPVAYLSKKLDPVASGWPTCLKAVAAVALLLKDADKLTLGQNVTVIASHSLESIVRQPPDRWMTNARMTHYQSLLLNERVSFAPPAVLNPATLLPVESEATPVHRCSEILAEETGTRRDLEDQPLPGVPTWYTDGSSFITEGKRRAGAPIVDGKRTVWASSLPEGTSAQKAELVALTQALRLAEGKNINIYTDSRYAFATAHIHGAIYKQRGWLTSAGKDIKNKEEILALLEAIHLPRRVAIIHCPGHQRGSNPVATGNRRADEAAKQAALSTRVLAGTTKPAGKRTADGSEFEKRTADGSEFESPKKKAKVE

SEQ ID NO: 6111 - protein, 2090 aa, synthetic construct
MPAAKRVKLDGGDKKYSIGLDIGTNSVGWAVITDEYKVPSKKFKVLGNTDRHSIKKNLIGALLFDSGETAEATRLKRTARRRYTRRKNRICYLQEIFSNEMAKVDDSFFHRLEESFLVEEDKKHERHPIFGNIVDEVAYHEKYPTIYHLRKKLVDSTDKADLRLIYLALAHMIKFRGHFLIEGDLNPDNSDVDKLFIQLVQTYNQLFEENPINASGVDAKAILSARLSKSRRLENLIAQLPGEKKNGLFGNLIALSLGLTPNFKSNFDLAEDAKLQLSKDTYDDDLDNLLAQIGDQYADLFLAAKNLSDAILLSDILRVNTEITKAPLSASMIKRYDEHHQDLTLLKALVRQQLPEKYKEIFFDQSKNGYAGYIDGGASQEEFYKFIKPILEKMDGTEELLVKLNREDLLRKQRTFDNGSIPHQIHLGELHAILRRQEDFYPFLKDNREKIEKILTFRIPYYVGPLARGNSRFAWMTRKSEETITPWNFEEVVDKGASAQSFIERMTNFDKNLPNEKVLPKHSLLYEYFTVYNELTKVKYVTEGMRKPAFLSGEQKKAIVDLLFKTNRKVTVKQLKEDYFKKIECFDSVEISGVEDRFNASLGTYHDLLKIIKDKDFLDNEENEDILEDIVLTLTLFEDREMIEERLKTYAHLFDDKVMKQLKRRRYTGWGRLSRKLINGIRDKQSGKTILDFLKSDGFANRNFMQLIHDDSLTFKEDIQKAQVSGQGDSLHEHIANLAGSPAIKKGILQTVKVVDELVKVMGRHKPENIVIEMARENQTTQKGQKNSRERMKRIEEGIKELGSQILKEHPVENTQLQNEKLYLYYLQNGRDMYVDQELDINRLSDYDVDHIVPQSFLKDDSIDNKVLTRSDKARGKSDNVPSEEVVKKMKNYWRQLLNAKLITQRKFDNLTKAERGGLSELDKAGFIKRQLVETRQITKHVAQILDSRMNTKYDENDKLIREVKVITLKSKLVSDFRKDFQFYKVREINNYHHAHDAYLNAVVGTALIKKYPKLESEFVYGDYKVYDVRKMIAKSEQEIGKATAKYFFYSNIMNFFKTEITLANGEIRKRPLIETNGETGEIVWDKGRDFATVRKVLSMPQVNIVKKTEVQTGGFSKESILPKRNSDKLIARKKDWDPKKYGGFDSPTVAYSVLVVAKVEKGKSKKLKSVKELLGITIMERSSFEKNPIDFLEAKGYKEVKKDLIIKLPKYSLFELENGRKRMLASAGELQKGNELALPSKYVNFLYLASHYEKLKGSPEDNEQKQLFVEQHKHYLDEIIEQISEFSKRVILADANLDKVLSAYNKHRDKPIREQAENIIHLFTLTNLGAPAAFKYFDTTIDRKRYTSTKEVLDATLIHQSITGLYETRIDLSQLGGDGGGGGGSGGTLNIEDEYRLHETSKEPDVSLGSTWLSDFPQAWAETGGMGLAVRQAPLIIPLKATSTPVSIKQYPMSQEARLGIKPHIQRLLDQGILVPCQSPWNTPLLPVKKPGTNDYRPVQDLREVNKRVEDIHPTVPNPYNLLSGLPPSHQWYTVLDLKDAFFCLRLHPTSQPLFAFEWRDPEMGISGQLTWTRLPQGFKNSPTLFDEALHRDLAGFRIQHPDLILLQYVDDLLLAATSELDCQQGTRALLQTLGDLGYRASAKKAQICQKQVKYLGYLLKEGQRWLTEARKETVMGQPIPKTPRQLREFLGTAGFCRLWIPGFAEMAAPLYPLTKTGTLFNWGPDQQKAFQEIKQALLTAPALGLPDLTKPFELFVDEKQGYAKGVLTQKLGPWRRPVAYLSKKLDPVAAGWPPCLRMVAAIAVLTKDAGKLTMGQPLVILAPHAVEALVKQPPDRWLSNARMTHYQALLLDTDRVQFGPVVALNPATLLPLPEEGLQHDCLDILAEAHGTRSDLMDQPLPDADHTWYTDGSSFLQEGQRKAGAAVTTETEVIWARALPAGTSAQRAELIALTQALKMAEGKKLNVYTDSRYAFATAHIHGEIYRRRGLLTSEGKEIKNKDEILALLKALFLPKRLSIIHCPGHQKGNSAEARGNRMADQAAREVATRETPETSTLLAGKRTADGSEFEKRTADGSEFESPKKKAKVE

SEQ ID NO: 6112 - protein, 2090 aa, synthetic construct
MPAAKRVKLDGGDKKYSIGLDIGTNSVGWAVITDEYKVPSKKFKVLGNTDRHSIKKNLIGALLFDSGETAEATRLKRTARRRYTRRKNRICYLQEIFSNEMAKVDDSFFHRLEESFLVEEDKKHERHPIFGNIVDEVAYHEKYPTIYHLRKKLVDSTDKADLRLIYLALAHMIKFRGHFLIEGDLNPDNSDVDKLFIQLVQTYNQLFEENPINASGVDAKAILSARLSKSRRLENLIAQLPGEKKNGLFGNLIALSLGLTPNFKSNFDLAEDAKLQLSKDTYDDDLDNLLAQIGDQYADLFLAAKNLSDAILLSDILRVNTEITKAPLSASMIKRYDEHHQDLTLLKALVRQQLPEKYKEIFFDQSKNGYAGYIDGGASQEEFYKFIKPILEKMDGTEELLVKLNREDLLRKQRTFDNGSIPHQIHLGELHAILRRQEDFYPFLKDNREKIEKILTFRIPYYVGPLARGNSRFAWMTRKSEETITPWNFEEVVDKGASAQSFIERMTNFDKNLPNEKVLPKHSLLYEYFTVYNELTKVKYVTEGMRKPAFLSGEQKKAIVDLLFKTNRKVTVKQLKEDYFKKIECFDSVEISGVEDRFNASLGTYHDLLKIIKDKDFLDNEENEDILEDIVLTLTLFEDREMIEERLKTYAHLFDDKVMKQLKRRRYTGWGRLSRKLINGIRDKQSGKTILDFLKSDGFANRNFMQLIHDDSLTFKEDIQKAQVSGQGDSLHEHIANLAGSPAIKKGILQTVKVVDELVKVMGRHKPENIVIEMARENQTTQKGQKNSRERMKRIEEGIKELGSQILKEHPVENTQLQNEKLYLYYLQNGRDMYVDQELDINRLSDYDVDHIVPQSFLKDDSIDNKVLTRSDKARGKSDNVPSEEVVKKMKNYWRQLLNAKLITQRKFDNLTKAERGGLSELDKAGFIKRQLVETRQITKHVAQILDSRMNTKYDENDKLIREVKVITLKSKLVSDFRKDFQFYKVREINNYHHAHDAYLNAVVGTALIKKYPKLESEFVYGDYKVYDVRKMIAKSEQEIGKATAKYFFYSNIMNFFKTEITLANGEIRKRPLIETNGETGEIVWDKGRDFATVRKVLSMPQVNIVKKTEVQTGGFSKESILPKRNSDKLIARKKDWDPKKYGGFDSPTVAYSVLVVAKVEKGKSKKLKSVKELLGITIMERSSFEKNPIDFLEAKGYKEVKKDLIIKLPKYSLFELENGRKRMLASAGELQKGNELALPSKYVNFLYLASHYEKLKGSPEDNEQKQLFVEQHKHYLDEIIEQISEFSKRVILADANLDKVLSAYNKHRDKPIREQAENIIHLFTLTNLGAPAAFKYFDTTIDRKRYTSTKEVLDATLIHQSITGLYETRIDLSQLGGDGGGGGGSGGTLNIEDEYRLHETSKEPDVSLGSTWLSDFPQAWAETGGMGLAVRQAPLIIPLKATSTPVSIKQYPMSQEARLGIKPHIQRLLDQGILVPCQSPWNTPLLPVKKPGTNDYRPVQDLREVNKRVEDIHPTVPNPYNLLSGLPPSHQWYTVLDLKDAFFCLRLHPTSQPLFAFEWRDPEMGISGQLTWTRLPQGFKNSPTLFNEALHRDLAGFRIQHPDLILLQYVDDLLLAATSELDCQQGTRALLQTLGDLGYRASAKKAQICQKQVKYLGYLLKEGQRWLTEARKETVMGQPIPKTPRQLREFLGTAGFCRLWIPGFAEMAAPLYPLTKPGTLFNWGPDQQKAFQEIKQALLTAPALGLPDLTKPFELFVDEKQGYAKGVLTQKLGPWRRPVAYLSKKLDPVAAGWPPCLRMVAAIAVLTKDAGKLTMGQPLVILAPHAVEALVKQPPDRWLSNARMTHYQALLLDTDRVQFGPVVALNPATLLPLPEEGLQHDCLDILAEAHGTRSDLMDQPLPDADHTWYTDGSSFLQEGQRKAGAAVTTETEVIWARALPAGTSAQRAELIALTQALKMAEGKKLNVYTDSRYAFATAHIHGEIYRRRGWLTSEGKEIKNKDEILALLKALFLPKRLSIIHCPGHQKGNSAEARGNRMADQAAREVATRETPETSTLLAGKRTADGSEFEKRTADGSEFESPKKKAKVE

SEQ ID NO: 6113 - protein, 2110 aa, synthetic construct
MPAAKRVKLDGGDKKYSIGLDIGTNSVGWAVITDEYKVPSKKFKVLGNTDRHSIKKNLIGALLFDSGETAEATRLKRTARRRYTRRKNRICYLQEIFSNEMAKVDDSFFHRLEESFLVEEDKKHERHPIFGNIVDEVAYHEKYPTIYHLRKKLVDSTDKADLRLIYLALAHMIKFRGHFLIEGDLNPDNSDVDKLFIQLVQTYNQLFEENPINASGVDAKAILSARLSKSRRLENLIAQLPGEKKNGLFGNLIALSLGLTPNFKSNFDLAEDAKLQLSKDTYDDDLDNLLAQIGDQYADLFLAAKNLSDAILLSDILRVNTEITKAPLSASMIKRYDEHHQDLTLLKALVRQQLPEKYKEIFFDQSKNGYAGYIDGGASQEEFYKFIKPILEKMDGTEELLVKLNREDLLRKQRTFDNGSIPHQIHLGELHAILRRQEDFYPFLKDNREKIEKILTFRIPYYVGPLARGNSRFAWMTRKSEETITPWNFEEVVDKGASAQSFIERMTNFDKNLPNEKVLPKHSLLYEYFTVYNELTKVKYVTEGMRKPAFLSGEQKKAIVDLLFKTNRKVTVKQLKEDYFKKIECFDSVEISGVEDRFNASLGTYHDLLKIIKDKDFLDNEENEDILEDIVLTLTLFEDREMIEERLKTYAHLFDDKVMKQLKRRRYTGWGRLSRKLINGIRDKQSGKTILDFLKSDGFANRNFMQLIHDDSLTFKEDIQKAQVSGQGDSLHEHIANLAGSPAIKKGILQTVKVVDELVKVMGRHKPENIVIEMARENQTTQKGQKNSRERMKRIEEGIKELGSQILKEHPVENTQLQNEKLYLYYLQNGRDMYVDQELDINRLSDYDVDHIVPQSFLKDDSIDNKVLTRSDKARGKSDNVPSEEVVKKMKNYWRQLLNAKLITQRKFDNLTKAERGGLSELDKAGFIKRQLVETRQITKHVAQILDSRMNTKYDENDKLIREVKVITLKSKLVSDFRKDFQFYKVREINNYHHAHDAYLNAVVGTALIKKYPKLESEFVYGDYKVYDVRKMIAKSEQEIGKATAKYFFYSNIMNFFKTEITLANGEIRKRPLIETNGETGEIVWDKGRDFATVRKVLSMPQVNIVKKTEVQTGGFSKESILPKRNSDKLIARKKDWDPKKYGGFDSPTVAYSVLVVAKVEKGKSKKLKSVKELLGITIMERSSFEKNPIDFLEAKGYKEVKKDLIIKLPKYSLFELENGRKRMLASAGELQKGNELALPSKYVNFLYLASHYEKLKGSPEDNEQKQLFVEQHKHYLDEIIEQISEFSKRVILADANLDKVLSAYNKHRDKPIREQAENIIHLFTLTNLGAPAAFKYFDTTIDRKRYTSTKEVLDATLIHQSITGLYETRIDLSQLGGDGGGGGGSGGVQEISDSRPMLHIYLNGRRFLGLLDTGADKTCIAGRDWPANWPIHQTESSLQGLGMACGVARSSQPLRWQHEDKSGIIHPFVIPTLPFTLWGRDIMKDIKVRLMTDSPDDSQDLMIGAIESNLFADQISWKSDQPVWLNQWPLKQEKLQALQQLVTEQLQLGHLEESNSPWNTPVFVIKKKSGKWRLLQDLRAVNATMHDMGALQPGLPSPVAVPKGWEIIIIDLQDCFFNIKLHPEDCKRFAFSVPSPNFKRPYQRFQWKVLPQGMKNSPTLCQKFVDKAILTVRDKYQDSYIVHYMDDILLAHPSRSIVDEILTSMIQALNKHGLVVSTEKIQKYDNLKYLGTHIQGDSVSYQKLQIRTDKLRTLNDFQKLLGNINWIRPFLKLTTGELKPLFEILNGDSNPISTRKLTPEACKALQLMNERLSTARVKRLDLSQPWSLCILKTEYTPTACLWQDGVVEWIHLPHISPKVITPYDIFCTQLIIKGRHRSKELFSKDPDYIVVPYTKVQFDLLLQEKEDWPISLLGFLGEVHFHLPKDPLLTFTLQTAIIFPHMTSTTPLEKGIVIFTDGSANGRSVTYIQGREPIIKENTQNTAQQAEIVAVITAFEEVSQPFNLYTDSKYVTGLFPEIETATLSPRTKIYTELKHLQRLIHKRQEKFYIGHIRGHTGLPGPLAQGNAYADSLTRILTAAGKRTADGSEFEKRTADGSEFESPKKKAKVE

SEQ ID NO: 6114 - protein, 2170 aa, synthetic construct
MPAAKRVKLDGGDKKYSIGLDIGTNSVGWAVITDEYKVPSKKFKVLGNTDRHSIKKNLIGALLFDSGETAEATRLKRTARRRYTRRKNRICYLQEIFSNEMAKVDDSFFHRLEESFLVEEDKKHERHPIFGNIVDEVAYHEKYPTIYHLRKKLVDSTDKADLRLIYLALAHMIKFRGHFLIEGDLNPDNSDVDKLFIQLVQTYNQLFEENPINASGVDAKAILSARLSKSRRLENLIAQLPGEKKNGLFGNLIALSLGLTPNFKSNFDLAEDAKLQLSKDTYDDDLDNLLAQIGDQYADLFLAAKNLSDAILLSDILRVNTEITKAPLSASMIKRYDEHHQDLTLLKALVRQQLPEKYKEIFFDQSKNGYAGYIDGGASQEEFYKFIKPILEKMDGTEELLVKLNREDLLRKQRTFDNGSIPHQIHLGELHAILRRQEDFYPFLKDNREKIEKILTFRIPYYVGPLARGNSRFAWMTRKSEETITPWNFEEVVDKGASAQSFIERMTNFDKNLPNEKVLPKHSLLYEYFTVYNELTKVKYVTEGMRKPAFLSGEQKKAIVDLLFKTNRKVTVKQLKEDYFKKIECFDSVEISGVEDRFNASLGTYHDLLKIIKDKDFLDNEENEDILEDIVLTLTLFEDREMIEERLKTYAHLFDDKVMKQLKRRRYTGWGRLSRKLINGIRDKQSGKTILDFLKSDGFANRNFMQLIHDDSLTFKEDIQKAQVSGQGDSLHEHIANLAGSPAIKKGILQTVKVVDELVKVMGRHKPENIVIEMARENQTTQKGQKNSRERMKRIEEGIKELGSQILKEHPVENTQLQNEKLYLYYLQNGRDMYVDQELDINRLSDYDVDHIVPQSFLKDDSIDNKVLTRSDKARGKSDNVPSEEVVKKMKNYWRQLLNAKLITQRKFDNLTKAERGGLSELDKAGFIKRQLVETRQITKHVAQILDSRMNTKYDENDKLIREVKVITLKSKLVSDFRKDFQFYKVREINNYHHAHDAYLNAVVGTALIKKYPKLESEFVYGDYKVYDVRKMIAKSEQEIGKATAKYFFYSNIMNFFKTEITLANGEIRKRPLIETNGETGEIVWDKGRDFATVRKVLSMPQVNIVKKTEVQTGGFSKESILPKRNSDKLIARKKDWDPKKYGGFDSPTVAYSVLVVAKVEKGKSKKLKSVKELLGITIMERSSFEKNPIDFLEAKGYKEVKKDLIIKLPKYSLFELENGRKRMLASAGELQKGNELALPSKYVNFLYLASHYEKLKGSPEDNEQKQLFVEQHKHYLDEIIEQISEFSKRVILADANLDKVLSAYNKHRDKPIREQAENIIHLFTLTNLGAPAAFKYFDTTIDRKRYTSTKEVLDATLIHQSITGLYETRIDLSQLGGDGGGGGGSGGMDPLQLLQPLEAEIKGTKLKAHWNSGATITCVPEAFLEDERPIQTMLIKTIHGEKQQDVYYLTFKVQGRKVEAEVLASPYDYILLNPSDVPWLMKKPLQLTVLVPLHEYQERLLQQTALPKEQKELLQKLFLKYDALWQHWENQVGHRRIKPHNIATGTLAPRPQKQYPINPKAKPSIQIVIDDLLKQGVLIQQNSTMNTPVYPVPKPDGKWRMVLDYREVNKTIPLIAAQNQHSAGILSSIYRGKYKTTLDLTNGFWAHPITPESYWLTAFTWQGKQYCWTRLPQGFLNSPALFNADVVDLLKEIPNVQAYVDDIYISHDDPQEHLEQLEKIFSILLNAGYVVSLKKSEIAQREVEFLGFNITKEGRGLTDTFKQKLLNITPPKDLKQLQSILGKLNFARNFIPNYSELVKPLYTIVAPANGKFISWTEDNSNQLQHIISVLNQADNLEERNPETRLIIKVNSSPSAGYIRYYNEGSKRPIMYVNYIFSKAEAKFTQTEKLLTTMHKGLIKAMDLAMGQEILVYSPIVSMTKIQRTPLPERKALPVRWITWMTYLEDPRIQFHYDKSLPELQQIPNVTEDVIAKTKHPSEFAMVFYTDGSAIKHPDVNKSHSAGMGIAQVQFIPEYKIVHQWSIPLGDHTAQLAEIAAVEFACKKALKISGPVLIVTDSFYVAESANKELPYWKSNGFLNNKKKPLRHVSKWKSIAECLQLKPDIIIMHEKGHQQPMTTLHTEGNNLADKLATQGSYVVHAGKRTADGSEFEKRTADGSEFESPKKKAKVE

SEQ ID NO: 6115 - protein, 2088 aa, synthetic construct
MPAAKRVKLDGGDKKYSIGLDIGTNSVGWAVITDEYKVPSKKFKVLGNTDRHSIKKNLIGALLFDSGETAEATRLKRTARRRYTRRKNRICYLQEIFSNEMAKVDDSFFHRLEESFLVEEDKKHERHPIFGNIVDEVAYHEKYPTIYHLRKKLVDSTDKADLRLIYLALAHMIKFRGHFLIEGDLNPDNSDVDKLFIQLVQTYNQLFEENPINASGVDAKAILSARLSKSRRLENLIAQLPGEKKNGLFGNLIALSLGLTPNFKSNFDLAEDAKLQLSKDTYDDDLDNLLAQIGDQYADLFLAAKNLSDAILLSDILRVNTEITKAPLSASMIKRYDEHHQDLTLLKALVRQQLPEKYKEIFFDQSKNGYAGYIDGGASQEEFYKFIKPILEKMDGTEELLVKLNREDLLRKQRTFDNGSIPHQIHLGELHAILRRQEDFYPFLKDNREKIEKILTFRIPYYVGPLARGNSRFAWMTRKSEETITPWNFEEVVDKGASAQSFIERMTNFDKNLPNEKVLPKHSLLYEYFTVYNELTKVKYVTEGMRKPAFLSGEQKKAIVDLLFKTNRKVTVKQLKEDYFKKIECFDSVEISGVEDRFNASLGTYHDLLKIIKDKDFLDNEENEDILEDIVLTLTLFEDREMIEERLKTYAHLFDDKVMKQLKRRRYTGWGRLSRKLINGIRDKQSGKTILDFLKSDGFANRNFMQLIHDDSLTFKEDIQKAQVSGQGDSLHEHIANLAGSPAIKKGILQTVKVVDELVKVMGRHKPENIVIEMARENQTTQKGQKNSRERMKRIEEGIKELGSQILKEHPVENTQLQNEKLYLYYLQNGRDMYVDQELDINRLSDYDVDHIVPQSFLKDDSIDNKVLTRSDKARGKSDNVPSEEVVKKMKNYWRQLLNAKLITQRKFDNLTKAERGGLSELDKAGFIKRQLVETRQITKHVAQILDSRMNTKYDENDKLIREVKVITLKSKLVSDFRKDFQFYKVREINNYHHAHDAYLNAVVGTALIKKYPKLESEFVYGDYKVYDVRKMIAKSEQEIGKATAKYFFYSNIMNFFKTEITLANGEIRKRPLIETNGETGEIVWDKGRDFATVRKVLSMPQVNIVKKTEVQTGGFSKESILPKRNSDKLIARKKDWDPKKYGGFDSPTVAYSVLVVAKVEKGKSKKLKSVKELLGITIMERSSFEKNPIDFLEAKGYKEVKKDLIIKLPKYSLFELENGRKRMLASAGELQKGNELALPSKYVNFLYLASHYEKLKGSPEDNEQKQLFVEQHKHYLDEIIEQISEFSKRVILADANLDKVLSAYNKHRDKPIREQAENIIHLFTLTNLGAPAAFKYFDTTIDRKRYTSTKEVLDATLIHQSITGLYETRIDLSQLGGDGGGGGGSGGVLNLEEEYRLHEKPVPSSIDPSWLQLFPTVWAERAGMGLANQVPPVVVELRSGASPVAVRQYPMSKEAREGIRPHIQRFLDLGVLVPCQSPWNTPLLPVKKPGTNDYRPVQDLREINKRVQDIHPTVPNPYNLLSSLPPSHTWYSVLDLKDAFFCLKLHPNSQPLFAFEWRDPEKGNTGQLTWTRLPQGFKNSPTLFNEALHRDLAPFRALNPQVVLLQYVDDLLVAAPTYRDCKEGTQKLLQELSKLGYRVSAKKAQLCQKEVTYLGYLLKEGKRWLTPARKATVMKIPPPTTPRQVREFLGTAGFCRLWIPGFASLAAPLYPLTKPSIPFIWTEEHQKAFDRIKEALLSAPALALPDLTKPFTLYVDERAGVARGVLTQTLGPWRRPVAYLSKKLDPVASGWPTCLKAVAAVALLLKDADKLTLGQNVTVIASHSLESIVRQPPDRWMTNARMTHYQSLLLNERVSFAPPAVLNPATLLPVESEATPVHRCSEILAEETGTRRDLKDQPLPGVPAWYTDGSSFIAEGKRRAGAAIVDGKRTVWASSLPEGTSAQKAELVALTQALRLAEGKDINIYTDSRYAFATAHIHGAIYKQRGWLTSAGKDIKNKEEILALLEAIHLPKRVAIIHCPGHQKGNDPVATGNRRADEAAKQAALSTRVLAETTKPAGKRTADGSEFEKRTADGSEFESPKKKAKVE

SEQ ID NO: 6116 - protein, 2088 aa, synthetic construct
MPAAKRVKLDGGDKKYSIGLDIGTNSVGWAVITDEYKVPSKKFKVLGNTDRHSIKKNLIGALLFDSGETAEATRLKRTARRRYTRRKNRICYLQEIFSNEMAKVDDSFFHRLEESFLVEEDKKHERHPIFGNIVDEVAYHEKYPTIYHLRKKLVDSTDKADLRLIYLALAHMIKFRGHFLIEGDLNPDNSDVDKLFIQLVQTYNQLFEENPINASGVDAKAILSARLSKSRRLENLIAQLPGEKKNGLFGNLIALSLGLTPNFKSNFDLAEDAKLQLSKDTYDDDLDNLLAQIGDQYADLFLAAKNLSDAILLSDILRVNTEITKAPLSASMIKRYDEHHQDLTLLKALVRQQLPEKYKEIFFDQSKNGYAGYIDGGASQEEFYKFIKPILEKMDGTEELLVKLNREDLLRKQRTFDNGSIPHQIHLGELHAILRRQEDFYPFLKDNREKIEKILTFRIPYYVGPLARGNSRFAWMTRKSEETITPWNFEEVVDKGASAQSFIERMTNFDKNLPNEKVLPKHSLLYEYFTVYNELTKVKYVTEGMRKPAFLSGEQKKAIVDLLFKTNRKVTVKQLKEDYFKKIECFDSVEISGVEDRFNASLGTYHDLLKIIKDKDFLDNEENEDILEDIVLTLTLFEDREMIEERLKTYAHLFDDKVMKQLKRRRYTGWGRLSRKLINGIRDKQSGKTILDFLKSDGFANRNFMQLIHDDSLTFKEDIQKAQVSGQGDSLHEHIANLAGSPAIKKGILQTVKVVDELVKVMGRHKPENIVIEMARENQTTQKGQKNSRERMKRIEEGIKELGSQILKEHPVENTQLQNEKLYLYYLQNGRDMYVDQELDINRLSDYDVDHIVPQSFLKDDSIDNKVLTRSDKARGKSDNVPSEEVVKKMKNYWRQLLNAKLITQRKFDNLTKAERGGLSELDKAGFIKRQLVETRQITKHVAQILDSRMNTKYDENDKLIREVKVITLKSKLVSDFRKDFQFYKVREINNYHHAHDAYLNAVVGTALIKKYPKLESEFVYGDYKVYDVRKMIAKSEQEIGKATAKYFFYSNIMNFFKTEITLANGEIRKRPLIETNGETGEIVWDKGRDFATVRKVLSMPQVNIVKKTEVQTGGFSKESILPKRNSDKLIARKKDWDPKKYGGFDSPTVAYSVLVVAKVEKGKSKKLKSVKELLGITIMERSSFEKNPIDFLEAKGYKEVKKDLIIKLPKYSLFELENGRKRMLASAGELQKGNELALPSKYVNFLYLASHYEKLKGSPEDNEQKQLFVEQHKHYLDEIIEQISEFSKRVILADANLDKVLSAYNKHRDKPIREQAENIIHLFTLTNLGAPAAFKYFDTTIDRKRYTSTKEVLDATLIHQSITGLYETRIDLSQLGGDGGGGGGSGGVLNLEEEYRLHEKPVPSSIDPSWLQLFPTVWAERAGMGLANQVPPVVVELRSGASPVAVRQYPMSKEAREGIRPHIQRFLDLGVLVPCQSPWNTPLLPVKKPGTNDYRPVQDLREINKRVQDIHPTVPNPYNLLSSLPPSHTWYSVLDLKDAFFCLKLHPNSQPLFAFEWRDPEKGNTGQLTWTRLPQGFKNSPTLFNEALHRDLAPFRALNPQVVLLQYVDDLLVAAPTYRDCKEGTQKLLQELSKLGYRVSAKKAQLCQKEVTYLGYLLKEGKRWLTPARKATVMKIPPPTTPRQVREFLGKAGFCRLFIPGFASLAAPLYPLTKPSIPFIWTEEHQKAFDRIKEALLSAPALALPDLTKPFTLYVDERAGVARGVLTQTLGPWRRPVAYLSKKLDPVASGWPTCLKAVAAVALLLKDADKLTLGQNVTVIASHSLESIVRQPPDRWMTNARMTHYQSLLLNERVSFAPPAVLNPATLLPVESEATPVHRCSEILAEETGTRRDLKDQPLPGVPAWYTDGSSFIAEGKRRAGAAIVDGKRTVWASSLPEGTSAQKAELVALTQALRLAEGKDINIYTDSRYAFATAHIHGAIYKQRGWLTSAGKDIKNKEEILALLEAIHLPKRVAIIHCPGHQKGNDPVATGNRRADEAAKQAALSTRVLAETTKPAGKRTADGSEFEKRTADGSEFESPKKKAKVE

SEQ ID NO: 6117 - protein, 2090 aa, synthetic construct
MPAAKRVKLDGGDKKYSIGLDIGTNSVGWAVITDEYKVPSKKFKVLGNTDRHSIKKNLIGALLFDSGETAEATRLKRTARRRYTRRKNRICYLQEIFSNEMAKVDDSFFHRLEESFLVEEDKKHERHPIFGNIVDEVAYHEKYPTIYHLRKKLVDSTDKADLRLIYLALAHMIKFRGHFLIEGDLNPDNSDVDKLFIQLVQTYNQLFEENPINASGVDAKAILSARLSKSRRLENLIAQLPGEKKNGLFGNLIALSLGLTPNFKSNFDLAEDAKLQLSKDTYDDDLDNLLAQIGDQYADLFLAAKNLSDAILLSDILRVNTEITKAPLSASMIKRYDEHHQDLTLLKALVRQQLPEKYKEIFFDQSKNGYAGYIDGGASQEEFYKFIKPILEKMDGTEELLVKLNREDLLRKQRTFDNGSIPHQIHLGELHAILRRQEDFYPFLKDNREKIEKILTFRIPYYVGPLARGNSRFAWMTRKSEETITPWNFEEVVDKGASAQSFIERMTNFDKNLPNEKVLPKHSLLYEYFTVYNELTKVKYVTEGMRKPAFLSGEQKKAIVDLLFKTNRKVTVKQLKEDYFKKIECFDSVEISGVEDRFNASLGTYHDLLKIIKDKDFLDNEENEDILEDIVLTLTLFEDREMIEERLKTYAHLFDDKVMKQLKRRRYTGWGRLSRKLINGIRDKQSGKTILDFLKSDGFANRNFMQLIHDDSLTFKEDIQKAQVSGQGDSLHEHIANLAGSPAIKKGILQTVKVVDELVKVMGRHKPENIVIEMARENQTTQKGQKNSRERMKRIEEGIKELGSQILKEHPVENTQLQNEKLYLYYLQNGRDMYVDQELDINRLSDYDVDHIVPQSFLKDDSIDNKVLTRSDKARGKSDNVPSEEVVKKMKNYWRQLLNAKLITQRKFDNLTKAERGGLSELDKAGFIKRQLVETRQITKHVAQILDSRMNTKYDENDKLIREVKVITLKSKLVSDFRKDFQFYKVREINNYHHAHDAYLNAVVGTALIKKYPKLESEFVYGDYKVYDVRKMIAKSEQEIGKATAKYFFYSNIMNFFKTEITLANGEIRKRPLIETNGETGEIVWDKGRDFATVRKVLSMPQVNIVKKTEVQTGGFSKESILPKRNSDKLIARKKDWDPKKYGGFDSPTVAYSVLVVAKVEKGKSKKLKSVKELLGITIMERSSFEKNPIDFLEAKGYKEVKKDLIIKLPKYSLFELENGRKRMLASAGELQKGNELALPSKYVNFLYLASHYEKLKGSPEDNEQKQLFVEQHKHYLDEIIEQISEFSKRVILADANLDKVLSAYNKHRDKPIREQAENIIHLFTLTNLGAPAAFKYFDTTIDRKRYTSTKEVLDATLIHQSITGLYETRIDLSQLGGDGGGGGGSGGTLNIEDEYRLHETSKEPDVPLGSTWLSDFPQAWAETGGMGLAVRQAPLIIPLKATSTPVSIKQYPMSQEARLGIKPHIQRLLDQGILVPCQSPWNTPLLPVKKPGTNDYRPVQDLREVNKRVEDIHPTVPNPYNLLSGLPPSHQWYTVLDLKDAFFCLRLHPTSQPLFAFEWRDPEMGISGQLTWTRLPQGFKNSPTLFNEALHRDLADFRIQHPDLILLQYVDDLLLAATSEQDCQRGTRALLQTLGNLGYRASAKKAQICQKQVKYLGYLLKEGQRWLTEARKETVMGQPTPKTPRQLREFLGKAGFCRLFIPGFAEMAAPLYPLTKPGTLFNWGPDQQKAYQEIKQALLTAPALGLPDLTKPFELFVDEKQGYAKGVLTQKLGPWRRPVAYLSKKLDPVAAGWPPCLRMVAAIAVLTKDAGKLTMGQPLVILAPHAVEALVKQPPDRWLSNARMTHYQAMLLDTDRVQFGPVVALNPATLLPLPEKEAPHDCLEILAETHGTRPDLTDQPIPDADYTWYTDGSSFLQEGQRRAGAAVTTETEVIWARALPAGTSAQRAELIALTQALKMAEGKKLNVYTDSRYAFATAHVHGEIYRRRGWLTSEGREIKNKNEILALLKALFLPKRLSIIHCPGHQKGNSAEARGNRMADQAAREAAMKAVLETSTLLAGKRTADGSEFEKRTADGSEFESPKKKAKVE

SEQ ID NO: 6118 - protein, 2101 aa, synthetic construct
MPAAKRVKLDGGDKKYSIGLDIGTNSVGWAVITDEYKVPSKKFKVLGNTDRHSIKKNLIGALLFDSGETAEATRLKRTARRRYTRRKNRICYLQEIFSNEMAKVDDSFFHRLEESFLVEEDKKHERHPIFGNIVDEVAYHEKYPTIYHLRKKLVDSTDKADLRLIYLALAHMIKFRGHFLIEGDLNPDNSDVDKLFIQLVQTYNQLFEENPINASGVDAKAILSARLSKSRRLENLIAQLPGEKKNGLFGNLIALSLGLTPNFKSNFDLAEDAKLQLSKDTYDDDLDNLLAQIGDQYADLFLAAKNLSDAILLSDILRVNTEITKAPLSASMIKRYDEHHQDLTLLKALVRQQLPEKYKEIFFDQSKNGYAGYIDGGASQEEFYKFIKPILEKMDGTEELLVKLNREDLLRKQRTFDNGSIPHQIHLGELHAILRRQEDFYPFLKDNREKIEKILTFRIPYYVGPLARGNSRFAWMTRKSEETITPWNFEEVVDKGASAQSFIERMTNFDKNLPNEKVLPKHSLLYEYFTVYNELTKVKYVTEGMRKPAFLSGEQKKAIVDLLFKTNRKVTVKQLKEDYFKKIECFDSVEISGVEDRFNASLGTYHDLLKIIKDKDFLDNEENEDILEDIVLTLTLFEDREMIEERLKTYAHLFDDKVMKQLKRRRYTGWGRLSRKLINGIRDKQSGKTILDFLKSDGFANRNFMQLIHDDSLTFKEDIQKAQVSGQGDSLHEHIANLAGSPAIKKGILQTVKVVDELVKVMGRHKPENIVIEMARENQTTQKGQKNSRERMKRIEEGIKELGSQILKEHPVENTQLQNEKLYLYYLQNGRDMYVDQELDINRLSDYDVDHIVPQSFLKDDSIDNKVLTRSDKARGKSDNVPSEEVVKKMKNYWRQLLNAKLITQRKFDNLTKAERGGLSELDKAGFIKRQLVETRQITKHVAQILDSRMNTKYDENDKLIREVKVITLKSKLVSDFRKDFQFYKVREINNYHHAHDAYLNAVVGTALIKKYPKLESEFVYGDYKVYDVRKMIAKSEQEIGKATAKYFFYSNIMNFFKTEITLANGEIRKRPLIETNGETGEIVWDKGRDFATVRKVLSMPQVNIVKKTEVQTGGFSKESILPKRNSDKLIARKKDWDPKKYGGFDSPTVAYSVLVVAKVEKGKSKKLKSVKELLGITIMERSSFEKNPIDFLEAKGYKEVKKDLIIKLPKYSLFELENGRKRMLASAGELQKGNELALPSKYVNFLYLASHYEKLKGSPEDNEQKQLFVEQHKHYLDEIIEQISEFSKRVILADANLDKVLSAYNKHRDKPIREQAENIIHLFTLTNLGAPAAFKYFDTTIDRKRYTSTKEVLDATLIHQSITGLYETRIDLSQLGGDGGGGGGSGGGGSGGTVSLQDEHRLFDIPVTTSLPDVWLQDFPQAWAETGGLGRAKCQAPIIIDLKPTAVPVSIKQYPMSLEAHMGIRQHIIKFLELGVLRPCRSPWNTPLLPVKKPGTQDYRPVQDLREINKRTVDIHPTVPNPYNLLSTLKPDYSWYTVLDLKDAFFCLPLAPQSQELFAFEWKDPERGISGQLTWTRLPQGFKNSPTLFNEALHRDLTDFRTQHPEVTLLQYVDDLLLAAPTKKACTQGTRHLLQELGEKGYRASAKKAQICQTKVTYLGYILSEGKRWLTPGRIETVARIPPPRNPREVREFLGKAGFCRLFIPGFAELAAPLYALTKPSTPFTWQTEHQLAFEALKKALLSAPALGLPDTSKPFTLFLDERQGIAKGVLTQKLGPWKRPVAYLSKKLDPVAAGWPPCLRIMAATAMLVKDSAKLTLGQPLTVITPHTLEAIVRQPPDRWITNARLTHYQALLLDTDRVQFGPPVTLNPATLLPVPENQPSPHDCRQVLAETHGTREDLKDQELPDADHTWYTDGSSYLDSGTRRAGAAVVDGHNTIWAQSLPPGTSAQKAELIALTKALELSKGKKANIYTDSRYAFATAHTHGSIYERRGWLTSEGKEIKNKAEIIALLKALFLPQEVAIIHCPGHQKGQDPVAVGNRQADRVARQAAMAEVLTLATEPDNTSHITAGKRTADGSEFEKRTADGSEFESPKKKAKVE

SEQ ID NO: 6119 - protein, 2175 aa, synthetic construct
MPAAKRVKLDGGDKKYSIGLDIGTNSVGWAVITDEYKVPSKKFKVLGNTDRHSIKKNLIGALLFDSGETAEATRLKRTARRRYTRRKNRICYLQEIFSNEMAKVDDSFFHRLEESFLVEEDKKHERHPIFGNIVDEVAYHEKYPTIYHLRKKLVDSTDKADLRLIYLALAHMIKFRGHFLIEGDLNPDNSDVDKLFIQLVQTYNQLFEENPINASGVDAKAILSARLSKSRRLENLIAQLPGEKKNGLFGNLIALSLGLTPNFKSNFDLAEDAKLQLSKDTYDDDLDNLLAQIGDQYADLFLAAKNLSDAILLSDILRVNTEITKAPLSASMIKRYDEHHQDLTLLKALVRQQLPEKYKEIFFDQSKNGYAGYIDGGASQEEFYKFIKPILEKMDGTEELLVKLNREDLLRKQRTFDNGSIPHQIHLGELHAILRRQEDFYPFLKDNREKIEKILTFRIPYYVGPLARGNSRFAWMTRKSEETITPWNFEEVVDKGASAQSFIERMTNFDKNLPNEKVLPKHSLLYEYFTVYNELTKVKYVTEGMRKPAFLSGEQKKAIVDLLFKTNRKVTVKQLKEDYFKKIECFDSVEISGVEDRFNASLGTYHDLLKIIKDKDFLDNEENEDILEDIVLTLTLFEDREMIEERLKTYAHLFDDKVMKQLKRRRYTGWGRLSRKLINGIRDKQSGKTILDFLKSDGFANRNFMQLIHDDSLTFKEDIQKAQVSGQGDSLHEHIANLAGSPAIKKGILQTVKVVDELVKVMGRHKPENIVIEMARENQTTQKGQKNSRERMKRIEEGIKELGSQILKEHPVENTQLQNEKLYLYYLQNGRDMYVDQELDINRLSDYDVDHIVPQSFLKDDSIDNKVLTRSDKARGKSDNVPSEEVVKKMKNYWRQLLNAKLITQRKFDNLTKAERGGLSELDKAGFIKRQLVETRQITKHVAQILDSRMNTKYDENDKLIREVKVITLKSKLVSDFRKDFQFYKVREINNYHHAHDAYLNAVVGTALIKKYPKLESEFVYGDYKVYDVRKMIAKSEQEIGKATAKYFFYSNIMNFFKTEITLANGEIRKRPLIETNGETGEIVWDKGRDFATVRKVLSMPQVNIVKKTEVQTGGFSKESILPKRNSDKLIARKKDWDPKKYGGFDSPTVAYSVLVVAKVEKGKSKKLKSVKELLGITIMERSSFEKNPIDFLEAKGYKEVKKDLIIKLPKYSLFELENGRKRMLASAGELQKGNELALPSKYVNFLYLASHYEKLKGSPEDNEQKQLFVEQHKHYLDEIIEQISEFSKRVILADANLDKVLSAYNKHRDKPIREQAENIIHLFTLTNLGAPAAFKYFDTTIDRKRYTSTKEVLDATLIHQSITGLYETRIDLSQLGGDGGGGGGSGGGGSGGMNPLQLLQPLPAEIKGTKLLAHWNSGATITCIPESFLEDEQPIKKTLIKTIHGEKQQNVYYVTFKVKGRKVEAEVIASPYEYILLSPTDVPWLTQQPLQLTILVPLQEYQEKILSKTALPEDQKQQLKTLFVKYDNLWQHWENQVGHRKIRPHNIATGDYPPRPQKQYPINPKAKPSIQIVIDDLLKQGVLTPQNSTMNTPVYPVPKPDGRWRMVLDYREVNKTIPLTAAQNQHSAGILATIVRQKYKTTLDLANGFWAHPITPESYWLTAFTWQGKQYCWTRLPQGFLNSPALFNADVVDLLKEIPNVQVYVDDIYLSHDDPKEHVQQLEKVFQILLQAGYVVSLKKSEIGQKTVEFLGFNITKEGRGLTDTFKTKLLNITPPKDLKQLQSILGKLNFARNFIPNFAELVQPLYNLIAPAKGKYIEWSEENTKQLNMVIEALNTASNLEERLPEQRLVIKVNTSPSAGYVRYYNETGKKPIMYLNYVFSKAELKFSMLEKLLTTMHKALIKAMDLAMGQEILVYSPIVSMTKIQKTPLPERKALPIRWITWMTYLEDPRIQFHYDKTLPELKHIPDVYTSSQSPVKHPSQYEGVFYTDGSAIKSPDPTKSNNAGMGIVHATYKPEYQVLNQWSIPLGNHTAQMAEIAAVEFACKKALKIPGPVLVITDSFYVAESANKELPYWKSNGFVNNKKKPLKHISKWKSIAECLSMKPDITIQHEKGISLQIPVFILKGNALADKLATQGSYVVNAGKRTADGSEFEKRTADGSEFESPKKKAKVE

SEQ ID NO: 6120 - protein, 2217 aa, synthetic construct
MPAAKRVKLDGGDKKYSIGLDIGTNSVGWAVITDEYKVPSKKFKVLGNTDRHSIKKNLIGALLFDSGETAEATRLKRTARRRYTRRKNRICYLQEIFSNEMAKVDDSFFHRLEESFLVEEDKKHERHPIFGNIVDEVAYHEKYPTIYHLRKKLVDSTDKADLRLIYLALAHMIKFRGHFLIEGDLNPDNSDVDKLFIQLVQTYNQLFEENPINASGVDAKAILSARLSKSRRLENLIAQLPGEKKNGLFGNLIALSLGLTPNFKSNFDLAEDAKLQLSKDTYDDDLDNLLAQIGDQYADLFLAAKNLSDAILLSDILRVNTEITKAPLSASMIKRYDEHHQDLTLLKALVRQQLPEKYKEIFFDQSKNGYAGYIDGGASQEEFYKFIKPILEKMDGTEELLVKLNREDLLRKQRTFDNGSIPHQIHLGELHAILRRQEDFYPFLKDNREKIEKILTFRIPYYVGPLARGNSRFAWMTRKSEETITPWNFEEVVDKGASAQSFIERMTNFDKNLPNEKVLPKHSLLYEYFTVYNELTKVKYVTEGMRKPAFLSGEQKKAIVDLLFKTNRKVTVKQLKEDYFKKIECFDSVEISGVEDRFNASLGTYHDLLKIIKDKDFLDNEENEDILEDIVLTLTLFEDREMIEERLKTYAHLFDDKVMKQLKRRRYTGWGRLSRKLINGIRDKQSGKTILDFLKSDGFANRNFMQLIHDDSLTFKEDIQKAQVSGQGDSLHEHIANLAGSPAIKKGILQTVKVVDELVKVMGRHKPENIVIEMARENQTTQKGQKNSRERMKRIEEGIKELGSQILKEHPVENTQLQNEKLYLYYLQNGRDMYVDQELDINRLSDYDVDHIVPQSFLKDDSIDNKVLTRSDKARGKSDNVPSEEVVKKMKNYWRQLLNAKLITQRKFDNLTKAERGGLSELDKAGFIKRQLVETRQITKHVAQILDSRMNTKYDENDKLIREVKVITLKSKLVSDFRKDFQFYKVREINNYHHAHDAYLNAVVGTALIKKYPKLESEFVYGDYKVYDVRKMIAKSEQEIGKATAKYFFYSNIMNFFKTEITLANGEIRKRPLIETNGETGEIVWDKGRDFATVRKVLSMPQVNIVKKTEVQTGGFSKESILPKRNSDKLIARKKDWDPKKYGGFDSPTVAYSVLVVAKVEKGKSKKLKSVKELLGITIMERSSFEKNPIDFLEAKGYKEVKKDLIIKLPKYSLFELENGRKRMLASAGELQKGNELALPSKYVNFLYLASHYEKLKGSPEDNEQKQLFVEQHKHYLDEIIEQISEFSKRVILADANLDKVLSAYNKHRDKPIREQAENIIHLFTLTNLGAPAAFKYFDTTIDRKRYTSTKEVLDATLIHQSITGLYETRIDLSQLGGDGGGGGGSGGGGSGGTLGDQGSRGSDPLPEPRVTLTVEGIPTEFLVNTGAEHSVLTKPMGKMGSKRTVVAGATGSKVYPWTTKRLLKIGQKQVTHSFLVIPECPAPLLGRDLLTKLKAQIQFSTEGPQVTWEDRPAMCLVLNLEEEYRLHEKPVPPSIDPSWLQLFPMVWAEKAGMGLANQVPPVVVELKSDASPVAVRQYPMSKEAREGIRPHIQRFLDLGILVPCQSPWNTPLLPVKKPGTNDYRPVQDLREVNKRVQDIHPTVPNPYNLLSSLPPSHTWYSVLDLKDAFFCLKLHPNSQPLFAFEWRDPEKGNTGQLTWTRLPQGFKNSPTLFDEALHRDLASFRALNPQVVMLQYVDDLLVAAPTYRDCKEGTRRLLQELSKLGYRVSAKKAQLCREEVTYLGYLLKGGKRWLTPARKATVMKIPTPTTPRQVREFLGTAGFCRLWIPGFASLAAPLYPLTREKVPFTWTEAHQEAFGRIKEALLSAPALALPDLTKPFALYVDEKEGVARGVLTQTLGPWRRPVAYLSKKLDPVASGWPTCLKAIAAVALLLKDADKLTLGQNVLVIAPHNLESIVRQPPDRWMTNARMTHYQSLLLNERVSFAPPAILNPATLLPVESDDTPIHICSEILAEETGTRPDLRDQPLPGVPAWYTDGSSFIMDGRRQAGAAIVDNKRTVWASNLPEGTSAQKAELIALTQALRLAEGKSINIYTDSRYAFATAHVHGAIYKQRGLLTSAGKDIKNKEEILALLEAIHLPKRVAIIHCPGHQRGTDPVATGNRKADEAAKQAAQSTRILTETTKNAGKRTADGSEFEKRTADGSEFESPKKKAKVE

SEQ ID NO: 6121 - protein, 2126 aa, synthetic construct
MPAAKRVKLDGGDKKYSIGLDIGTNSVGWAVITDEYKVPSKKFKVLGNTDRHSIKKNLIGALLFDSGETAEATRLKRTARRRYTRRKNRICYLQEIFSNEMAKVDDSFFHRLEESFLVEEDKKHERHPIFGNIVDEVAYHEKYPTIYHLRKKLVDSTDKADLRLIYLALAHMIKFRGHFLIEGDLNPDNSDVDKLFIQLVQTYNQLFEENPINASGVDAKAILSARLSKSRRLENLIAQLPGEKKNGLFGNLIALSLGLTPNFKSNFDLAEDAKLQLSKDTYDDDLDNLLAQIGDQYADLFLAAKNLSDAILLSDILRVNTEITKAPLSASMIKRYDEHHQDLTLLKALVRQQLPEKYKEIFFDQSKNGYAGYIDGGASQEEFYKFIKPILEKMDGTEELLVKLNREDLLRKQRTFDNGSIPHQIHLGELHAILRRQEDFYPFLKDNREKIEKILTFRIPYYVGPLARGNSRFAWMTRKSEETITPWNFEEVVDKGASAQSFIERMTNFDKNLPNEKVLPKHSLLYEYFTVYNELTKVKYVTEGMRKPAFLSGEQKKAIVDLLFKTNRKVTVKQLKEDYFKKIECFDSVEISGVEDRFNASLGTYHDLLKIIKDKDFLDNEENEDILEDIVLTLTLFEDREMIEERLKTYAHLFDDKVMKQLKRRRYTGWGRLSRKLINGIRDKQSGKTILDFLKSDGFANRNFMQLIHDDSLTFKEDIQKAQVSGQGDSLHEHIANLAGSPAIKKGILQTVKVVDELVKVMGRHKPENIVIEMARENQTTQKGQKNSRERMKRIEEGIKELGSQILKEHPVENTQLQNEKLYLYYLQNGRDMYVDQELDINRLSDYDVDHIVPQSFLKDDSIDNKVLTRSDKARGKSDNVPSEEVVKKMKNYWRQLLNAKLITQRKFDNLTKAERGGLSELDKAGFIKRQLVETRQITKHVAQILDSRMNTKYDENDKLIREVKVITLKSKLVSDFRKDFQFYKVREINNYHHAHDAYLNAVVGTALIKKYPKLESEFVYGDYKVYDVRKMIAKSEQEIGKATAKYFFYSNIMNFFKTEITLANGEIRKRPLIETNGETGEIVWDKGRDFATVRKVLSMPQVNIVKKTEVQTGGFSKESILPKRNSDKLIARKKDWDPKKYGGFDSPTVAYSVLVVAKVEKGKSKKLKSVKELLGITIMERSSFEKNPIDFLEAKGYKEVKKDLIIKLPKYSLFELENGRKRMLASAGELQKGNELALPSKYVNFLYLASHYEKLKGSPEDNEQKQLFVEQHKHYLDEIIEQISEFSKRVILADANLDKVLSAYNKHRDKPIREQAENIIHLFTLTNLGAPAAFKYFDTTIDRKRYTSTKEVLDATLIHQSITGLYETRIDLSQLGGDGGGGGGSGGGGSGGLLGRDLLTKLKAQIQFSTEGPQVTWEDRPAMCLVLNLEEEYRLHEKPVPPSIDPSWLQLFPMVWAEKAGMGLANQVPPVVVELKSDASPVAVRQYPMSKEAREGIRPHIQRFLDLGILVPCQSPWNTPLLPVKKPGTNDYRPVQDLREVNKRVQDIHPTVPNPYNLLSSLPPSHTWYSVLDLKDAFFCLKLHPNSQPLFAFEWRDPEKGNTGQLTWTRLPQGFKNSPTLFNEALHRDLASFRALNPQVVMLQYVDDLLVAAPTYRDCKEGTRRLLQELSKLGYRVSAKKAQLCREEVTYLGYLLKGGKRWLTPARKATVMKIPTPTTPRQVREFLGTAGFCRLWIPGFASLAAPLYPLTRPKVPFTWTEAHQEAFGRIKEALLSAPALALPDLTKPFALYVDEKEGVARGVLTQTLGPWRRPVAYLSKKLDPVASGWPTCLKAIAAVALLLKDADKLTLGQNVLVIAPHNLESIVRQPPDRWMTNARMTHYQSLLLNERVSFAPPAILNPATLLPVESDDTPIHICSEILAEETGTRPDLRDQPLPGVPAWYTDGSSFIMDGRRQAGAAIVDNKRTVWASNLPEGTSAQKAELIALTQALRLAEGKSINIYTDSRYAFATAHVHGAIYKQRGWLTSAGKDIKNKEEILALLEAIHLPKRVAIIHCPGHQRGTDPVATGNRKADEAAKQAAQSTRILTETTKNAGKRTADGSEFEKRTADGSEFESPKKKAKVE

SEQ ID NO: 6122 - protein, 2217 aa, synthetic construct
MPAAKRVKLDGGDKKYSIGLDIGTNSVGWAVITDEYKVPSKKFKVLGNTDRHSIKKNLIGALLFDSGETAEATRLKRTARRRYTRRKNRICYLQEIFSNEMAKVDDSFFHRLEESFLVEEDKKHERHPIFGNIVDEVAYHEKYPTIYHLRKKLVDSTDKADLRLIYLALAHMIKFRGHFLIEGDLNPDNSDVDKLFIQLVQTYNQLFEENPINASGVDAKAILSARLSKSRRLENLIAQLPGEKKNGLFGNLIALSLGLTPNFKSNFDLAEDAKLQLSKDTYDDDLDNLLAQIGDQYADLFLAAKNLSDAILLSDILRVNTEITKAPLSASMIKRYDEHHQDLTLLKALVRQQLPEKYKEIFFDQSKNGYAGYIDGGASQEEFYKFIKPILEKMDGTEELLVKLNREDLLRKQRTFDNGSIPHQIHLGELHAILRRQEDFYPFLKDNREKIEKILTFRIPYYVGPLARGNSRFAWMTRKSEETITPWNFEEVVDKGASAQSFIERMTNFDKNLPNEKVLPKHSLLYEYFTVYNELTKVKYVTEGMRKPAFLSGEQKKAIVDLLFKTNRKVTVKQLKEDYFKKIECFDSVEISGVEDRFNASLGTYHDLLKIIKDKDFLDNEENEDILEDIVLTLTLFEDREMIEERLKTYAHLFDDKVMKQLKRRRYTGWGRLSRKLINGIRDKQSGKTILDFLKSDGFANRNFMQLIHDDSLTFKEDIQKAQVSGQGDSLHEHIANLAGSPAIKKGILQTVKVVDELVKVMGRHKPENIVIEMARENQTTQKGQKNSRERMKRIEEGIKELGSQILKEHPVENTQLQNEKLYLYYLQNGRDMYVDQELDINRLSDYDVDHIVPQSFLKDDSIDNKVLTRSDKARGKSDNVPSEEVVKKMKNYWRQLLNAKLITQRKFDNLTKAERGGLSELDKAGFIKRQLVETRQITKHVAQILDSRMNTKYDENDKLIREVKVITLKSKLVSDFRKDFQFYKVREINNYHHAHDAYLNAVVGTALIKKYPKLESEFVYGDYKVYDVRKMIAKSEQEIGKATAKYFFYSNIMNFFKTEITLANGEIRKRPLIETNGETGEIVWDKGRDFATVRKVLSMPQVNIVKKTEVQTGGFSKESILPKRNSDKLIARKKDWDPKKYGGFDSPTVAYSVLVVAKVEKGKSKKLKSVKELLGITIMERSSFEKNPIDFLEAKGYKEVKKDLIIKLPKYSLFELENGRKRMLASAGELQKGNELALPSKYVNFLYLASHYEKLKGSPEDNEQKQLFVEQHKHYLDEIIEQISEFSKRVILADANLDKVLSAYNKHRDKPIREQAENIIHLFTLTNLGAPAAFKYFDTTIDRKRYTSTKEVLDATLIHQSITGLYETRIDLSQLGGDGGGGGGSGGGGSGGTLGDQGSRGSDPLPEPRVTLTVEGIPTEFLVNTGAEHSVLTKPMGKMGSKRTVVAGATGSKVYPWTTKRLLKIGQKQVTHSFLVIPECPAPLLGRDLLTKLKAQIQFSTEGPQVTWEDRPAMCLVLNLEEEYRLHEKPVPPSIDPSWLQLFPMVWAEKAGMGLANQVPPVVVELKSDASPVAVRQYPMSKEAREGIRPHIQRFLDLGILVPCQSPWNTPLLPVKKPGTNDYRPVQDLREVNKRVQDIHPTVPNPYNLLSSLPPSHTWYSVLDLKDAFFCLKLHPNSQPLFAFEWRDPEKGNTGQLTWTRLPQGFKNSPTLFNEALHRDLASFRALNPQVVMLQYVDDLLVAAPTYRDCKEGTRRLLQELSKLGYRVSAKKAQLCREEVTYLGYLLKGGKRWLTPARKATVMKIPTPTTPRQVREFLGTAGFCRLWIPGFASLAAPLYPLTRPKVPFTWTEAHQEAFGRIKEALLSAPALALPDLTKPFALYVDEKEGVARGVLTQTLGPWRRPVAYLSKKLDPVASGWPTCLKAIAAVALLLKDADKLTLGQNVLVIAPHNLESIVRQPPDRWMTNARMTHYQSLLLNERVSFAPPAILNPATLLPVESDDTPIHICSEILAEETGTRPDLRDQPLPGVPAWYTDGSSFIMDGRRQAGAAIVDNKRTVWASNLPEGTSAQKAELIALTQALRLAEGKSINIYTDSRYAFATAHVHGAIYKQRGWLTSAGKDIKNKEEILALLEAIHLPKRVAIIHCPGHQRGTDPVATGNRKADEAAKQAAQSTRILTETTKNAGKRTADGSEFEKRTADGSEFESPKKKAKVE

SEQ ID NO: 6123 - protein, 2217 aa, synthetic construct
MPAAKRVKLDGGDKKYSIGLDIGTNSVGWAVITDEYKVPSKKFKVLGNTDRHSIKKNLIGALLFDSGETAEATRLKRTARRRYTRRKNRICYLQEIFSNEMAKVDDSFFHRLEESFLVEEDKKHERHPIFGNIVDEVAYHEKYPTIYHLRKKLVDSTDKADLRLIYLALAHMIKFRGHFLIEGDLNPDNSDVDKLFIQLVQTYNQLFEENPINASGVDAKAILSARLSKSRRLENLIAQLPGEKKNGLFGNLIALSLGLTPNFKSNFDLAEDAKLQLSKDTYDDDLDNLLAQIGDQYADLFLAAKNLSDAILLSDILRVNTEITKAPLSASMIKRYDEHHQDLTLLKALVRQQLPEKYKEIFFDQSKNGYAGYIDGGASQEEFYKFIKPILEKMDGTEELLVKLNREDLLRKQRTFDNGSIPHQIHLGELHAILRRQEDFYPFLKDNREKIEKILTFRIPYYVGPLARGNSRFAWMTRKSEETITPWNFEEVVDKGASAQSFIERMTNFDKNLPNEKVLPKHSLLYEYFTVYNELTKVKYVTEGMRKPAFLSGEQKKAIVDLLFKTNRKVTVKQLKEDYFKKIECFDSVEISGVEDRFNASLGTYHDLLKIIKDKDFLDNEENEDILEDIVLTLTLFEDREMIEERLKTYAHLFDDKVMKQLKRRRYTGWGRLSRKLINGIRDKQSGKTILDFLKSDGFANRNFMQLIHDDSLTFKEDIQKAQVSGQGDSLHEHIANLAGSPAIKKGILQTVKVVDELVKVMGRHKPENIVIEMARENQTTQKGQKNSRERMKRIEEGIKELGSQILKEHPVENTQLQNEKLYLYYLQNGRDMYVDQELDINRLSDYDVDHIVPQSFLKDDSIDNKVLTRSDKARGKSDNVPSEEVVKKMKNYWRQLLNAKLITQRKFDNLTKAERGGLSELDKAGFIKRQLVETRQITKHVAQILDSRMNTKYDENDKLIREVKVITLKSKLVSDFRKDFQFYKVREINNYHHAHDAYLNAVVGTALIKKYPKLESEFVYGDYKVYDVRKMIAKSEQEIGKATAKYFFYSNIMNFFKTEITLANGEIRKRPLIETNGETGEIVWDKGRDFATVRKVLSMPQVNIVKKTEVQTGGFSKESILPKRNSDKLIARKKDWDPKKYGGFDSPTVAYSVLVVAKVEKGKSKKLKSVKELLGITIMERSSFEKNPIDFLEAKGYKEVKKDLIIKLPKYSLFELENGRKRMLASAGELQKGNELALPSKYVNFLYLASHYEKLKGSPEDNEQKQLFVEQHKHYLDEIIEQISEFSKRVILADANLDKVLSAYNKHRDKPIREQAENIIHLFTLTNLGAPAAFKYFDTTIDRKRYTSTKEVLDATLIHQSITGLYETRIDLSQLGGDGGGGGGSGGGGSGGTLGDQGSRGSDPLPEPRVTLTVEGIPTEFLVNTGAEHSVLTKPMGKMGSKRTVVAGATGSKVYPWTTKRLLKIGQKQVTHSFLVIPECPAPLLGRDLLTKLKAQIQFSTEGPQVTWEDRPAMCLVLNLEEEYRLHEKPVPPSIDPSWLQLFPMVWAEKAGMGLANQVPPVVVELKSDASPVAVRQYPMSKEAREGIRPHIQRFLDLGILVPCQSPWNTPLLPVKKPGTNDYRPVQDLREVNKRVQDIHPTVPNPYNLLSSLPPSHTWYSVLDLKDAFFCLKLHPNSQPLFAFEWRDPEKGNTGQLTWTRLPQGFKNSPTLFNEALHRDLASFRALNPQVVMLQYVDDLLVAAPTYRDCKEGTRRLLQELSKLGYRVSAKKAQLCREEVTYLGYLLKGGKRWLTPARKATVMKIPTPTTPRQVREFLGKAGFCRLFIPGFASLAAPLYPLTRPKVPFTWTEAHQEAFGRIKEALLSAPALALPDLTKPFALYVDEKEGVARGVLTQTLGPWRRPVAYLSKKLDPVASGWPTCLKAIAAVALLLKDADKLTLGQNVLVIAPHNLESIVRQPPDRWMTNARMTHYQSLLLNERVSFAPPAILNPATLLPVESDDTPIHICSEILAEETGTRPDLRDQPLPGVPAWYTDGSSFIMDGRRQAGAAIVDNKRTVWASNLPEGTSAQKAELIALTQALRLAEGKSINIYTDSRYAFATAHVHGAIYKQRGWLTSAGKDIKNKEEILALLEAIHLPKRVAIIHCPGHQRGTDPVATGNRKADEAAKQAAQSTRILTETTKNAGKRTADGSEFEKRTADGSEFESPKKKAKVE

SEQ ID NO: 6124 - protein, 2095 aa, synthetic construct
MPAAKRVKLDGGDKKYSIGLDIGTNSVGWAVITDEYKVPSKKFKVLGNTDRHSIKKNLIGALLFDSGETAEATRLKRTARRRYTRRKNRICYLQEIFSNEMAKVDDSFFHRLEESFLVEEDKKHERHPIFGNIVDEVAYHEKYPTIYHLRKKLVDSTDKADLRLIYLALAHMIKFRGHFLIEGDLNPDNSDVDKLFIQLVQTYNQLFEENPINASGVDAKAILSARLSKSRRLENLIAQLPGEKKNGLFGNLIALSLGLTPNFKSNFDLAEDAKLQLSKDTYDDDLDNLLAQIGDQYADLFLAAKNLSDAILLSDILRVNTEITKAPLSASMIKRYDEHHQDLTLLKALVRQQLPEKYKEIFFDQSKNGYAGYIDGGASQEEFYKFIKPILEKMDGTEELLVKLNREDLLRKQRTFDNGSIPHQIHLGELHAILRRQEDFYPFLKDNREKIEKILTFRIPYYVGPLARGNSRFAWMTRKSEETITPWNFEEVVDKGASAQSFIERMTNFDKNLPNEKVLPKHSLLYEYFTVYNELTKVKYVTEGMRKPAFLSGEQKKAIVDLLFKTNRKVTVKQLKEDYFKKIECFDSVEISGVEDRFNASLGTYHDLLKIIKDKDFLDNEENEDILEDIVLTLTLFEDREMIEERLKTYAHLFDDKVMKQLKRRRYTGWGRLSRKLINGIRDKQSGKTILDFLKSDGFANRNFMQLIHDDSLTFKEDIQKAQVSGQGDSLHEHIANLAGSPAIKKGILQTVKVVDELVKVMGRHKPENIVIEMARENQTTQKGQKNSRERMKRIEEGIKELGSQILKEHPVENTQLQNEKLYLYYLQNGRDMYVDQELDINRLSDYDVDHIVPQSFLKDDSIDNKVLTRSDKARGKSDNVPSEEVVKKMKNYWRQLLNAKLITQRKFDNLTKAERGGLSELDKAGFIKRQLVETRQITKHVAQILDSRMNTKYDENDKLIREVKVITLKSKLVSDFRKDFQFYKVREINNYHHAHDAYLNAVVGTALIKKYPKLESEFVYGDYKVYDVRKMIAKSEQEIGKATAKYFFYSNIMNFFKTEITLANGEIRKRPLIETNGETGEIVWDKGRDFATVRKVLSMPQVNIVKKTEVQTGGFSKESILPKRNSDKLIARKKDWDPKKYGGFDSPTVAYSVLVVAKVEKGKSKKLKSVKELLGITIMERSSFEKNPIDFLEAKGYKEVKKDLIIKLPKYSLFELENGRKRMLASAGELQKGNELALPSKYVNFLYLASHYEKLKGSPEDNEQKQLFVEQHKHYLDEIIEQISEFSKRVILADANLDKVLSAYNKHRDKPIREQAENIIHLFTLTNLGAPAAFKYFDTTIDRKRYTSTKEVLDATLIHQSITGLYETRIDLSQLGGDGGGGGGSGGGGSGGTLNLEDEYRLYETSAEPEVSPGSTWLSDFPQAWAETGGMGLAVRQAPLIIPLKATSTPVSIKQYPMSQEAKLGIKPHIQRLLDQGILVPCQSPWNTPLLPVKKPGTNDYRPVQDLREVNKRVEDIHPTVPNPYNLLSGLPPSHRWYTVLDLKDAFFCLRLHPTSQPLFAFEWRDPGMGISGQLTWTRLPQGFKNSPTLFNEALHRDLADFRIQHPDLILLQYVDDILLAATSELDCQQGTRALLLTLGNLGYRASAKKAQLCQKQVKYLGYLLKEGQRWLTEARKETVMGQPTPKTPRQLREFLGTAGFCRLWIPGFAEMAAPLYPLTKPGTLFNWGPDQQKAYQEIKQALLTAPALGLPDLTKPFELFVDEKQGYAKGVLTQKLGPWRRPVAYLSKKLDPVAAGWPPCLRMVAAIAVLRKDAGKLTMGQPLVILAPHAVEALVKQPPDRWLSNARMTHYQAMLLDTDRVQFGPVVALNPATLLPLPEEGAPHDCLEILAETHGTRPDLTDQPIPDADHTWYTDGSSFLQEGQRKAGAAVTTETEVIWARALPAGTSAQRAELIALTQALKMAEGKRLNVYTDSRYAFATAHIHGEIYRRRGWLTSEGREIKNKSEILALLKALFLPKRLSIIHCLGHQKGDSAEARGNRLADQAAREAAIKTPPDTSTLLAGKRTADGSEFEKRTADGSEFESPKKKAKVE

SEQ ID NO: 6125 - protein, 2095 aa, synthetic construct
MPAAKRVKLDGGDKKYSIGLDIGTNSVGWAVITDEYKVPSKKFKVLGNTDRHSIKKNLIGALLFDSGETAEATRLKRTARRRYTRRKNRICYLQEIFSNEMAKVDDSFFHRLEESFLVEEDKKHERHPIFGNIVDEVAYHEKYPTIYHLRKKLVDSTDKADLRLIYLALAHMIKFRGHFLIEGDLNPDNSDVDKLFIQLVQTYNQLFEENPINASGVDAKAILSARLSKSRRLENLIAQLPGEKKNGLFGNLIALSLGLTPNFKSNFDLAEDAKLQLSKDTYDDDLDNLLAQIGDQYADLFLAAKNLSDAILLSDILRVNTEITKAPLSASMIKRYDEHHQDLTLLKALVRQQLPEKYKEIFFDQSKNGYAGYIDGGASQEEFYKFIKPILEKMDGTEELLVKLNREDLLRKQRTFDNGSIPHQIHLGELHAILRRQEDFYPFLKDNREKIEKILTFRIPYYVGPLARGNSRFAWMTRKSEETITPWNFEEVVDKGASAQSFIERMTNFDKNLPNEKVLPKHSLLYEYFTVYNELTKVKYVTEGMRKPAFLSGEQKKAIVDLLFKTNRKVTVKQLKEDYFKKIECFDSVEISGVEDRFNASLGTYHDLLKIIKDKDFLDNEENEDILEDIVLTLTLFEDREMIEERLKTYAHLFDDKVMKQLKRRRYTGWGRLSRKLINGIRDKQSGKTILDFLKSDGFANRNFMQLIHDDSLTFKEDIQKAQVSGQGDSLHEHIANLAGSPAIKKGILQTVKVVDELVKVMGRHKPENIVIEMARENQTTQKGQKNSRERMKRIEEGIKELGSQILKEHPVENTQLQNEKLYLYYLQNGRDMYVDQELDINRLSDYDVDHIVPQSFLKDDSIDNKVLTRSDKARGKSDNVPSEEVVKKMKNYWRQLLNAKLITQRKFDNLTKAERGGLSELDKAGFIKRQLVETRQITKHVAQILDSRMNTKYDENDKLIREVKVITLKSKLVSDFRKDFQFYKVREINNYHHAHDAYLNAVVGTALIKKYPKLESEFVYGDYKVYDVRKMIAKSEQEIGKATAKYFFYSNIMNFFKTEITLANGEIRKRPLIETNGETGEIVWDKGRDFATVRKVLSMPQVNIVKKTEVQTGGFSKESILPKRNSDKLIARKKDWDPKKYGGFDSPTVAYSVLVVAKVEKGKSKKLKSVKELLGITIMERSSFEKNPIDFLEAKGYKEVKKDLIIKLPKYSLFELENGRKRMLASAGELQKGNELALPSKYVNFLYLASHYEKLKGSPEDNEQKQLFVEQHKHYLDEIIEQISEFSKRVILADANLDKVLSAYNKHRDKPIREQAENIIHLFTLTNLGAPAAFKYFDTTIDRKRYTSTKEVLDATLIHQSITGLYETRIDLSQLGGDGGGGGGSGGGGSGGTLNLEDEYRLYETSAEPEVSPGSTWLSDFPQAWAETGGMGLAVRQAPLIIPLKATSTPVSIKQYPMSQEAKLGIKPHIQRLLDQGILVPCQSPWNTPLLPVKKPGTNDYRPVQDLREVNKRVEDIHPTVPNPYNLLSGLPPSHRWYTVLDLKDAFFCLRLHPTSQPLFAFEWRDPGMGISGQLTWTRLPQGFKNSPTLFNEALHRDLADFRIQHPDLILLQYVDDILLAATSELDCQQGTRALLLTLGNLGYRASAKKAQLCQKQVKYLGYLLKEGQRWLTEARKETVMGQPTPKTPRQLREFLGKAGFCRLFIPGFAEMAAPLYPLTKPGTLFNWGPDQQKAYQEIKQALLTAPALGLPDLTKPFELFVDEKQGYAKGVLTQKLGPWRRPVAYLSKKLDPVAAGWPPCLRMVAAIAVLRKDAGKLTMGQPLVILAPHAVEALVKQPPDRWLSNARMTHYQAMLLDTDRVQFGPVVALNPATLLPLPEEGAPHDCLEILAETHGTRPDLTDQPIPDADHTWYTDGSSFLQEGQRKAGAAVTTETEVIWARALPAGTSAQRAELIALTQALKMAEGKRLNVYTDSRYAFATAHIHGEIYRRRGWLTSEGREIKNKSEILALLKALFLPKRLSIIHCLGHQKGDSAEARGNRLADQAAREAAIKTPPDTSTLLAGKRTADGSEFEKRTADGSEFESPKKKAKVE

SEQ ID NO: 6126 - protein, 2095 aa, synthetic construct
MPAAKRVKLDGGDKKYSIGLDIGTNSVGWAVITDEYKVPSKKFKVLGNTDRHSIKKNLIGALLFDSGETAEATRLKRTARRRYTRRKNRICYLQEIFSNEMAKVDDSFFHRLEESFLVEEDKKHERHPIFGNIVDEVAYHEKYPTIYHLRKKLVDSTDKADLRLIYLALAHMIKFRGHFLIEGDLNPDNSDVDKLFIQLVQTYNQLFEENPINASGVDAKAILSARLSKSRRLENLIAQLPGEKKNGLFGNLIALSLGLTPNFKSNFDLAEDAKLQLSKDTYDDDLDNLLAQIGDQYADLFLAAKNLSDAILLSDILRVNTEITKAPLSASMIKRYDEHHQDLTLLKALVRQQLPEKYKEIFFDQSKNGYAGYIDGGASQEEFYKFIKPILEKMDGTEELLVKLNREDLLRKQRTFDNGSIPHQIHLGELHAILRRQEDFYPFLKDNREKIEKILTFRIPYYVGPLARGNSRFAWMTRKSEETITPWNFEEVVDKGASAQSFIERMTNFDKNLPNEKVLPKHSLLYEYFTVYNELTKVKYVTEGMRKPAFLSGEQKKAIVDLLFKTNRKVTVKQLKEDYFKKIECFDSVEISGVEDRFNASLGTYHDLLKIIKDKDFLDNEENEDILEDIVLTLTLFEDREMIEERLKTYAHLFDDKVMKQLKRRRYTGWGRLSRKLINGIRDKQSGKTILDFLKSDGFANRNFMQLIHDDSLTFKEDIQKAQVSGQGDSLHEHIANLAGSPAIKKGILQTVKVVDELVKVMGRHKPENIVIEMARENQTTQKGQKNSRERMKRIEEGIKELGSQILKEHPVENTQLQNEKLYLYYLQNGRDMYVDQELDINRLSDYDVDHIVPQSFLKDDSIDNKVLTRSDKARGKSDNVPSEEVVKKMKNYWRQLLNAKLITQRKFDNLTKAERGGLSELDKAGFIKRQLVETRQITKHVAQILDSRMNTKYDENDKLIREVKVITLKSKLVSDFRKDFQFYKVREINNYHHAHDAYLNAVVGTALIKKYPKLESEFVYGDYKVYDVRKMIAKSEQEIGKATAKYFFYSNIMNFFKTEITLANGEIRKRPLIETNGETGEIVWDKGRDFATVRKVLSMPQVNIVKKTEVQTGGFSKESILPKRNSDKLIARKKDWDPKKYGGFDSPTVAYSVLVVAKVEKGKSKKLKSVKELLGITIMERSSFEKNPIDFLEAKGYKEVKKDLIIKLPKYSLFELENGRKRMLASAGELQKGNELALPSKYVNFLYLASHYEKLKGSPEDNEQKQLFVEQHKHYLDEIIEQISEFSKRVILADANLDKVLSAYNKHRDKPIREQAENIIHLFTLTNLGAPAAFKYFDTTIDRKRYTSTKEVLDATLIHQSITGLYETRIDLSQLGGDGGGGGGSGGGGSGGTLGIEDEYRLHETSTEPDVSLGSTWLSDFPQAWAETGGMGLAVRQAPLIIPLKATSTPVSIQQYPMSHEARLGIKPHIQRLLDQGILVPCQSPWNTPLLPVKKPGTNDYRPVQDLREVNKRVEDIHPTVPNPYNLLSGLPPSHQWYTVLDLKDAFFCLRLHPTSQPLFAFEWRDPGMGISGQLTWTRLPQGFKNSPTLFNEALHRDLADFRIQHPDLILLQYVDDILLAATSELDCQQGTRALLQTLGDLGYRASAKKAQICQKQVKYLGYLLREGQRWLTEARKETVMGQPVPKTPRQLREFLGTAGFCRLWIPGFAEMAAPLYPLTKPGTLFSWGPDQQKAYQEIKQALLTAPALGLPDLTKPFELFVDEKQGYAKGVLTQKLGPWRRPVAYLSKKLDPVAAGWPPCLRMVAAIAVLTKDAGKLTMGQPLVILAPHAVEALVKQPPDRWLSNARMTHYQAMLLDTDRVQFGPVVALNPATLLPLPEEGAPHDCLEILAETHGTRPDLTDQPIPDADHTWYTDGSSFLQEGQRKAGAAVTTETEVIWAGALPAGTSAQRAELIALTQALKMAEGKRLNVYTDSRYAFATAHIHGEIYRRRGWLTSEGREIKNKSEILALLKALFLPKRLSIIHCLGHQKGDSAEARGNRLADQAAREAAIKTPPDTSTLLAGKRTADGSEFEKRTADGSEFESPKKKAKVE

SEQ ID NO: 6127 - protein, 2095 aa, synthetic construct
MPAAKRVKLDGGDKKYSIGLDIGTNSVGWAVITDEYKVPSKKFKVLGNTDRHSIKKNLIGALLFDSGETAEATRLKRTARRRYTRRKNRICYLQEIFSNEMAKVDDSFFHRLEESFLVEEDKKHERHPIFGNIVDEVAYHEKYPTIYHLRKKLVDSTDKADLRLIYLALAHMIKFRGHFLIEGDLNPDNSDVDKLFIQLVQTYNQLFEENPINASGVDAKAILSARLSKSRRLENLIAQLPGEKKNGLFGNLIALSLGLTPNFKSNFDLAEDAKLQLSKDTYDDDLDNLLAQIGDQYADLFLAAKNLSDAILLSDILRVNTEITKAPLSASMIKRYDEHHQDLTLLKALVRQQLPEKYKEIFFDQSKNGYAGYIDGGASQEEFYKFIKPILEKMDGTEELLVKLNREDLLRKQRTFDNGSIPHQIHLGELHAILRRQEDFYPFLKDNREKIEKILTFRIPYYVGPLARGNSRFAWMTRKSEETITPWNFEEVVDKGASAQSFIERMTNFDKNLPNEKVLPKHSLLYEYFTVYNELTKVKYVTEGMRKPAFLSGEQKKAIVDLLFKTNRKVTVKQLKEDYFKKIECFDSVEISGVEDRFNASLGTYHDLLKIIKDKDFLDNEENEDILEDIVLTLTLFEDREMIEERLKTYAHLFDDKVMKQLKRRRYTGWGRLSRKLINGIRDKQSGKTILDFLKSDGFANRNFMQLIHDDSLTFKEDIQKAQVSGQGDSLHEHIANLAGSPAIKKGILQTVKVVDELVKVMGRHKPENIVIEMARENQTTQKGQKNSRERMKRIEEGIKELGSQILKEHPVENTQLQNEKLYLYYLQNGRDMYVDQELDINRLSDYDVDHIVPQSFLKDDSIDNKVLTRSDKARGKSDNVPSEEVVKKMKNYWRQLLNAKLITQRKFDNLTKAERGGLSELDKAGFIKRQLVETRQITKHVAQILDSRMNTKYDENDKLIREVKVITLKSKLVSDFRKDFQFYKVREINNYHHAHDAYLNAVVGTALIKKYPKLESEFVYGDYKVYDVRKMIAKSEQEIGKATAKYFFYSNIMNFFKTEITLANGEIRKRPLIETNGETGEIVWDKGRDFATVRKVLSMPQVNIVKKTEVQTGGFSKESILPKRNSDKLIARKKDWDPKKYGGFDSPTVAYSVLVVAKVEKGKSKKLKSVKELLGITIMERSSFEKNPIDFLEAKGYKEVKKDLIIKLPKYSLFELENGRKRMLASAGELQKGNELALPSKYVNFLYLASHYEKLKGSPEDNEQKQLFVEQHKHYLDEIIEQISEFSKRVILADANLDKVLSAYNKHRDKPIREQAENIIHLFTLTNLGAPAAFKYFDTTIDRKRYTSTKEVLDATLIHQSITGLYETRIDLSQLGGDGGGGGGSGGGGSGGTLNIEDEYRLHETSKGPDVPLGSTWLSDFPQAWAETGGMGLAFRQAPLIISLKATSTPVSIKQYPMSQEARLGIKPHIQRLLDQGILVPCQSPWNTPLLPVKKPGTNDYRPVQDLREVNKRVEDIHPTVPNPYNLLSGLPPSHQWYTVLDLKDAFFCLRLHPTSQSLFAFEWKDPEMGISGQLTWTRLPQGFKNSPTLFNEALHRDLADFRIQHPDLILLQYVDDLLLAATSELDCQQGTRALLQTLGDLGYRASAKKAQICQKQVKYLGYLLKEGQRWLTEARKETVMGQPTPKTPRQLREFLGTAGLCRLWIPGFAEMAAPLYPLTKPGTLFKWGPDQQKAYQEIKQALLTAPALGLPDLTKPFELFVDEKQGYAKGVLTQKLGPWRRPVAYLSKKLDPVAAGWPPCLRMVAAIAVLTKDVGKLTMGQPLVILAPHAVEALVKQPPDRWLSNARMTHYQALLLDTDRVQFGPIVALNPATLLPLPEEGLQHDCLDILAEAHGTRPDLTDQPLPDADHTWYTDGSSFLQEGQRRAGAAVTTETEVIWAKALPAGTSAQRAELIALTQALKMAAGKKLNVYTDSRYAFATAHIHGEIYRRRGWLTSEGKEIKNKDEILALLKALFLPKRLSIIHCPGHQKGNHAEARGNRMADQAAREVATRETPETSTLLAGKRTADGSEFEKRTADGSEFESPKKKAKVE

SEQ ID NO: 6128 - protein, 2086 aa, synthetic construct
MPAAKRVKLDGGDKKYSIGLDIGTNSVGWAVITDEYKVPSKKFKVLGNTDRHSIKKNLIGALLFDSGETAEATRLKRTARRRYTRRKNRICYLQEIFSNEMAKVDDSFFHRLEESFLVEEDKKHERHPIFGNIVDEVAYHEKYPTIYHLRKKLVDSTDKADLRLIYLALAHMIKFRGHFLIEGDLNPDNSDVDKLFIQLVQTYNQLFEENPINASGVDAKAILSARLSKSRRLENLIAQLPGEKKNGLFGNLIALSLGLTPNFKSNFDLAEDAKLQLSKDTYDDDLDNLLAQIGDQYADLFLAAKNLSDAILLSDILRVNTEITKAPLSASMIKRYDEHHQDLTLLKALVRQQLPEKYKEIFFDQSKNGYAGYIDGGASQEEFYKFIKPILEKMDGTEELLVKLNREDLLRKQRTFDNGSIPHQIHLGELHAILRRQEDFYPFLKDNREKIEKILTFRIPYYVGPLARGNSRFAWMTRKSEETITPWNFEEVVDKGASAQSFIERMTNFDKNLPNEKVLPKHSLLYEYFTVYNELTKVKYVTEGMRKPAFLSGEQKKAIVDLLFKTNRKVTVKQLKEDYFKKIECFDSVEISGVEDRFNASLGTYHDLLKIIKDKDFLDNEENEDILEDIVLTLTLFEDREMIEERLKTYAHLFDDKVMKQLKRRRYTGWGRLSRKLINGIRDKQSGKTILDFLKSDGFANRNFMQLIHDDSLTFKEDIQKAQVSGQGDSLHEHIANLAGSPAIKKGILQTVKVVDELVKVMGRHKPENIVIEMARENQTTQKGQKNSRERMKRIEEGIKELGSQILKEHPVENTQLQNEKLYLYYLQNGRDMYVDQELDINRLSDYDVDHIVPQSFLKDDSIDNKVLTRSDKARGKSDNVPSEEVVKKMKNYWRQLLNAKLITQRKFDNLTKAERGGLSELDKAGFIKRQLVETRQITKHVAQILDSRMNTKYDENDKLIREVKVITLKSKLVSDFRKDFQFYKVREINNYHHAHDAYLNAVVGTALIKKYPKLESEFVYGDYKVYDVRKMIAKSEQEIGKATAKYFFYSNIMNFFKTEITLANGEIRKRPLIETNGETGEIVWDKGRDFATVRKVLSMPQVNIVKKTEVQTGGFSKESILPKRNSDKLIARKKDWDPKKYGGFDSPTVAYSVLVVAKVEKGKSKKLKSVKELLGITIMERSSFEKNPIDFLEAKGYKEVKKDLIIKLPKYSLFELENGRKRMLASAGELQKGNELALPSKYVNFLYLASHYEKLKGSPEDNEQKQLFVEQHKHYLDEIIEQISEFSKRVILADANLDKVLSAYNKHRDKPIREQAENIIHLFTLTNLGAPAAFKYFDTTIDRKRYTSTKEVLDATLIHQSITGLYETRIDLSQLGGDGGGGGGSGGGGSGGVPWLMKKPLQLTVLVPLHEYQERLLQQTALPKEQKELLQKLFLKYDALWQHWENQVGHRRIKPHNIATGTLAPRPQKQYPINPKAKPSIQIVIDDLLKQGVLIQQNSTMNTPVYPVPKPDGKWRMVLDYREVNKTIPLIAAQNQHSAGILSSIYRGKYKTTLDLTNGFWAHPITPESYWLTAFTWQGKQYCWTRLPQGFLNSPALFTADVVDLLKEIPNVQAYVDDIYISHDDPQEHLEQLEKIFSILLNAGYVVSLKKSEIAQREVEFLGFNITKEGRGLTDTFKQKLLNITPPKDLKQLQSILGLLNFARNFIPNYSELVKPLYTIVANANGKFISWTEDNSNQLQHIISVLNQADNLEERNPETRLIIKVNSSPSAGYIRYYNEGSKRPIMYVNYIFSKAEAKFTQTEKLLTTMHKGLIKAMDLAMGQEILVYSPIVSMTKIQRTPLPERKALPVRWITWMTYLEDPRIQFHYDKSLPELQQIPNVTEDVIAKTKHPSEFAMVFYTDGSAIKHPDVNKSHSAGMGIAQVQFIPEYKIVHQWSIPLGDHTAQLAEIAAVEFACKKALKISGPVLIVTDSFYVAESANKELPYWKSNGFLNNKKKPLRHVSKWKSIAECLQLKPDIIIMHEKGHQQPMTTLHTEGNNLADKLATQGSYVVHAGKRTADGSEFEKRTADGSEFESPKKKAKVE

SEQ ID NO: 6129 - protein, 2102 aa, synthetic construct
MPAAKRVKLDGGDKKYSIGLDIGTNSVGWAVITDEYKVPSKKFKVLGNTDRHSIKKNLIGALLFDSGETAEATRLKRTARRRYTRRKNRICYLQEIFSNEMAKVDDSFFHRLEESFLVEEDKKHERHPIFGNIVDEVAYHEKYPTIYHLRKKLVDSTDKADLRLIYLALAHMIKFRGHFLIEGDLNPDNSDVDKLFIQLVQTYNQLFEENPINASGVDAKAILSARLSKSRRLENLIAQLPGEKKNGLFGNLIALSLGLTPNFKSNFDLAEDAKLQLSKDTYDDDLDNLLAQIGDQYADLFLAAKNLSDAILLSDILRVNTEITKAPLSASMIKRYDEHHQDLTLLKALVRQQLPEKYKEIFFDQSKNGYAGYIDGGASQEEFYKFIKPILEKMDGTEELLVKLNREDLLRKQRTFDNGSIPHQIHLGELHAILRRQEDFYPFLKDNREKIEKILTFRIPYYVGPLARGNSRFAWMTRKSEETITPWNFEEVVDKGASAQSFIERMTNFDKNLPNEKVLPKHSLLYEYFTVYNELTKVKYVTEGMRKPAFLSGEQKKAIVDLLFKTNRKVTVKQLKEDYFKKIECFDSVEISGVEDRFNASLGTYHDLLKIIKDKDFLDNEENEDILEDIVLTLTLFEDREMIEERLKTYAHLFDDKVMKQLKRRRYTGWGRLSRKLINGIRDKQSGKTILDFLKSDGFANRNFMQLIHDDSLTFKEDIQKAQVSGQGDSLHEHIANLAGSPAIKKGILQTVKVVDELVKVMGRHKPENIVIEMARENQTTQKGQKNSRERMKRIEEGIKELGSQILKEHPVENTQLQNEKLYLYYLQNGRDMYVDQELDINRLSDYDVDHIVPQSFLKDDSIDNKVLTRSDKARGKSDNVPSEEVVKKMKNYWRQLLNAKLITQRKFDNLTKAERGGLSELDKAGFIKRQLVETRQITKHVAQILDSRMNTKYDENDKLIREVKVITLKSKLVSDFRKDFQFYKVREINNYHHAHDAYLNAVVGTALIKKYPKLESEFVYGDYKVYDVRKMIAKSEQEIGKATAKYFFYSNIMNFFKTEITLANGEIRKRPLIETNGETGEIVWDKGRDFATVRKVLSMPQVNIVKKTEVQTGGFSKESILPKRNSDKLIARKKDWDPKKYGGFDSPTVAYSVLVVAKVEKGKSKKLKSVKELLGITIMERSSFEKNPIDFLEAKGYKEVKKDLIIKLPKYSLFELENGRKRMLASAGELQKGNELALPSKYVNFLYLASHYEKLKGSPEDNEQKQLFVEQHKHYLDEIIEQISEFSKRVILADANLDKVLSAYNKHRDKPIREQAENIIHLFTLTNLGAPAAFKYFDTTIDRKRYTSTKEVLDATLIHQSITGLYETRIDLSQLGGDGGGGGGSGGGGSGGGGSGGTAPLEEEYRLFLEAPIQNVTLLEQWKREIPKVWAEINPPGLASTQAPIHVQLLSTALPVRVRQYPITLEAKRSLRETIRKFRAAGILRPVHSPWNTPLLPVRKSGTSEYRMVQDLREVNKRVETIHPTVPNPYTLLSLLPPDRIWYSVLDLKDAFFCIPLAPESQLIFAFEWADAEEGESGQLTWTRLPQGFKNSPTLFNEALNRDLQGFRLDHPSVSLLQYVDDLLIAADTQAACLSATRDLLMTLAELGYRVSGKKAQLCQEEVTYLGFKIHKGSRSLSNSRTQAILQIPVPKTKRQVREFLGTIGYCRLWIPGFAELAQPLYAATRPGNDPLVWGEKEEEAFQSLKLALTQPPALALPSLDKPFQLFVEETSGAAKGVLTQALGPWKRPVAYLSKRLDPVAAGWPRCLRAIAAAALLTREASKLTFGQDIEITSSHNLESLLRSPPDKWLTNARITQYQVLLLDPPRVRFKQTAALNPATLLPETDDTLPIHHCLDTLDSLTSTRPDLTDQPLAQAEATLFTDGSSYIRDGKRYAGAAVVTLDSVIWAEPLPIGTSAQKAELIALTKALEWSKDKSVNIYTDSRYAFATLHVHGMIYRERGWLTAGGKAIKNAPEILALLTAVWLPKRVAVMHCKGHQKDDAPTSTGNRRADEVAREVAIRPLSTQATISAGKRTADGSEFEKRTADGSEFESPKKKAKVE

SEQ ID NO: 6130 - protein, 2102 aa, synthetic construct
MPAAKRVKLDGGDKKYSIGLDIGTNSVGWAVITDEYKVPSKKFKVLGNTDRHSIKKNLIGALLFDSGETAEATRLKRTARRRYTRRKNRICYLQEIFSNEMAKVDDSFFHRLEESFLVEEDKKHERHPIFGNIVDEVAYHEKYPTIYHLRKKLVDSTDKADLRLIYLALAHMIKFRGHFLIEGDLNPDNSDVDKLFIQLVQTYNQLFEENPINASGVDAKAILSARLSKSRRLENLIAQLPGEKKNGLFGNLIALSLGLTPNFKSNFDLAEDAKLQLSKDTYDDDLDNLLAQIGDQYADLFLAAKNLSDAILLSDILRVNTEITKAPLSASMIKRYDEHHQDLTLLKALVRQQLPEKYKEIFFDQSKNGYAGYIDGGASQEEFYKFIKPILEKMDGTEELLVKLNREDLLRKQRTFDNGSIPHQIHLGELHAILRRQEDFYPFLKDNREKIEKILTFRIPYYVGPLARGNSRFAWMTRKSEETITPWNFEEVVDKGASAQSFIERMTNFDKNLPNEKVLPKHSLLYEYFTVYNELTKVKYVTEGMRKPAFLSGEQKKAIVDLLFKTNRKVTVKQLKEDYFKKIECFDSVEISGVEDRFNASLGTYHDLLKIIKDKDFLDNEENEDILEDIVLTLTLFEDREMIEERLKTYAHLFDDKVMKQLKRRRYTGWGRLSRKLINGIRDKQSGKTILDFLKSDGFANRNFMQLIHDDSLTFKEDIQKAQVSGQGDSLHEHIANLAGSPAIKKGILQTVKVVDELVKVMGRHKPENIVIEMARENQTTQKGQKNSRERMKRIEEGIKELGSQILKEHPVENTQLQNEKLYLYYLQNGRDMYVDQELDINRLSDYDVDHIVPQSFLKDDSIDNKVLTRSDKARGKSDNVPSEEVVKKMKNYWRQLLNAKLITQRKFDNLTKAERGGLSELDKAGFIKRQLVETRQITKHVAQILDSRMNTKYDENDKLIREVKVITLKSKLVSDFRKDFQFYKVREINNYHHAHDAYLNAVVGTALIKKYPKLESEFVYGDYKVYDVRKMIAKSEQEIGKATAKYFFYSNIMNFFKTEITLANGEIRKRPLIETNGETGEIVWDKGRDFATVRKVLSMPQVNIVKKTEVQTGGFSKESILPKRNSDKLIARKKDWDPKKYGGFDSPTVAYSVLVVAKVEKGKSKKLKSVKELLGITIMERSSFEKNPIDFLEAKGYKEVKKDLIIKLPKYSLFELENGRKRMLASAGELQKGNELALPSKYVNFLYLASHYEKLKGSPEDNEQKQLFVEQHKHYLDEIIEQISEFSKRVILADANLDKVLSAYNKHRDKPIREQAENIIHLFTLTNLGAPAAFKYFDTTIDRKRYTSTKEVLDATLIHQSITGLYETRIDLSQLGGDGGGGGGSGGGGSGGGGSGGTAPLEEEYRLFLEAPIQNVTLLEQWKREIPKVWAEINPPGLASTQAPIHVQLLSTALPVRVRQYPITLEAKRSLRETIRKFRAAGILRPVHSPWNTPLLPVRKSGTSEYRMVQDLREVNKRVETIHPTVPNPYTLLSLLPPDRIWYSVLDLKDAFFCIPLAPESQLIFAFEWADAEEGESGQLTWTRLPQGFKNSPTLFNEALNRDLQGFRLDHPSVSLLQYVDDLLIAADTQAACLSATRDLLMTLAELGYRVSGKKAQLCQEEVTYLGFKIHKGSRSLSNSRTQAILQIPVPKTKRQVREFLGKIGYCRLFIPGFAELAQPLYAATRPGNDPLVWGEKEEEAFQSLKLALTQPPALALPSLDKPFQLFVEETSGAAKGVLTQALGPWKRPVAYLSKRLDPVAAGWPRCLRAIAAAALLTREASKLTFGQDIEITSSHNLESLLRSPPDKWLTNARITQYQVLLLDPPRVRFKQTAALNPATLLPETDDTLPIHHCLDTLDSLTSTRPDLTDQPLAQAEATLFTDGSSYIRDGKRYAGAAVVTLDSVIWAEPLPIGTSAQKAELIALTKALEWSKDKSVNIYTDSRYAFATLHVHGMIYRERGWLTAGGKAIKNAPEILALLTAVWLPKRVAVMHCKGHQKDDAPTSTGNRRADEVAREVAIRPLSTQATISAGKRTADGSEFEKRTADGSEFESPKKKAKVE

SEQ ID NO: 6131 - protein, 2106 aa, synthetic construct
MPAAKRVKLDGGDKKYSIGLDIGTNSVGWAVITDEYKVPSKKFKVLGNTDRHSIKKNLIGALLFDSGETAEATRLKRTARRRYTRRKNRICYLQEIFSNEMAKVDDSFFHRLEESFLVEEDKKHERHPIFGNIVDEVAYHEKYPTIYHLRKKLVDSTDKADLRLIYLALAHMIKFRGHFLIEGDLNPDNSDVDKLFIQLVQTYNQLFEENPINASGVDAKAILSARLSKSRRLENLIAQLPGEKKNGLFGNLIALSLGLTPNFKSNFDLAEDAKLQLSKDTYDDDLDNLLAQIGDQYADLFLAAKNLSDAILLSDILRVNTEITKAPLSASMIKRYDEHHQDLTLLKALVRQQLPEKYKEIFFDQSKNGYAGYIDGGASQEEFYKFIKPILEKMDGTEELLVKLNREDLLRKQRTFDNGSIPHQIHLGELHAILRRQEDFYPFLKDNREKIEKILTFRIPYYVGPLARGNSRFAWMTRKSEETITPWNFEEVVDKGASAQSFIERMTNFDKNLPNEKVLPKHSLLYEYFTVYNELTKVKYVTEGMRKPAFLSGEQKKAIVDLLFKTNRKVTVKQLKEDYFKKIECFDSVEISGVEDRFNASLGTYHDLLKIIKDKDFLDNEENEDILEDIVLTLTLFEDREMIEERLKTYAHLFDDKVMKQLKRRRYTGWGRLSRKLINGIRDKQSGKTILDFLKSDGFANRNFMQLIHDDSLTFKEDIQKAQVSGQGDSLHEHIANLAGSPAIKKGILQTVKVVDELVKVMGRHKPENIVIEMARENQTTQKGQKNSRERMKRIEEGIKELGSQILKEHPVENTQLQNEKLYLYYLQNGRDMYVDQELDINRLSDYDVDHIVPQSFLKDDSIDNKVLTRSDKARGKSDNVPSEEVVKKMKNYWRQLLNAKLITQRKFDNLTKAERGGLSELDKAGFIKRQLVETRQITKHVAQILDSRMNTKYDENDKLIREVKVITLKSKLVSDFRKDFQFYKVREINNYHHAHDAYLNAVVGTALIKKYPKLESEFVYGDYKVYDVRKMIAKSEQEIGKATAKYFFYSNIMNFFKTEITLANGEIRKRPLIETNGETGEIVWDKGRDFATVRKVLSMPQVNIVKKTEVQTGGFSKESILPKRNSDKLIARKKDWDPKKYGGFDSPTVAYSVLVVAKVEKGKSKKLKSVKELLGITIMERSSFEKNPIDFLEAKGYKEVKKDLIIKLPKYSLFELENGRKRMLASAGELQKGNELALPSKYVNFLYLASHYEKLKGSPEDNEQKQLFVEQHKHYLDEIIEQISEFSKRVILADANLDKVLSAYNKHRDKPIREQAENIIHLFTLTNLGAPAAFKYFDTTIDRKRYTSTKEVLDATLIHQSITGLYETRIDLSQLGGDGGGGGGSGGGGSGGGGSGGTVSLQDEHRLFDIPVTTSLPDVWLQDFPQAWAETGGLGRAKCQAPIIIDLKPTAVPVSIKQYPMSLEAHMGIRQHIIKFLELGVLRPCRSPWNTPLLPVKKPGTQDYRPVQDLREINKRTVDIHPTVPNPYNLLSTLKPDYSWYTVLDLKDAFFCLPLAPQSQELFAFEWKDPERGISGQLTWTRLPQGFKNSPTLFNEALHRDLTDFRTQHPEVTLLQYVDDLLLAAPTKKACTQGTRHLLQELGEKGYRASAKKAQICQTKVTYLGYILSEGKRWLTPGRIETVARIPPPRNPREVREFLGTAGFCRLWIPGFAELAAPLYALTKPSTPFTWQTEHQLAFEALKKALLSAPALGLPDTSKPFTLFLDERQGIAKGVLTQKLGPWKRPVAYLSKKLDPVAAGWPPCLRIMAATAMLVKDSAKLTLGQPLTVITPHTLEAIVRQPPDRWITNARLTHYQALLLDTDRVQFGPPVTLNPATLLPVPENQPSPHDCRQVLAETHGTREDLKDQELPDADHTWYTDGSSYLDSGTRRAGAAVVDGHNTIWAQSLPPGTSAQKAELIALTKALELSKGKKANIYTDSRYAFATAHTHGSIYERRGWLTSEGKEIKNKAEIIALLKALFLPQEVAIIHCPGHQKGQDPVAVGNRQADRVARQAAMAEVLTLATEPDNTSHITAGKRTADGSEFEKRTADGSEFESPKKKAKVE

SEQ ID NO: 6132 - protein, 2091 aa, synthetic construct
MPAAKRVKLDGGDKKYSIGLDIGTNSVGWAVITDEYKVPSKKFKVLGNTDRHSIKKNLIGALLFDSGETAEATRLKRTARRRYTRRKNRICYLQEIFSNEMAKVDDSFFHRLEESFLVEEDKKHERHPIFGNIVDEVAYHEKYPTIYHLRKKLVDSTDKADLRLIYLALAHMIKFRGHFLIEGDLNPDNSDVDKLFIQLVQTYNQLFEENPINASGVDAKAILSARLSKSRRLENLIAQLPGEKKNGLFGNLIALSLGLTPNFKSNFDLAEDAKLQLSKDTYDDDLDNLLAQIGDQYADLFLAAKNLSDAILLSDILRVNTEITKAPLSASMIKRYDEHHQDLTLLKALVRQQLPEKYKEIFFDQSKNGYAGYIDGGASQEEFYKFIKPILEKMDGTEELLVKLNREDLLRKQRTFDNGSIPHQIHLGELHAILRRQEDFYPFLKDNREKIEKILTFRIPYYVGPLARGNSRFAWMTRKSEETITPWNFEEVVDKGASAQSFIERMTNFDKNLPNEKVLPKHSLLYEYFTVYNELTKVKYVTEGMRKPAFLSGEQKKAIVDLLFKTNRKVTVKQLKEDYFKKIECFDSVEISGVEDRFNASLGTYHDLLKIIKDKDFLDNEENEDILEDIVLTLTLFEDREMIEERLKTYAHLFDDKVMKQLKRRRYTGWGRLSRKLINGIRDKQSGKTILDFLKSDGFANRNFMQLIHDDSLTFKEDIQKAQVSGQGDSLHEHIANLAGSPAIKKGILQTVKVVDELVKVMGRHKPENIVIEMARENQTTQKGQKNSRERMKRIEEGIKELGSQILKEHPVENTQLQNEKLYLYYLQNGRDMYVDQELDINRLSDYDVDHIVPQSFLKDDSIDNKVLTRSDKARGKSDNVPSEEVVKKMKNYWRQLLNAKLITQRKFDNLTKAERGGLSELDKAGFIKRQLVETRQITKHVAQILDSRMNTKYDENDKLIREVKVITLKSKLVSDFRKDFQFYKVREINNYHHAHDAYLNAVVGTALIKKYPKLESEFVYGDYKVYDVRKMIAKSEQEIGKATAKYFFYSNIMNFFKTEITLANGEIRKRPLIETNGETGEIVWDKGRDFATVRKVLSMPQVNIVKKTEVQTGGFSKESILPKRNSDKLIARKKDWDPKKYGGFDSPTVAYSVLVVAKVEKGKSKKLKSVKELLGITIMERSSFEKNPIDFLEAKGYKEVKKDLIIKLPKYSLFELENGRKRMLASAGELQKGNELALPSKYVNFLYLASHYEKLKGSPEDNEQKQLFVEQHKHYLDEIIEQISEFSKRVILADANLDKVLSAYNKHRDKPIREQAENIIHLFTLTNLGAPAAFKYFDTTIDRKRYTSTKEVLDATLIHQSITGLYETRIDLSQLGGDGGGGGGSGGGGSGGGGSGGVPWLTQQPLQLTILVPLQEYQEKILSKTALPEDQKQQLKTLFVKYDNLWQHWENQVGHRKIRPHNIATGDYPPRPQKQYPINPKAKPSIQIVIDDLLKQGVLTPQNSTMNTPVYPVPKPDGRWRMVLDYREVNKTIPLTAAQNQHSAGILATIVRQKYKTTLDLANGFWAHPITPESYWLTAFTWQGKQYCWTRLPQGFLNSPALFNADVVDLLKEIPNVQVYVDDIYLSHDDPKEHVQQLEKVFQILLQAGYVVSLKKSEIGQKTVEFLGFNITKEGRGLTDTFKTKLLNITPPKDLKQLQSILGLLNFARNFIPNFAELVQPLYNLIAPAKGKYIEWSEENTKQLNMVIEALNTASNLEERLPEQRLVIKVNTSPSAGYVRYYNETGKKPIMYLNYVFSKAELKFSMLEKLLTTMHKALIKAMDLAMGQEILVYSPIVSMTKIQKTPLPERKALPIRWITWMTYLEDPRIQFHYDKTLPELKHIPDVYTSSQSPVKHPSQYEGVFYTDGSAIKSPDPTKSNNAGMGIVHATYKPEYQVLNQWSIPLGNHTAQMAEIAAVEFACKKALKIPGPVLVITDSFYVAESANKELPYWKSNGFVNNKKKPLKHISKWKSIAECLSMKPDITIQHEKGISLQIPVFILKGNALADKLATQGSYVVNAGKRTADGSEFEKRTADGSEFESPKKKAKVE

SEQ ID NO: 6133 - protein, 2222 aa, synthetic construct
MPAAKRVKLDGGDKKYSIGLDIGTNSVGWAVITDEYKVPSKKFKVLGNTDRHSIKKNLIGALLFDSGETAEATRLKRTARRRYTRRKNRICYLQEIFSNEMAKVDDSFFHRLEESFLVEEDKKHERHPIFGNIVDEVAYHEKYPTIYHLRKKLVDSTDKADLRLIYLALAHMIKFRGHFLIEGDLNPDNSDVDKLFIQLVQTYNQLFEENPINASGVDAKAILSARLSKSRRLENLIAQLPGEKKNGLFGNLIALSLGLTPNFKSNFDLAEDAKLQLSKDTYDDDLDNLLAQIGDQYADLFLAAKNLSDAILLSDILRVNTEITKAPLSASMIKRYDEHHQDLTLLKALVRQQLPEKYKEIFFDQSKNGYAGYIDGGASQEEFYKFIKPILEKMDGTEELLVKLNREDLLRKQRTFDNGSIPHQIHLGELHAILRRQEDFYPFLKDNREKIEKILTFRIPYYVGPLARGNSRFAWMTRKSEETITPWNFEEVVDKGASAQSFIERMTNFDKNLPNEKVLPKHSLLYEYFTVYNELTKVKYVTEGMRKPAFLSGEQKKAIVDLLFKTNRKVTVKQLKEDYFKKIECFDSVEISGVEDRFNASLGTYHDLLKIIKDKDFLDNEENEDILEDIVLTLTLFEDREMIEERLKTYAHLFDDKVMKQLKRRRYTGWGRLSRKLINGIRDKQSGKTILDFLKSDGFANRNFMQLIHDDSLTFKEDIQKAQVSGQGDSLHEHIANLAGSPAIKKGILQTVKVVDELVKVMGRHKPENIVIEMARENQTTQKGQKNSRERMKRIEEGIKELGSQILKEHPVENTQLQNEKLYLYYLQNGRDMYVDQELDINRLSDYDVDHIVPQSFLKDDSIDNKVLTRSDKARGKSDNVPSEEVVKKMKNYWRQLLNAKLITQRKFDNLTKAERGGLSELDKAGFIKRQLVETRQITKHVAQILDSRMNTKYDENDKLIREVKVITLKSKLVSDFRKDFQFYKVREINNYHHAHDAYLNAVVGTALIKKYPKLESEFVYGDYKVYDVRKMIAKSEQEIGKATAKYFFYSNIMNFFKTEITLANGEIRKRPLIETNGETGEIVWDKGRDFATVRKVLSMPQVNIVKKTEVQTGGFSKESILPKRNSDKLIARKKDWDPKKYGGFDSPTVAYSVLVVAKVEKGKSKKLKSVKELLGITIMERSSFEKNPIDFLEAKGYKEVKKDLIIKLPKYSLFELENGRKRMLASAGELQKGNELALPSKYVNFLYLASHYEKLKGSPEDNEQKQLFVEQHKHYLDEIIEQISEFSKRVILADANLDKVLSAYNKHRDKPIREQAENIIHLFTLTNLGAPAAFKYFDTTIDRKRYTSTKEVLDATLIHQSITGLYETRIDLSQLGGDGGGGGGSGGGGSGGGGSGGTLGDQGSRGSDPLPEPRVTLTVEGIPTEFLVNTGAEHSVLTKPMGKMGSKRTVVAGATGSKVYPWTTKRLLKIGQKQVTHSFLVIPECPAPLLGRDLLTKLKAQIQFSTEGPQVTWEDRPAMCLVLNLEEEYRLHEKPVPPSIDPSWLQLFPMVWAEKAGMGLANQVPPVVVELKSDASPVAVRQYPMSKEAREGIRPHIQRFLDLGILVPCQSPWNTPLLPVKKPGTNDYRPVQDLREVNKRVQDIHPTVPNPYNLLSSLPPSHTWYSVLDLKDAFFCLKLHPNSQPLFAFEWRDPEKGNTGQLTWTRLPQGFKNSPTLFNEALHRDLASFRALNPQVVMLQYVDDLLVAAPTYRDCKEGTRRLLQELSKLGYRVSAKKAQLCREEVTYLGYLLKGGKRWLTPARKATVMKIPTPTTPRQVREFLGKAGFCRLFIPGFASLAAPLYPLTRPKVPFTWTEAHQEAFGRIKEALLSAPALALPDLTKPFALYVDEKEGVARGVLTQTLGPWRRPVAYLSKKLDPVASGWPTCLKAIAAVALLLKDADKLTLGQNVLVIAPHNLESIVRQPPDRWMTNARMTHYQSLLLNERVSFAPPAILNPATLLPVESDDTPIHICSEILAEETGTRPDLRDQPLPGVPAWYTDGSSFIMDGRRQAGAAIVDNKRTVWASNLPEGTSAQKAELIALTQALRLAEGKSINIYTDSRYAFATAHVHGAIYKQRGWLTSAGKDIKNKEEILALLEAIHLPKRVAIIHCPGHQRGTDPVATGNRKADEAAKQAAQSTRILTETTKNAGKRTADGSEFEKRTADGSEFESPKKKAKVE

SEQ ID NO: 6134 - protein, 2100 aa, synthetic construct
MPAAKRVKLDGGDKKYSIGLDIGTNSVGWAVITDEYKVPSKKFKVLGNTDRHSIKKNLIGALLFDSGETAEATRLKRTARRRYTRRKNRICYLQEIFSNEMAKVDDSFFHRLEESFLVEEDKKHERHPIFGNIVDEVAYHEKYPTIYHLRKKLVDSTDKADLRLIYLALAHMIKFRGHFLIEGDLNPDNSDVDKLFIQLVQTYNQLFEENPINASGVDAKAILSARLSKSRRLENLIAQLPGEKKNGLFGNLIALSLGLTPNFKSNFDLAEDAKLQLSKDTYDDDLDNLLAQIGDQYADLFLAAKNLSDAILLSDILRVNTEITKAPLSASMIKRYDEHHQDLTLLKALVRQQLPEKYKEIFFDQSKNGYAGYIDGGASQEEFYKFIKPILEKMDGTEELLVKLNREDLLRKQRTFDNGSIPHQIHLGELHAILRRQEDFYPFLKDNREKIEKILTFRIPYYVGPLARGNSRFAWMTRKSEETITPWNFEEVVDKGASAQSFIERMTNFDKNLPNEKVLPKHSLLYEYFTVYNELTKVKYVTEGMRKPAFLSGEQKKAIVDLLFKTNRKVTVKQLKEDYFKKIECFDSVEISGVEDRFNASLGTYHDLLKIIKDKDFLDNEENEDILEDIVLTLTLFEDREMIEERLKTYAHLFDDKVMKQLKRRRYTGWGRLSRKLINGIRDKQSGKTILDFLKSDGFANRNFMQLIHDDSLTFKEDIQKAQVSGQGDSLHEHIANLAGSPAIKKGILQTVKVVDELVKVMGRHKPENIVIEMARENQTTQKGQKNSRERMKRIEEGIKELGSQILKEHPVENTQLQNEKLYLYYLQNGRDMYVDQELDINRLSDYDVDHIVPQSFLKDDSIDNKVLTRSDKARGKSDNVPSEEVVKKMKNYWRQLLNAKLITQRKFDNLTKAERGGLSELDKAGFIKRQLVETRQITKHVAQILDSRMNTKYDENDKLIREVKVITLKSKLVSDFRKDFQFYKVREINNYHHAHDAYLNAVVGTALIKKYPKLESEFVYGDYKVYDVRKMIAKSEQEIGKATAKYFFYSNIMNFFKTEITLANGEIRKRPLIETNGETGEIVWDKGRDFATVRKVLSMPQVNIVKKTEVQTGGFSKESILPKRNSDKLIARKKDWDPKKYGGFDSPTVAYSVLVVAKVEKGKSKKLKSVKELLGITIMERSSFEKNPIDFLEAKGYKEVKKDLIIKLPKYSLFELENGRKRMLASAGELQKGNELALPSKYVNFLYLASHYEKLKGSPEDNEQKQLFVEQHKHYLDEIIEQISEFSKRVILADANLDKVLSAYNKHRDKPIREQAENIIHLFTLTNLGAPAAFKYFDTTIDRKRYTSTKEVLDATLIHQSITGLYETRIDLSQLGGDGGGGGGSGGGGSGGGGSGGTLNLEDEYRLYETSAEPEVSPGSTWLSDFPQAWAETGGMGLAVRQAPLIIPLKATSTPVSIKQYPMSQEAKLGIKPHIQRLLDQGILVPCQSPWNTPLLPVKKPGTNDYRPVQDLREVNKRVEDIHPTVPNPYNLLSGLPPSHRWYTVLDLKDAFFCLRLHPTSQPLFAFEWRDPGMGISGQLTWTRLPQGFKNSPTLFNEALHRDLADFRIQHPDLILLQYVDDILLAATSELDCQQGTRALLLTLGNLGYRASAKKAQLCQKQVKYLGYLLKEGQRWLTEARKETVMGQPTPKTPRQLREFLGTAGFCRLWIPGFAEMAAPLYPLTKPGTLFNWGPDQQKAYQEIKQALLTAPALGLPDLTKPFELFVDEKQGYAKGVLTQKLGPWRRPVAYLSKKLDPVAAGWPPCLRMVAAIAVLRKDAGKLTMGQPLVILAPHAVEALVKQPPDRWLSNARMTHYQAMLLDTDRVQFGPVVALNPATLLPLPEEGAPHDCLEILAETHGTRPDLTDQPIPDADHTWYTDGSSFLQEGQRKAGAAVTTETEVIWARALPAGTSAQRAELIALTQALKMAEGKRLNVYTDSRYAFATAHIHGEIYRRRGWLTSEGREIKNKSEILALLKALFLPKRLSIIHCLGHQKGDSAEARGNRLADQAAREAAIKTPPDTSTLLAGKRTADGSEFEKRTADGSEFESPKKKAKVE

SEQ ID NO: 6135 - protein, 2100 aa, synthetic construct
MPAAKRVKLDGGDKKYSIGLDIGTNSVGWAVITDEYKVPSKKFKVLGNTDRHSIKKNLIGALLFDSGETAEATRLKRTARRRYTRRKNRICYLQEIFSNEMAKVDDSFFHRLEESFLVEEDKKHERHPIFGNIVDEVAYHEKYPTIYHLRKKLVDSTDKADLRLIYLALAHMIKFRGHFLIEGDLNPDNSDVDKLFIQLVQTYNQLFEENPINASGVDAKAILSARLSKSRRLENLIAQLPGEKKNGLFGNLIALSLGLTPNFKSNFDLAEDAKLQLSKDTYDDDLDNLLAQIGDQYADLFLAAKNLSDAILLSDILRVNTEITKAPLSASMIKRYDEHHQDLTLLKALVRQQLPEKYKEIFFDQSKNGYAGYIDGGASQEEFYKFIKPILEKMDGTEELLVKLNREDLLRKQRTFDNGSIPHQIHLGELHAILRRQEDFYPFLKDNREKIEKILTFRIPYYVGPLARGNSRFAWMTRKSEETITPWNFEEVVDKGASAQSFIERMTNFDKNLPNEKVLPKHSLLYEYFTVYNELTKVKYVTEGMRKPAFLSGEQKKAIVDLLFKTNRKVTVKQLKEDYFKKIECFDSVEISGVEDRFNASLGTYHDLLKIIKDKDFLDNEENEDILEDIVLTLTLFEDREMIEERLKTYAHLFDDKVMKQLKRRRYTGWGRLSRKLINGIRDKQSGKTILDFLKSDGFANRNFMQLIHDDSLTFKEDIQKAQVSGQGDSLHEHIANLAGSPAIKKGILQTVKVVDELVKVMGRHKPENIVIEMARENQTTQKGQKNSRERMKRIEEGIKELGSQILKEHPVENTQLQNEKLYLYYLQNGRDMYVDQELDINRLSDYDVDHIVPQSFLKDDSIDNKVLTRSDKARGKSDNVPSEEVVKKMKNYWRQLLNAKLITQRKFDNLTKAERGGLSELDKAGFIKRQLVETRQITKHVAQILDSRMNTKYDENDKLIREVKVITLKSKLVSDFRKDFQFYKVREINNYHHAHDAYLNAVVGTALIKKYPKLESEFVYGDYKVYDVRKMIAKSEQEIGKATAKYFFYSNIMNFFKTEITLANGEIRKRPLIETNGETGEIVWDKGRDFATVRKVLSMPQVNIVKKTEVQTGGFSKESILPKRNSDKLIARKKDWDPKKYGGFDSPTVAYSVLVVAKVEKGKSKKLKSVKELLGITIMERSSFEKNPIDFLEAKGYKEVKKDLIIKLPKYSLFELENGRKRMLASAGELQKGNELALPSKYVNFLYLASHYEKLKGSPEDNEQKQLFVEQHKHYLDEIIEQISEFSKRVILADANLDKVLSAYNKHRDKPIREQAENIIHLFTLTNLGAPAAFKYFDTTIDRKRYTSTKEVLDATLIHQSITGLYETRIDLSQLGGDGGGGGGSGGGGSGGGGSGGTLNIEDEYRLHETSKEPDVSLGSTWLSDFPQAWAETGGMGLAVRQAPLIIPLKATSTPVSIKQYPMSQEARLGIKPHIQRLLDQGILVPCQSPWNTPLLPVKKPGTNDYRPVQDLREVNKRVEDIHPTVPNPYNLLSGLPPSHQWYTVLDLKDAFFCLRLHPTSQPLFAFEWRDPEMGISGQLTWTRLPQGFKNSPTLFDEALHRDLAGFRIQHPDLILLQYVDDLLLAATSELDCQQGTRALLQTLGDLGYRASAKKAQICQKQVKYLGYLLKEGQRWLTEARKETVMGQPIPKTPRQLREFLGTAGFCRLWIPGFAEMAAPLYPLTKTGTLFNWGPDQQKAFQEIKQALLTAPALGLPDLTKPFELFVDEKQGYAKGVLTQKLGPWRRPVAYLSKKLDPVAAGWPPCLRMVAAIAVLTKDAGKLTMGQPLVILAPHAVEALVKQPPDRWLSNARMTHYQALLLDTDRVQFGPVVALNPATLLPLPEEGLQHDCLDILAEAHGTRSDLMDQPLPDADHTWYTDGSSFLQEGQRKAGAAVTTETEVIWARALPAGTSAQRAELIALTQALKMAEGKKLNVYTDSRYAFATAHIHGEIYRRRGLLTSEGKEIKNKDEILALLKALFLPKRLSIIHCPGHQKGNSAEARGNRMADQAAREVATRETPETSTLLAGKRTADGSEFEKRTADGSEFESPKKKAKVE

SEQ ID NO: 6136 - protein, 2100 aa, synthetic construct
MPAAKRVKLDGGDKKYSIGLDIGTNSVGWAVITDEYKVPSKKFKVLGNTDRHSIKKNLIGALLFDSGETAEATRLKRTARRRYTRRKNRICYLQEIFSNEMAKVDDSFFHRLEESFLVEEDKKHERHPIFGNIVDEVAYHEKYPTIYHLRKKLVDSTDKADLRLIYLALAHMIKFRGHFLIEGDLNPDNSDVDKLFIQLVQTYNQLFEENPINASGVDAKAILSARLSKSRRLENLIAQLPGEKKNGLFGNLIALSLGLTPNFKSNFDLAEDAKLQLSKDTYDDDLDNLLAQIGDQYADLFLAAKNLSDAILLSDILRVNTEITKAPLSASMIKRYDEHHQDLTLLKALVRQQLPEKYKEIFFDQSKNGYAGYIDGGASQEEFYKFIKPILEKMDGTEELLVKLNREDLLRKQRTFDNGSIPHQIHLGELHAILRRQEDFYPFLKDNREKIEKILTFRIPYYVGPLARGNSRFAWMTRKSEETITPWNFEEVVDKGASAQSFIERMTNFDKNLPNEKVLPKHSLLYEYFTVYNELTKVKYVTEGMRKPAFLSGEQKKAIVDLLFKTNRKVTVKQLKEDYFKKIECFDSVEISGVEDRFNASLGTYHDLLKIIKDKDFLDNEENEDILEDIVLTLTLFEDREMIEERLKTYAHLFDDKVMKQLKRRRYTGWGRLSRKLINGIRDKQSGKTILDFLKSDGFANRNFMQLIHDDSLTFKEDIQKAQVSGQGDSLHEHIANLAGSPAIKKGILQTVKVVDELVKVMGRHKPENIVIEMARENQTTQKGQKNSRERMKRIEEGIKELGSQILKEHPVENTQLQNEKLYLYYLQNGRDMYVDQELDINRLSDYDVDHIVPQSFLKDDSIDNKVLTRSDKARGKSDNVPSEEVVKKMKNYWRQLLNAKLITQRKFDNLTKAERGGLSELDKAGFIKRQLVETRQITKHVAQILDSRMNTKYDENDKLIREVKVITLKSKLVSDFRKDFQFYKVREINNYHHAHDAYLNAVVGTALIKKYPKLESEFVYGDYKVYDVRKMIAKSEQEIGKATAKYFFYSNIMNFFKTEITLANGEIRKRPLIETNGETGEIVWDKGRDFATVRKVLSMPQVNIVKKTEVQTGGFSKESILPKRNSDKLIARKKDWDPKKYGGFDSPTVAYSVLVVAKVEKGKSKKLKSVKELLGITIMERSSFEKNPIDFLEAKGYKEVKKDLIIKLPKYSLFELENGRKRMLASAGELQKGNELALPSKYVNFLYLASHYEKLKGSPEDNEQKQLFVEQHKHYLDEIIEQISEFSKRVILADANLDKVLSAYNKHRDKPIREQAENIIHLFTLTNLGAPAAFKYFDTTIDRKRYTSTKEVLDATLIHQSITGLYETRIDLSQLGGDGGGGGGSGGGGSGGGGSGGTLNIEDEHRLHETSKEPDVSLGSTWLSDFPQAWAETGGMGLAVRQAPLIIPLKATSTPVSIKQYPMSQEARLGIKPHIQRLLDQGILVPCQSPWNTPLLPVKKPGTNDYRPVQDLREVNKRVEDIHPTVPNPYNLLSGLPPSHQWYTVLDLKDAFFCLRLHPTSQPLFAFEWRDPEMGISGQLTWTRLPQGFKNSPTLFDEALHRDLADFRIQHPDLILLQYVDDLLLAATSELDCQQGTRALLQTLGNLGYRASAKKAQICQKQVKYLGYLLKEGQRWLTEARKETVMGQPTPKTPRQLREFLGTAGFCRLWIPGFAEMAAPLYPLTKTGTLFNWGPDQQKAYQEIKQALLTAPALGLPDLTKPFELFVDEKQGYAKGVLTQKLGPWRRPVAYLSKKLDPVAAGWPPCLRMVAAIAVLTKDAGKLTMGQPLVILAPHAVEALVKQPPDRWLSNARMTHYQALLLDTDRVQFGPVVALNPATLLPLPEEGLQHNCLDILAEAHGTRPDLTDQPLPDADHTWYTDGSSLLQEGQRKAGAAVTTETEVIWAKALPAGTSAQRAELIALTQALKMAEGKKLNVYTDSRYAFATAHIHGEIYRRRGLLTSEGKEIKNKDEILALLKALFLPKRLSIIHCPGHQKGHSAEARGNRMADQAARKAAITETPDTSTLLAGKRTADGSEFEKRTADGSEFESPKKKAKVE

SEQ ID NO: 6137 - protein, 2180 aa, synthetic construct
MPAAKRVKLDGGDKKYSIGLDIGTNSVGWAVITDEYKVPSKKFKVLGNTDRHSIKKNLIGALLFDSGETAEATRLKRTARRRYTRRKNRICYLQEIFSNEMAKVDDSFFHRLEESFLVEEDKKHERHPIFGNIVDEVAYHEKYPTIYHLRKKLVDSTDKADLRLIYLALAHMIKFRGHFLIEGDLNPDNSDVDKLFIQLVQTYNQLFEENPINASGVDAKAILSARLSKSRRLENLIAQLPGEKKNGLFGNLIALSLGLTPNFKSNFDLAEDAKLQLSKDTYDDDLDNLLAQIGDQYADLFLAAKNLSDAILLSDILRVNTEITKAPLSASMIKRYDEHHQDLTLLKALVRQQLPEKYKEIFFDQSKNGYAGYIDGGASQEEFYKFIKPILEKMDGTEELLVKLNREDLLRKQRTFDNGSIPHQIHLGELHAILRRQEDFYPFLKDNREKIEKILTFRIPYYVGPLARGNSRFAWMTRKSEETITPWNFEEVVDKGASAQSFIERMTNFDKNLPNEKVLPKHSLLYEYFTVYNELTKVKYVTEGMRKPAFLSGEQKKAIVDLLFKTNRKVTVKQLKEDYFKKIECFDSVEISGVEDRFNASLGTYHDLLKIIKDKDFLDNEENEDILEDIVLTLTLFEDREMIEERLKTYAHLFDDKVMKQLKRRRYTGWGRLSRKLINGIRDKQSGKTILDFLKSDGFANRNFMQLIHDDSLTFKEDIQKAQVSGQGDSLHEHIANLAGSPAIKKGILQTVKVVDELVKVMGRHKPENIVIEMARENQTTQKGQKNSRERMKRIEEGIKELGSQILKEHPVENTQLQNEKLYLYYLQNGRDMYVDQELDINRLSDYDVDHIVPQSFLKDDSIDNKVLTRSDKARGKSDNVPSEEVVKKMKNYWRQLLNAKLITQRKFDNLTKAERGGLSELDKAGFIKRQLVETRQITKHVAQILDSRMNTKYDENDKLIREVKVITLKSKLVSDFRKDFQFYKVREINNYHHAHDAYLNAVVGTALIKKYPKLESEFVYGDYKVYDVRKMIAKSEQEIGKATAKYFFYSNIMNFFKTEITLANGEIRKRPLIETNGETGEIVWDKGRDFATVRKVLSMPQVNIVKKTEVQTGGFSKESILPKRNSDKLIARKKDWDPKKYGGFDSPTVAYSVLVVAKVEKGKSKKLKSVKELLGITIMERSSFEKNPIDFLEAKGYKEVKKDLIIKLPKYSLFELENGRKRMLASAGELQKGNELALPSKYVNFLYLASHYEKLKGSPEDNEQKQLFVEQHKHYLDEIIEQISEFSKRVILADANLDKVLSAYNKHRDKPIREQAENIIHLFTLTNLGAPAAFKYFDTTIDRKRYTSTKEVLDATLIHQSITGLYETRIDLSQLGGDGGGGGGSGGGGSGGGGSGGMDPLQLLQPLEAEIKGTKLKAHWNSGATITCVPEAFLEDERPIQTMLIKTIHGEKQQDVYYLTFKVQGRKVEAEVLASPYDYILLNPSDVPWLMKKPLQLTVLVPLHEYQERLLQQTALPKEQKELLQKLFLKYDALWQHWENQVGHRRIKPHNIATGTLAPRPQKQYPINPKAKPSIQIVIDDLLKQGVLIQQNSTMNTPVYPVPKPDGKWRMVLDYREVNKTIPLIAAQNQHSAGILSSIYRGKYKTTLDLTNGFWAHPITPESYWLTAFTWQGKQYCWTRLPQGFLNSPALFNADVVDLLKEIPNVQAYVDDIYISHDDPQEHLEQLEKIFSILLNAGYVVSLKKSEIAQREVEFLGFNITKEGRGLTDTFKQKLLNITPPKDLKQLQSILGLLNFARNFIPNYSELVKPLYTIVAPANGKFISWTEDNSNQLQHIISVLNQADNLEERNPETRLIIKVNSSPSAGYIRYYNEGSKRPIMYVNYIFSKAEAKFTQTEKLLTTMHKGLIKAMDLAMGQEILVYSPIVSMTKIQRTPLPERKALPVRWITWMTYLEDPRIQFHYDKSLPELQQIPNVTEDVIAKTKHPSEFAMVFYTDGSAIKHPDVNKSHSAGMGIAQVQFIPEYKIVHQWSIPLGDHTAQLAEIAAVEFACKKALKISGPVLIVTDSFYVAESANKELPYWKSNGFLNNKKKPLRHVSKWKSIAECLQLKPDIIIMHEKGHQQPMTTLHTEGNNLADKLATQGSYVVHAGKRTADGSEFEKRTADGSEFESPKKKAKVE

SEQ ID NO: 6138 - protein, 2091 aa, synthetic construct
MPAAKRVKLDGGDKKYSIGLDIGTNSVGWAVITDEYKVPSKKFKVLGNTDRHSIKKNLIGALLFDSGETAEATRLKRTARRRYTRRKNRICYLQEIFSNEMAKVDDSFFHRLEESFLVEEDKKHERHPIFGNIVDEVAYHEKYPTIYHLRKKLVDSTDKADLRLIYLALAHMIKFRGHFLIEGDLNPDNSDVDKLFIQLVQTYNQLFEENPINASGVDAKAILSARLSKSRRLENLIAQLPGEKKNGLFGNLIALSLGLTPNFKSNFDLAEDAKLQLSKDTYDDDLDNLLAQIGDQYADLFLAAKNLSDAILLSDILRVNTEITKAPLSASMIKRYDEHHQDLTLLKALVRQQLPEKYKEIFFDQSKNGYAGYIDGGASQEEFYKFIKPILEKMDGTEELLVKLNREDLLRKQRTFDNGSIPHQIHLGELHAILRRQEDFYPFLKDNREKIEKILTFRIPYYVGPLARGNSRFAWMTRKSEETITPWNFEEVVDKGASAQSFIERMTNFDKNLPNEKVLPKHSLLYEYFTVYNELTKVKYVTEGMRKPAFLSGEQKKAIVDLLFKTNRKVTVKQLKEDYFKKIECFDSVEISGVEDRFNASLGTYHDLLKIIKDKDFLDNEENEDILEDIVLTLTLFEDREMIEERLKTYAHLFDDKVMKQLKRRRYTGWGRLSRKLINGIRDKQSGKTILDFLKSDGFANRNFMQLIHDDSLTFKEDIQKAQVSGQGDSLHEHIANLAGSPAIKKGILQTVKVVDELVKVMGRHKPENIVIEMARENQTTQKGQKNSRERMKRIEEGIKELGSQILKEHPVENTQLQNEKLYLYYLQNGRDMYVDQELDINRLSDYDVDHIVPQSFLKDDSIDNKVLTRSDKARGKSDNVPSEEVVKKMKNYWRQLLNAKLITQRKFDNLTKAERGGLSELDKAGFIKRQLVETRQITKHVAQILDSRMNTKYDENDKLIREVKVITLKSKLVSDFRKDFQFYKVREINNYHHAHDAYLNAVVGTALIKKYPKLESEFVYGDYKVYDVRKMIAKSEQEIGKATAKYFFYSNIMNFFKTEITLANGEIRKRPLIETNGETGEIVWDKGRDFATVRKVLSMPQVNIVKKTEVQTGGFSKESILPKRNSDKLIARKKDWDPKKYGGFDSPTVAYSVLVVAKVEKGKSKKLKSVKELLGITIMERSSFEKNPIDFLEAKGYKEVKKDLIIKLPKYSLFELENGRKRMLASAGELQKGNELALPSKYVNFLYLASHYEKLKGSPEDNEQKQLFVEQHKHYLDEIIEQISEFSKRVILADANLDKVLSAYNKHRDKPIREQAENIIHLFTLTNLGAPAAFKYFDTTIDRKRYTSTKEVLDATLIHQSITGLYETRIDLSQLGGDGGGGGGSGGGGSGGGGSGGIPWLMKKPLQLTTLVPLQEYEERLLKQTMLTGSYKEKLQSLFLKYDALWQHWENQVGHRRIKPHHIATGTVNPRPQKQYPINPKAKASIQTVINDLLKQGVLIQQNSIMNTPVYPVPKPDGKWRMVLDYREVNKTIPLIAAQNQHSAGILSSIFRGKYKTTLDLSNGFWAHSITPESYWLTAFTWLGQQYCWTRLPQGFLNSPALFNADVVDLLKEVPNVQVYVDDIYISHDDPREHLEQLEKVFSLLLNAGYVVSLKKSEIAQHEVEFLGFNITKEGRGLTETFKQKLLNITPPRDLKQLQSILGLLNFARNFIPNFSELVKPLYNIIATAPGKYITWTTDNSQQLQNIISMLNSAENLEERNPEVRLIMKVNTSPSAGYIRFYNEFAKRPIMYLNYVYTKAEVKFTNTEKLLTTIHKGLIKALDLGMGQEILVYSPIVSMTKIQKTPLPERKALPIRWITWMSYLEDPRIQFHYDKTLPELQQVPTVTDDIIAKIKHPSEFSMVFYTDGSAIKHPNVNKSHNAGMGIAQVQFKPEFTVINTWSIPLGDHTAQLAEVAAVEFACKKALKIDGPVLIVTDSFYVAESVNKELPYWQSNGFFNNKKKPLKHVSKWKSIADCIQLKPDIIIIHEKGHQPTASTFHTEGNNLADKLATQGSYVVNAGKRTADGSEFEKRTADGSEFESPKKKAKVE

SEQ ID NO: 6139 - protein, 2091 aa, synthetic construct
MPAAKRVKLDGGDKKYSIGLDIGTNSVGWAVITDEYKVPSKKFKVLGNTDRHSIKKNLIGALLFDSGETAEATRLKRTARRRYTRRKNRICYLQEIFSNEMAKVDDSFFHRLEESFLVEEDKKHERHPIFGNIVDEVAYHEKYPTIYHLRKKLVDSTDKADLRLIYLALAHMIKFRGHFLIEGDLNPDNSDVDKLFIQLVQTYNQLFEENPINASGVDAKAILSARLSKSRRLENLIAQLPGEKKNGLFGNLIALSLGLTPNFKSNFDLAEDAKLQLSKDTYDDDLDNLLAQIGDQYADLFLAAKNLSDAILLSDILRVNTEITKAPLSASMIKRYDEHHQDLTLLKALVRQQLPEKYKEIFFDQSKNGYAGYIDGGASQEEFYKFIKPILEKMDGTEELLVKLNREDLLRKQRTFDNGSIPHQIHLGELHAILRRQEDFYPFLKDNREKIEKILTFRIPYYVGPLARGNSRFAWMTRKSEETITPWNFEEVVDKGASAQSFIERMTNFDKNLPNEKVLPKHSLLYEYFTVYNELTKVKYVTEGMRKPAFLSGEQKKAIVDLLFKTNRKVTVKQLKEDYFKKIECFDSVEISGVEDRFNASLGTYHDLLKIIKDKDFLDNEENEDILEDIVLTLTLFEDREMIEERLKTYAHLFDDKVMKQLKRRRYTGWGRLSRKLINGIRDKQSGKTILDFLKSDGFANRNFMQLIHDDSLTFKEDIQKAQVSGQGDSLHEHIANLAGSPAIKKGILQTVKVVDELVKVMGRHKPENIVIEMARENQTTQKGQKNSRERMKRIEEGIKELGSQILKEHPVENTQLQNEKLYLYYLQNGRDMYVDQELDINRLSDYDVDHIVPQSFLKDDSIDNKVLTRSDKARGKSDNVPSEEVVKKMKNYWRQLLNAKLITQRKFDNLTKAERGGLSELDKAGFIKRQLVETRQITKHVAQILDSRMNTKYDENDKLIREVKVITLKSKLVSDFRKDFQFYKVREINNYHHAHDAYLNAVVGTALIKKYPKLESEFVYGDYKVYDVRKMIAKSEQEIGKATAKYFFYSNIMNFFKTEITLANGEIRKRPLIETNGETGEIVWDKGRDFATVRKVLSMPQVNIVKKTEVQTGGFSKESILPKRNSDKLIARKKDWDPKKYGGFDSPTVAYSVLVVAKVEKGKSKKLKSVKELLGITIMERSSFEKNPIDFLEAKGYKEVKKDLIIKLPKYSLFELENGRKRMLASAGELQKGNELALPSKYVNFLYLASHYEKLKGSPEDNEQKQLFVEQHKHYLDEIIEQISEFSKRVILADANLDKVLSAYNKHRDKPIREQAENIIHLFTLTNLGAPAAFKYFDTTIDRKRYTSTKEVLDATLIHQSITGLYETRIDLSQLGGDGGGGGGSGGGGSGGGGSGGIPWLMKKPLQLTTLVPLQEYEERLLKQTMLTGSYKEKLQSLFLKYDALWQHWENQVGHRRIKPHHIATGTVNPRPQKQYPINPKAKASIQTVINDLLKQGVLIQQNSIMNTPVYPVPKPDGKWRMVLDYREVNKTIPLIAAQNQHSAGILSSIFRGKYKTTLDLSNGFWAHSITPESYWLTAFTWLGQQYCWTRLPQGFLNSPALFNADVVDLLKEVPNVQVYVDDIYISHDDPREHLEQLEKVFSLLLNAGYVVSLKKSEIAQHEVEFLGFNITKEGRGLTETFKQKLLNITPPRDLKQLQSILGKLNFARNFIPNFSELVKPLYNIIATAPGKYITWTTDNSQQLQNIISMLNSAENLEERNPEVRLIMKVNTSPSAGYIRFYNEFAKRPIMYLNYVYTKAEVKFTNTEKLLTTIHKGLIKALDLGMGQEILVYSPIVSMTKIQKTPLPERKALPIRWITWMSYLEDPRIQFHYDKTLPELQQVPTVTDDIIAKIKHPSEFSMVFYTDGSAIKHPNVNKSHNAGMGIAQVQFKPEFTVINTWSIPLGDHTAQLAEVAAVEFACKKALKIDGPVLIVTDSFYVAESVNKELPYWQSNGFFNNKKKPLKHVSKWKSIADCIQLKPDIIIIHEKGHQPTASTFHTEGNNLADKLATQGSYVVNAGKRTADGSEFEKRTADGSEFESPKKKAKVE

SEQ ID NO: 6140 - protein, 2098 aa, synthetic construct
MPAAKRVKLDGGDKKYSIGLDIGTNSVGWAVITDEYKVPSKKFKVLGNTDRHSIKKNLIGALLFDSGETAEATRLKRTARRRYTRRKNRICYLQEIFSNEMAKVDDSFFHRLEESFLVEEDKKHERHPIFGNIVDEVAYHEKYPTIYHLRKKLVDSTDKADLRLIYLALAHMIKFRGHFLIEGDLNPDNSDVDKLFIQLVQTYNQLFEENPINASGVDAKAILSARLSKSRRLENLIAQLPGEKKNGLFGNLIALSLGLTPNFKSNFDLAEDAKLQLSKDTYDDDLDNLLAQIGDQYADLFLAAKNLSDAILLSDILRVNTEITKAPLSASMIKRYDEHHQDLTLLKALVRQQLPEKYKEIFFDQSKNGYAGYIDGGASQEEFYKFIKPILEKMDGTEELLVKLNREDLLRKQRTFDNGSIPHQIHLGELHAILRRQEDFYPFLKDNREKIEKILTFRIPYYVGPLARGNSRFAWMTRKSEETITPWNFEEVVDKGASAQSFIERMTNFDKNLPNEKVLPKHSLLYEYFTVYNELTKVKYVTEGMRKPAFLSGEQKKAIVDLLFKTNRKVTVKQLKEDYFKKIECFDSVEISGVEDRFNASLGTYHDLLKIIKDKDFLDNEENEDILEDIVLTLTLFEDREMIEERLKTYAHLFDDKVMKQLKRRRYTGWGRLSRKLINGIRDKQSGKTILDFLKSDGFANRNFMQLIHDDSLTFKEDIQKAQVSGQGDSLHEHIANLAGSPAIKKGILQTVKVVDELVKVMGRHKPENIVIEMARENQTTQKGQKNSRERMKRIEEGIKELGSQILKEHPVENTQLQNEKLYLYYLQNGRDMYVDQELDINRLSDYDVDHIVPQSFLKDDSIDNKVLTRSDKARGKSDNVPSEEVVKKMKNYWRQLLNAKLITQRKFDNLTKAERGGLSELDKAGFIKRQLVETRQITKHVAQILDSRMNTKYDENDKLIREVKVITLKSKLVSDFRKDFQFYKVREINNYHHAHDAYLNAVVGTALIKKYPKLESEFVYGDYKVYDVRKMIAKSEQEIGKATAKYFFYSNIMNFFKTEITLANGEIRKRPLIETNGETGEIVWDKGRDFATVRKVLSMPQVNIVKKTEVQTGGFSKESILPKRNSDKLIARKKDWDPKKYGGFDSPTVAYSVLVVAKVEKGKSKKLKSVKELLGITIMERSSFEKNPIDFLEAKGYKEVKKDLIIKLPKYSLFELENGRKRMLASAGELQKGNELALPSKYVNFLYLASHYEKLKGSPEDNEQKQLFVEQHKHYLDEIIEQISEFSKRVILADANLDKVLSAYNKHRDKPIREQAENIIHLFTLTNLGAPAAFKYFDTTIDRKRYTSTKEVLDATLIHQSITGLYETRIDLSQLGGDGGGGGGSGGGGSGGGGSGGVLNLEEEYRLHEKPVPSSIDPSWLQLFPTVWAERAGMGLANQVPPVVVELRSGASPVAVRQYPMSKEAREGIRPHIQRFLDLGVLVPCQSPWNTPLLPVKKPGTNDYRPVQDLREINKRVQDIHPTVPNPYNLLSSLPPSHTWYSVLDLKDAFFCLKLHPNSQPLFAFEWRDPEKGNTGQLTWTRLPQGFKNSPTLFNEALHRDLAPFRALNPQVVLLQYVDDLLVAAPTYRDCKEGTQKLLQELSKLGYRVSAKKAQLCQKEVTYLGYLLKEGKRWLTPARKATVMKIPPPTTPRQVREFLGTAGFCRLWIPGFASLAAPLYPLTKPSIPFIWTEEHQKAFDRIKEALLSAPALALPDLTKPFTLYVDERAGVARGVLTQTLGPWRRPVAYLSKKLDPVASGWPTCLKAVAAVALLLKDADKLTLGQNVTVIASHSLESIVRQPPDRWMTNARMTHYQSLLLNERVSFAPPAVLNPATLLPVESEATPVHRCSEILAEETGTRRDLKDQPLPGVPAWYTDGSSFIAEGKRRAGAAIVDGKRTVWASSLPEGTSAQKAELVALTQALRLAEGKDINIYTDSRYAFATAHIHGAIYKQRGWLTSAGKDIKNKEEILALLEAIHLPKRVAIIHCPGHQKGNDPVATGNRRADEAAKQAALSTRVLAETTKPAGKRTADGSEFEKRTADGSEFESPKKKAKVE

SEQ ID NO: 6141 - protein, 2098 aa, synthetic construct
MPAAKRVKLDGGDKKYSIGLDIGTNSVGWAVITDEYKVPSKKFKVLGNTDRHSIKKNLIGALLFDSGETAEATRLKRTARRRYTRRKNRICYLQEIFSNEMAKVDDSFFHRLEESFLVEEDKKHERHPIFGNIVDEVAYHEKYPTIYHLRKKLVDSTDKADLRLIYLALAHMIKFRGHFLIEGDLNPDNSDVDKLFIQLVQTYNQLFEENPINASGVDAKAILSARLSKSRRLENLIAQLPGEKKNGLFGNLIALSLGLTPNFKSNFDLAEDAKLQLSKDTYDDDLDNLLAQIGDQYADLFLAAKNLSDAILLSDILRVNTEITKAPLSASMIKRYDEHHQDLTLLKALVRQQLPEKYKEIFFDQSKNGYAGYIDGGASQEEFYKFIKPILEKMDGTEELLVKLNREDLLRKQRTFDNGSIPHQIHLGELHAILRRQEDFYPFLKDNREKIEKILTFRIPYYVGPLARGNSRFAWMTRKSEETITPWNFEEVVDKGASAQSFIERMTNFDKNLPNEKVLPKHSLLYEYFTVYNELTKVKYVTEGMRKPAFLSGEQKKAIVDLLFKTNRKVTVKQLKEDYFKKIECFDSVEISGVEDRFNASLGTYHDLLKIIKDKDFLDNEENEDILEDIVLTLTLFEDREMIEERLKTYAHLFDDKVMKQLKRRRYTGWGRLSRKLINGIRDKQSGKTILDFLKSDGFANRNFMQLIHDDSLTFKEDIQKAQVSGQGDSLHEHIANLAGSPAIKKGILQTVKVVDELVKVMGRHKPENIVIEMARENQTTQKGQKNSRERMKRIEEGIKELGSQILKEHPVENTQLQNEKLYLYYLQNGRDMYVDQELDINRLSDYDVDHIVPQSFLKDDSIDNKVLTRSDKARGKSDNVPSEEVVKKMKNYWRQLLNAKLITQRKFDNLTKAERGGLSELDKAGFIKRQLVETRQITKHVAQILDSRMNTKYDENDKLIREVKVITLKSKLVSDFRKDFQFYKVREINNYHHAHDAYLNAVVGTALIKKYPKLESEFVYGDYKVYDVRKMIAKSEQEIGKATAKYFFYSNIMNFFKTEITLANGEIRKRPLIETNGETGEIVWDKGRDFATVRKVLSMPQVNIVKKTEVQTGGFSKESILPKRNSDKLIARKKDWDPKKYGGFDSPTVAYSVLVVAKVEKGKSKKLKSVKELLGITIMERSSFEKNPIDFLEAKGYKEVKKDLIIKLPKYSLFELENGRKRMLASAGELQKGNELALPSKYVNFLYLASHYEKLKGSPEDNEQKQLFVEQHKHYLDEIIEQISEFSKRVILADANLDKVLSAYNKHRDKPIREQAENIIHLFTLTNLGAPAAFKYFDTTIDRKRYTSTKEVLDATLIHQSITGLYETRIDLSQLGGDGGGGGGSGGGGSGGGGSGGVLNLEEEYRLHEKPVPSSIDPSWLQLFPTVWAERAGMGLANQVPPVVVELRSGASPVAVRQYPMSKEAREGIRPHIQRFLDLGVLVPCQSPWNTPLLPVKKPGTNDYRPVQDLREINKRVQDIHPTVPNPYNLLSSLPPSHTWYSVLDLKDAFFCLKLHPNSQPLFAFEWRDPEKGNTGQLTWTRLPQGFKNSPTLFNEALHRDLAPFRALNPQVVLLQYVDDLLVAAPTYRDCKEGTQKLLQELSKLGYRVSAKKAQLCQKEVTYLGYLLKEGKRWLTPARKATVMKIPPPTTPRQVREFLGKAGFCRLFIPGFASLAAPLYPLTKPSIPFIWTEEHQKAFDRIKEALLSAPALALPDLTKPFTLYVDERAGVARGVLTQTLGPWRRPVAYLSKKLDPVASGWPTCLKAVAAVALLLKDADKLTLGQNVTVIASHSLESIVRQPPDRWMTNARMTHYQSLLLNERVSFAPPAVLNPATLLPVESEATPVHRCSEILAEETGTRRDLKDQPLPGVPAWYTDGSSFIAEGKRRAGAAIVDGKRTVWASSLPEGTSAQKAELVALTQALRLAEGKDINIYTDSRYAFATAHIHGAIYKQRGWLTSAGKDIKNKEEILALLEAIHLPKRVAIIHCPGHQKGNDPVATGNRRADEAAKQAALSTRVLAETTKPAGKRTADGSEFEKRTADGSEFESPKKKAKVE

SEQ ID NO: 6142 - protein, 2100 aa, synthetic construct
MPAAKRVKLDGGDKKYSIGLDIGTNSVGWAVITDEYKVPSKKFKVLGNTDRHSIKKNLIGALLFDSGETAEATRLKRTARRRYTRRKNRICYLQEIFSNEMAKVDDSFFHRLEESFLVEEDKKHERHPIFGNIVDEVAYHEKYPTIYHLRKKLVDSTDKADLRLIYLALAHMIKFRGHFLIEGDLNPDNSDVDKLFIQLVQTYNQLFEENPINASGVDAKAILSARLSKSRRLENLIAQLPGEKKNGLFGNLIALSLGLTPNFKSNFDLAEDAKLQLSKDTYDDDLDNLLAQIGDQYADLFLAAKNLSDAILLSDILRVNTEITKAPLSASMIKRYDEHHQDLTLLKALVRQQLPEKYKEIFFDQSKNGYAGYIDGGASQEEFYKFIKPILEKMDGTEELLVKLNREDLLRKQRTFDNGSIPHQIHLGELHAILRRQEDFYPFLKDNREKIEKILTFRIPYYVGPLARGNSRFAWMTRKSEETITPWNFEEVVDKGASAQSFIERMTNFDKNLPNEKVLPKHSLLYEYFTVYNELTKVKYVTEGMRKPAFLSGEQKKAIVDLLFKTNRKVTVKQLKEDYFKKIECFDSVEISGVEDRFNASLGTYHDLLKIIKDKDFLDNEENEDILEDIVLTLTLFEDREMIEERLKTYAHLFDDKVMKQLKRRRYTGWGRLSRKLINGIRDKQSGKTILDFLKSDGFANRNFMQLIHDDSLTFKEDIQKAQVSGQGDSLHEHIANLAGSPAIKKGILQTVKVVDELVKVMGRHKPENIVIEMARENQTTQKGQKNSRERMKRIEEGIKELGSQILKEHPVENTQLQNEKLYLYYLQNGRDMYVDQELDINRLSDYDVDHIVPQSFLKDDSIDNKVLTRSDKARGKSDNVPSEEVVKKMKNYWRQLLNAKLITQRKFDNLTKAERGGLSELDKAGFIKRQLVETRQITKHVAQILDSRMNTKYDENDKLIREVKVITLKSKLVSDFRKDFQFYKVREINNYHHAHDAYLNAVVGTALIKKYPKLESEFVYGDYKVYDVRKMIAKSEQEIGKATAKYFFYSNIMNFFKTEITLANGEIRKRPLIETNGETGEIVWDKGRDFATVRKVLSMPQVNIVKKTEVQTGGFSKESILPKRNSDKLIARKKDWDPKKYGGFDSPTVAYSVLVVAKVEKGKSKKLKSVKELLGITIMERSSFEKNPIDFLEAKGYKEVKKDLIIKLPKYSLFELENGRKRMLASAGELQKGNELALPSKYVNFLYLASHYEKLKGSPEDNEQKQLFVEQHKHYLDEIIEQISEFSKRVILADANLDKVLSAYNKHRDKPIREQAENIIHLFTLTNLGAPAAFKYFDTTIDRKRYTSTKEVLDATLIHQSITGLYETRIDLSQLGGDGGGGGGSGGGGSGGGGSGGTLNIEDEYRLHETSKEPDVPLGSTWLSDFPQAWAETGGMGLAVRQAPLIIPLKATSTPVSIKQYPMSQEARLGIKPHIQRLLDQGILVPCQSPWNTPLLPVKKPGTNDYRPVQDLREVNKRVEDIHPTVPNPYNLLSGLPPSHQWYTVLDLKDAFFCLRLHPTSQPLFAFEWRDPEMGISGQLTWTRLPQGFKNSPTLFNEALHRDLADFRIQHPDLILLQYVDDLLLAATSEQDCQRGTRALLQTLGNLGYRASAKKAQICQKQVKYLGYLLKEGQRWLTEARKETVMGQPTPKTPRQLREFLGTAGFCRLWIPGFAEMAAPLYPLTKPGTLFNWGPDQQKAYQEIKQALLTAPALGLPDLTKPFELFVDEKQGYAKGVLTQKLGPWRRPVAYLSKKLDPVAAGWPPCLRMVAAIAVLTKDAGKLTMGQPLVILAPHAVEALVKQPPDRWLSNARMTHYQAMLLDTDRVQFGPVVALNPATLLPLPEKEAPHDCLEILAETHGTRPDLTDQPIPDADYTWYTDGSSFLQEGQRRAGAAVTTETEVIWARALPAGTSAQRAELIALTQALKMAEGKKLNVYTDSRYAFATAHVHGEIYRRRGWLTSEGREIKNKNEILALLKALFLPKRLSIIHCPGHQKGNSAEARGNRMADQAAREAAMKAVLETSTLLAGKRTADGSEFEKRTADGSEFESPKKKAKVE

SEQ ID NO: 6143 - protein, 2107 aa, synthetic construct
MPAAKRVKLDGGDKKYSIGLDIGTNSVGWAVITDEYKVPSKKFKVLGNTDRHSIKKNLIGALLFDSGETAEATRLKRTARRRYTRRKNRICYLQEIFSNEMAKVDDSFFHRLEESFLVEEDKKHERHPIFGNIVDEVAYHEKYPTIYHLRKKLVDSTDKADLRLIYLALAHMIKFRGHFLIEGDLNPDNSDVDKLFIQLVQTYNQLFEENPINASGVDAKAILSARLSKSRRLENLIAQLPGEKKNGLFGNLIALSLGLTPNFKSNFDLAEDAKLQLSKDTYDDDLDNLLAQIGDQYADLFLAAKNLSDAILLSDILRVNTEITKAPLSASMIKRYDEHHQDLTLLKALVRQQLPEKYKEIFFDQSKNGYAGYIDGGASQEEFYKFIKPILEKMDGTEELLVKLNREDLLRKQRTFDNGSIPHQIHLGELHAILRRQEDFYPFLKDNREKIEKILTFRIPYYVGPLARGNSRFAWMTRKSEETITPWNFEEVVDKGASAQSFIERMTNFDKNLPNEKVLPKHSLLYEYFTVYNELTKVKYVTEGMRKPAFLSGEQKKAIVDLLFKTNRKVTVKQLKEDYFKKIECFDSVEISGVEDRFNASLGTYHDLLKIIKDKDFLDNEENEDILEDIVLTLTLFEDREMIEERLKTYAHLFDDKVMKQLKRRRYTGWGRLSRKLINGIRDKQSGKTILDFLKSDGFANRNFMQLIHDDSLTFKEDIQKAQVSGQGDSLHEHIANLAGSPAIKKGILQTVKVVDELVKVMGRHKPENIVIEMARENQTTQKGQKNSRERMKRIEEGIKELGSQILKEHPVENTQLQNEKLYLYYLQNGRDMYVDQELDINRLSDYDVDHIVPQSFLKDDSIDNKVLTRSDKARGKSDNVPSEEVVKKMKNYWRQLLNAKLITQRKFDNLTKAERGGLSELDKAGFIKRQLVETRQITKHVAQILDSRMNTKYDENDKLIREVKVITLKSKLVSDFRKDFQFYKVREINNYHHAHDAYLNAVVGTALIKKYPKLESEFVYGDYKVYDVRKMIAKSEQEIGKATAKYFFYSNIMNFFKTEITLANGEIRKRPLIETNGETGEIVWDKGRDFATVRKVLSMPQVNIVKKTEVQTGGFSKESILPKRNSDKLIARKKDWDPKKYGGFDSPTVAYSVLVVAKVEKGKSKKLKSVKELLGITIMERSSFEKNPIDFLEAKGYKEVKKDLIIKLPKYSLFELENGRKRMLASAGELQKGNELALPSKYVNFLYLASHYEKLKGSPEDNEQKQLFVEQHKHYLDEIIEQISEFSKRVILADANLDKVLSAYNKHRDKPIREQAENIIHLFTLTNLGAPAAFKYFDTTIDRKRYTSTKEVLDATLIHQSITGLYETRIDLSQLGGDGGGGGGSGGGGSGGGGSGGGGSGGTAPLEEEYRLFLEAPIQNVTLLEQWKREIPKVWAEINPPGLASTQAPIHVQLLSTALPVRVRQYPITLEAKRSLRETIRKFRAAGILRPVHSPWNTPLLPVRKSGTSEYRMVQDLREVNKRVETIHPTVPNPYTLLSLLPPDRIWYSVLDLKDAFFCIPLAPESQLIFAFEWADAEEGESGQLTWTRLPQGFKNSPTLFDEALNRDLQGFRLDHPSVSLLQYVDDLLIAADTQAACLSATRDLLMTLAELGYRVSGKKAQLCQEEVTYLGFKIHKGSRSLSNSRTQAILQIPVPKTKRQVREFLGTIGYCRLWIPGFAELAQPLYAATRGGNDPLVWGEKEEEAFQSLKLALTQPPALALPSLDKPFQLFVEETSGAAKGVLTQALGPWKRPVAYLSKRLDPVAAGWPRCLRAIAAAALLTREASKLTFGQDIEITSSHNLESLLRSPPDKWLTNARITQYQVLLLDPPRVRFKQTAALNPATLLPETDDTLPIHHCLDTLDSLTSTRPDLTDQPLAQAEATLFTDGSSYIRDGKRYAGAAVVTLDSVIWAEPLPIGTSAQKAELIALTKALEWSKDKSVNIYTDSRYAFATLHVHGMIYRERGLLTAGGKAIKNAPEILALLTAVWLPKRVAVMHCKGHQKDDAPTSTGNRRADEVAREVAIRPLSTQATISAGKRTADGSEFEKRTADGSEFESPKKKAKVE

SEQ ID NO: 6144 - protein, 2107 aa, synthetic construct
MPAAKRVKLDGGDKKYSIGLDIGTNSVGWAVITDEYKVPSKKFKVLGNTDRHSIKKNLIGALLFDSGETAEATRLKRTARRRYTRRKNRICYLQEIFSNEMAKVDDSFFHRLEESFLVEEDKKHERHPIFGNIVDEVAYHEKYPTIYHLRKKLVDSTDKADLRLIYLALAHMIKFRGHFLIEGDLNPDNSDVDKLFIQLVQTYNQLFEENPINASGVDAKAILSARLSKSRRLENLIAQLPGEKKNGLFGNLIALSLGLTPNFKSNFDLAEDAKLQLSKDTYDDDLDNLLAQIGDQYADLFLAAKNLSDAILLSDILRVNTEITKAPLSASMIKRYDEHHQDLTLLKALVRQQLPEKYKEIFFDQSKNGYAGYIDGGASQEEFYKFIKPILEKMDGTEELLVKLNREDLLRKQRTFDNGSIPHQIHLGELHAILRRQEDFYPFLKDNREKIEKILTFRIPYYVGPLARGNSRFAWMTRKSEETITPWNFEEVVDKGASAQSFIERMTNFDKNLPNEKVLPKHSLLYEYFTVYNELTKVKYVTEGMRKPAFLSGEQKKAIVDLLFKTNRKVTVKQLKEDYFKKIECFDSVEISGVEDRFNASLGTYHDLLKIIKDKDFLDNEENEDILEDIVLTLTLFEDREMIEERLKTYAHLFDDKVMKQLKRRRYTGWGRLSRKLINGIRDKQSGKTILDFLKSDGFANRNFMQLIHDDSLTFKEDIQKAQVSGQGDSLHEHIANLAGSPAIKKGILQTVKVVDELVKVMGRHKPENIVIEMARENQTTQKGQKNSRERMKRIEEGIKELGSQILKEHPVENTQLQNEKLYLYYLQNGRDMYVDQELDINRLSDYDVDHIVPQSFLKDDSIDNKVLTRSDKARGKSDNVPSEEVVKKMKNYWRQLLNAKLITQRKFDNLTKAERGGLSELDKAGFIKRQLVETRQITKHVAQILDSRMNTKYDENDKLIREVKVITLKSKLVSDFRKDFQFYKVREINNYHHAHDAYLNAVVGTALIKKYPKLESEFVYGDYKVYDVRKMIAKSEQEIGKATAKYFFYSNIMNFFKTEITLANGEIRKRPLIETNGETGEIVWDKGRDFATVRKVLSMPQVNIVKKTEVQTGGFSKESILPKRNSDKLIARKKDWDPKKYGGFDSPTVAYSVLVVAKVEKGKSKKLKSVKELLGITIMERSSFEKNPIDFLEAKGYKEVKKDLIIKLPKYSLFELENGRKRMLASAGELQKGNELALPSKYVNFLYLASHYEKLKGSPEDNEQKQLFVEQHKHYLDEIIEQISEFSKRVILADANLDKVLSAYNKHRDKPIREQAENIIHLFTLTNLGAPAAFKYFDTTIDRKRYTSTKEVLDATLIHQSITGLYETRIDLSQLGGDGGGGGGSGGGGSGGGGSGGGGSGGTAPLEEEYRLFLEAPIQNVTLLEQWKREIPKVWAEINPPGLASTQAPIHVQLLSTALPVRVRQYPITLEAKRSLRETIRKFRAAGILRPVHSPWNTPLLPVRKSGTSEYRMVQDLREVNKRVETIHPTVPNPYTLLSLLPPDRIWYSVLDLKDAFFCIPLAPESQLIFAFEWADAEEGESGQLTWTRLPQGFKNSPTLFNEALNRDLQGFRLDHPSVSLLQYVDDLLIAADTQAACLSATRDLLMTLAELGYRVSGKKAQLCQEEVTYLGFKIHKGSRSLSNSRTQAILQIPVPKTKRQVREFLGTIGYCRLWIPGFAELAQPLYAATRPGNDPLVWGEKEEEAFQSLKLALTQPPALALPSLDKPFQLFVEETSGAAKGVLTQALGPWKRPVAYLSKRLDPVAAGWPRCLRAIAAAALLTREASKLTFGQDIEITSSHNLESLLRSPPDKWLTNARITQYQVLLLDPPRVRFKQTAALNPATLLPETDDTLPIHHCLDTLDSLTSTRPDLTDQPLAQAEATLFTDGSSYIRDGKRYAGAAVVTLDSVIWAEPLPIGTSAQKAELIALTKALEWSKDKSVNIYTDSRYAFATLHVHGMIYRERGWLTAGGKAIKNAPEILALLTAVWLPKRVAVMHCKGHQKDDAPTSTGNRRADEVAREVAIRPLSTQATISAGKRTADGSEFEKRTADGSEFESPKKKAKVE

SEQ ID NO: 6145 - protein, 2096 aa, synthetic construct
MPAAKRVKLDGGDKKYSIGLDIGTNSVGWAVITDEYKVPSKKFKVLGNTDRHSIKKNLIGALLFDSGETAEATRLKRTARRRYTRRKNRICYLQEIFSNEMAKVDDSFFHRLEESFLVEEDKKHERHPIFGNIVDEVAYHEKYPTIYHLRKKLVDSTDKADLRLIYLALAHMIKFRGHFLIEGDLNPDNSDVDKLFIQLVQTYNQLFEENPINASGVDAKAILSARLSKSRRLENLIAQLPGEKKNGLFGNLIALSLGLTPNFKSNFDLAEDAKLQLSKDTYDDDLDNLLAQIGDQYADLFLAAKNLSDAILLSDILRVNTEITKAPLSASMIKRYDEHHQDLTLLKALVRQQLPEKYKEIFFDQSKNGYAGYIDGGASQEEFYKFIKPILEKMDGTEELLVKLNREDLLRKQRTFDNGSIPHQIHLGELHAILRRQEDFYPFLKDNREKIEKILTFRIPYYVGPLARGNSRFAWMTRKSEETITPWNFEEVVDKGASAQSFIERMTNFDKNLPNEKVLPKHSLLYEYFTVYNELTKVKYVTEGMRKPAFLSGEQKKAIVDLLFKTNRKVTVKQLKEDYFKKIECFDSVEISGVEDRFNASLGTYHDLLKIIKDKDFLDNEENEDILEDIVLTLTLFEDREMIEERLKTYAHLFDDKVMKQLKRRRYTGWGRLSRKLINGIRDKQSGKTILDFLKSDGFANRNFMQLIHDDSLTFKEDIQKAQVSGQGDSLHEHIANLAGSPAIKKGILQTVKVVDELVKVMGRHKPENIVIEMARENQTTQKGQKNSRERMKRIEEGIKELGSQILKEHPVENTQLQNEKLYLYYLQNGRDMYVDQELDINRLSDYDVDHIVPQSFLKDDSIDNKVLTRSDKARGKSDNVPSEEVVKKMKNYWRQLLNAKLITQRKFDNLTKAERGGLSELDKAGFIKRQLVETRQITKHVAQILDSRMNTKYDENDKLIREVKVITLKSKLVSDFRKDFQFYKVREINNYHHAHDAYLNAVVGTALIKKYPKLESEFVYGDYKVYDVRKMIAKSEQEIGKATAKYFFYSNIMNFFKTEITLANGEIRKRPLIETNGETGEIVWDKGRDFATVRKVLSMPQVNIVKKTEVQTGGFSKESILPKRNSDKLIARKKDWDPKKYGGFDSPTVAYSVLVVAKVEKGKSKKLKSVKELLGITIMERSSFEKNPIDFLEAKGYKEVKKDLIIKLPKYSLFELENGRKRMLASAGELQKGNELALPSKYVNFLYLASHYEKLKGSPEDNEQKQLFVEQHKHYLDEIIEQISEFSKRVILADANLDKVLSAYNKHRDKPIREQAENIIHLFTLTNLGAPAAFKYFDTTIDRKRYTSTKEVLDATLIHQSITGLYETRIDLSQLGGDGGGGGGSGGGGSGGGGSGGGGSGGVPWILKKPLELTIKLDLEEQQGTLLNNSILSKKGKEELKQLFEKYSALWQSWENQVGHRRIRPHKIATGTVKPTPQKQYHINPKAKPDIQIVINDLLKQGVLIQKESTMNTPVYPVPKPNGRWRMVLDYRAVNKVTPLIAVQNQHSYGILGSLFKGRYKTTIDLSNGFWAHPIVPEDYWITAFTWQGKQYCWTVLPQGFLNSPGLFNGDVVDLLQGIPNVEVYVDDVYISHDSEKEHLEYLDILFNRLKEAGYIISLKKSNIANSIVDFLGFQITNEGRGLTDTFKEKLENITAPTTLKQLQSILGLLNFARNFIPDFTELIAPLYALIPKSPKNYVPWQIEHSTTLETLITKLNGAEYLQGRKGDKTLIMKVNASYTTGYIRYYNEGEKKPISYVSIVFSKTELKFTELEKLLTTVHKGLLKALDLSMGQNIHVYSPIVSMQNIQKTPQTAKKALASRWLSWLSYLEDPRIRFFYDPQMPALKDLPAVDTGKDNKKHPSNFQHIFYTDGSAITSPTKEGHLNAGMGIVYFINKDGNLQKQQEWSISLGNHTAQFAEIAAFEFALKKCLPLGGNILVVTDSNYVAKAYNEELDVWASNGFVNNRKKPLKHISKWKSVADLKRLRPDVVVTHEPGHQKLDSSPHAYGNNLADQLATQASFKVHAGKRTADGSEFEKRTADGSEFESPKKKAKVE

SEQ ID NO: 6146 - protein, 2104 aa, synthetic construct
MPAAKRVKLDGGDKKYSIGLDIGTNSVGWAVITDEYKVPSKKFKVLGNTDRHSIKKNLIGALLFDSGETAEATRLKRTARRRYTRRKNRICYLQEIFSNEMAKVDDSFFHRLEESFLVEEDKKHERHPIFGNIVDEVAYHEKYPTIYHLRKKLVDSTDKADLRLIYLALAHMIKFRGHFLIEGDLNPDNSDVDKLFIQLVQTYNQLFEENPINASGVDAKAILSARLSKSRRLENLIAQLPGEKKNGLFGNLIALSLGLTPNFKSNFDLAEDAKLQLSKDTYDDDLDNLLAQIGDQYADLFLAAKNLSDAILLSDILRVNTEITKAPLSASMIKRYDEHHQDLTLLKALVRQQLPEKYKEIFFDQSKNGYAGYIDGGASQEEFYKFIKPILEKMDGTEELLVKLNREDLLRKQRTFDNGSIPHQIHLGELHAILRRQEDFYPFLKDNREKIEKILTFRIPYYVGPLARGNSRFAWMTRKSEETITPWNFEEVVDKGASAQSFIERMTNFDKNLPNEKVLPKHSLLYEYFTVYNELTKVKYVTEGMRKPAFLSGEQKKAIVDLLFKTNRKVTVKQLKEDYFKKIECFDSVEISGVEDRFNASLGTYHDLLKIIKDKDFLDNEENEDILEDIVLTLTLFEDREMIEERLKTYAHLFDDKVMKQLKRRRYTGWGRLSRKLINGIRDKQSGKTILDFLKSDGFANRNFMQLIHDDSLTFKEDIQKAQVSGQGDSLHEHIANLAGSPAIKKGILQTVKVVDELVKVMGRHKPENIVIEMARENQTTQKGQKNSRERMKRIEEGIKELGSQILKEHPVENTQLQNEKLYLYYLQNGRDMYVDQELDINRLSDYDVDHIVPQSFLKDDSIDNKVLTRSDKARGKSDNVPSEEVVKKMKNYWRQLLNAKLITQRKFDNLTKAERGGLSELDKAGFIKRQLVETRQITKHVAQILDSRMNTKYDENDKLIREVKVITLKSKLVSDFRKDFQFYKVREINNYHHAHDAYLNAVVGTALIKKYPKLESEFVYGDYKVYDVRKMIAKSEQEIGKATAKYFFYSNIMNFFKTEITLANGEIRKRPLIETNGETGEIVWDKGRDFATVRKVLSMPQVNIVKKTEVQTGGFSKESILPKRNSDKLIARKKDWDPKKYGGFDSPTVAYSVLVVAKVEKGKSKKLKSVKELLGITIMERSSFEKNPIDFLEAKGYKEVKKDLIIKLPKYSLFELENGRKRMLASAGELQKGNELALPSKYVNFLYLASHYEKLKGSPEDNEQKQLFVEQHKHYLDEIIEQISEFSKRVILADANLDKVLSAYNKHRDKPIREQAENIIHLFTLTNLGAPAAFKYFDTTIDRKRYTSTKEVLDATLIHQSITGLYETRIDLSQLGGDGGGGGGSGGGGSGGGGSGGGGSGGTLQLEEEYRLFEPESTQKQEMDIWLKNFPQAWAETGGMGTAHCQAPVLIQLKATATPISIRQYPMPHEAYQGIKPHIRRMLDQGILKPCQSPWNTPLLPVKKPGTEDYRPVQDLREVNKRVEDIHPTVPNPYNLLSTLPPSHPWYTVLDLKDAFFCLRLHSESQLLFAFEWRDPEIGLSGQLTWTRLPQGFKNSPTLFDEALHSDLADFRVRYPALVLLQYVDDLLLAAATRTECLEGTKALLETLGNKGYRASAKKAQICLQEVTYLGYSLKDGQRWLTKARKEAILSIPVPKNSRQVREFLGTAGYCRLWIPGFAELAAPLYPLTRPGTLFQWGTEQQLAFEDIKKALLSSPALGLPDITKPFELFIDENSGFAKGVLVQKLGPWKRPVAYLSKKLDTVASGWPPCLRMVAAIAILVKDAGKLTLGQPLTILTSHPVEALVRQPPNKWLSNARMTHYQAMLLDAERVHFGPTVSLNPATLLPLPSGGNHHDCLQILAETHGTRPDLTDQPLPDADLTWYTDGSSFIRNGEREAGAAVTTESEVIWAAPLPPGTSAQRAELIALTQALKMAEGKKLTVYTDSRYAFATTHVHGEIYRRRGLLTSEGKEIKNKNEILALLEALFLPKRLSIIHCPGHQKGDSPQAKGNRLADDTAKKAATETHSSLTVLPAGKRTADGSEFEKRTADGSEFESPKKKAKVE

SEQ ID NO: 6147 - protein, 2104 aa, synthetic construct
MPAAKRVKLDGGDKKYSIGLDIGTNSVGWAVITDEYKVPSKKFKVLGNTDRHSIKKNLIGALLFDSGETAEATRLKRTARRRYTRRKNRICYLQEIFSNEMAKVDDSFFHRLEESFLVEEDKKHERHPIFGNIVDEVAYHEKYPTIYHLRKKLVDSTDKADLRLIYLALAHMIKFRGHFLIEGDLNPDNSDVDKLFIQLVQTYNQLFEENPINASGVDAKAILSARLSKSRRLENLIAQLPGEKKNGLFGNLIALSLGLTPNFKSNFDLAEDAKLQLSKDTYDDDLDNLLAQIGDQYADLFLAAKNLSDAILLSDILRVNTEITKAPLSASMIKRYDEHHQDLTLLKALVRQQLPEKYKEIFFDQSKNGYAGYIDGGASQEEFYKFIKPILEKMDGTEELLVKLNREDLLRKQRTFDNGSIPHQIHLGELHAILRRQEDFYPFLKDNREKIEKILTFRIPYYVGPLARGNSRFAWMTRKSEETITPWNFEEVVDKGASAQSFIERMTNFDKNLPNEKVLPKHSLLYEYFTVYNELTKVKYVTEGMRKPAFLSGEQKKAIVDLLFKTNRKVTVKQLKEDYFKKIECFDSVEISGVEDRFNASLGTYHDLLKIIKDKDFLDNEENEDILEDIVLTLTLFEDREMIEERLKTYAHLFDDKVMKQLKRRRYTGWGRLSRKLINGIRDKQSGKTILDFLKSDGFANRNFMQLIHDDSLTFKEDIQKAQVSGQGDSLHEHIANLAGSPAIKKGILQTVKVVDELVKVMGRHKPENIVIEMARENQTTQKGQKNSRERMKRIEEGIKELGSQILKEHPVENTQLQNEKLYLYYLQNGRDMYVDQELDINRLSDYDVDHIVPQSFLKDDSIDNKVLTRSDKARGKSDNVPSEEVVKKMKNYWRQLLNAKLITQRKFDNLTKAERGGLSELDKAGFIKRQLVETRQITKHVAQILDSRMNTKYDENDKLIREVKVITLKSKLVSDFRKDFQFYKVREINNYHHAHDAYLNAVVGTALIKKYPKLESEFVYGDYKVYDVRKMIAKSEQEIGKATAKYFFYSNIMNFFKTEITLANGEIRKRPLIETNGETGEIVWDKGRDFATVRKVLSMPQVNIVKKTEVQTGGFSKESILPKRNSDKLIARKKDWDPKKYGGFDSPTVAYSVLVVAKVEKGKSKKLKSVKELLGITIMERSSFEKNPIDFLEAKGYKEVKKDLIIKLPKYSLFELENGRKRMLASAGELQKGNELALPSKYVNFLYLASHYEKLKGSPEDNEQKQLFVEQHKHYLDEIIEQISEFSKRVILADANLDKVLSAYNKHRDKPIREQAENIIHLFTLTNLGAPAAFKYFDTTIDRKRYTSTKEVLDATLIHQSITGLYETRIDLSQLGGDGGGGGGSGGGGSGGGGSGGGGSGGTLQLEEEYRLFEPESTQKQEMDIWLKNFPQAWAETGGMGTAHCQAPVLIQLKATATPISIRQYPMPHEAYQGIKPHIRRMLDQGILKPCQSPWNTPLLPVKKPGTEDYRPVQDLREVNKRVEDIHPTVPNPYNLLSTLPPSHPWYTVLDLKDAFFCLRLHSESQLLFAFEWRDPEIGLSGQLTWTRLPQGFKNSPTLFNEALHSDLADFRVRYPALVLLQYVDDLLLAAATRTECLEGTKALLETLGNKGYRASAKKAQICLQEVTYLGYSLKDGQRWLTKARKEAILSIPVPKNSRQVREFLGTAGYCRLWIPGFAELAAPLYPLTRPGTLFQWGTEQQLAFEDIKKALLSSPALGLPDITKPFELFIDENSGFAKGVLVQKLGPWKRPVAYLSKKLDTVASGWPPCLRMVAAIAILVKDAGKLTLGQPLTILTSHPVEALVRQPPNKWLSNARMTHYQAMLLDAERVHFGPTVSLNPATLLPLPSGGNHHDCLQILAETHGTRPDLTDQPLPDADLTWYTDGSSFIRNGEREAGAAVTTESEVIWAAPLPPGTSAQRAELIALTQALKMAEGKKLTVYTDSRYAFATTHVHGEIYRRRGWLTSEGKEIKNKNEILALLEALFLPKRLSIIHCPGHQKGDSPQAKGNRLADDTAKKAATETHSSLTVLPAGKRTADGSEFEKRTADGSEFESPKKKAKVE

SEQ ID NO: 6148 - protein, 2104 aa, synthetic construct
MPAAKRVKLDGGDKKYSIGLDIGTNSVGWAVITDEYKVPSKKFKVLGNTDRHSIKKNLIGALLFDSGETAEATRLKRTARRRYTRRKNRICYLQEIFSNEMAKVDDSFFHRLEESFLVEEDKKHERHPIFGNIVDEVAYHEKYPTIYHLRKKLVDSTDKADLRLIYLALAHMIKFRGHFLIEGDLNPDNSDVDKLFIQLVQTYNQLFEENPINASGVDAKAILSARLSKSRRLENLIAQLPGEKKNGLFGNLIALSLGLTPNFKSNFDLAEDAKLQLSKDTYDDDLDNLLAQIGDQYADLFLAAKNLSDAILLSDILRVNTEITKAPLSASMIKRYDEHHQDLTLLKALVRQQLPEKYKEIFFDQSKNGYAGYIDGGASQEEFYKFIKPILEKMDGTEELLVKLNREDLLRKQRTFDNGSIPHQIHLGELHAILRRQEDFYPFLKDNREKIEKILTFRIPYYVGPLARGNSRFAWMTRKSEETITPWNFEEVVDKGASAQSFIERMTNFDKNLPNEKVLPKHSLLYEYFTVYNELTKVKYVTEGMRKPAFLSGEQKKAIVDLLFKTNRKVTVKQLKEDYFKKIECFDSVEISGVEDRFNASLGTYHDLLKIIKDKDFLDNEENEDILEDIVLTLTLFEDREMIEERLKTYAHLFDDKVMKQLKRRRYTGWGRLSRKLINGIRDKQSGKTILDFLKSDGFANRNFMQLIHDDSLTFKEDIQKAQVSGQGDSLHEHIANLAGSPAIKKGILQTVKVVDELVKVMGRHKPENIVIEMARENQTTQKGQKNSRERMKRIEEGIKELGSQILKEHPVENTQLQNEKLYLYYLQNGRDMYVDQELDINRLSDYDVDHIVPQSFLKDDSIDNKVLTRSDKARGKSDNVPSEEVVKKMKNYWRQLLNAKLITQRKFDNLTKAERGGLSELDKAGFIKRQLVETRQITKHVAQILDSRMNTKYDENDKLIREVKVITLKSKLVSDFRKDFQFYKVREINNYHHAHDAYLNAVVGTALIKKYPKLESEFVYGDYKVYDVRKMIAKSEQEIGKATAKYFFYSNIMNFFKTEITLANGEIRKRPLIETNGETGEIVWDKGRDFATVRKVLSMPQVNIVKKTEVQTGGFSKESILPKRNSDKLIARKKDWDPKKYGGFDSPTVAYSVLVVAKVEKGKSKKLKSVKELLGITIMERSSFEKNPIDFLEAKGYKEVKKDLIIKLPKYSLFELENGRKRMLASAGELQKGNELALPSKYVNFLYLASHYEKLKGSPEDNEQKQLFVEQHKHYLDEIIEQISEFSKRVILADANLDKVLSAYNKHRDKPIREQAENIIHLFTLTNLGAPAAFKYFDTTIDRKRYTSTKEVLDATLIHQSITGLYETRIDLSQLGGDGGGGGGSGGGGSGGGGSGGGGSGGTLQLEEEYRLFEPESTQKQEMDIWLKNFPQAWAETGGMGTAHCQAPVLIQLKATATPISIRQYPMPHEAYQGIKPHIRRMLDQGILKPCQSPWNTPLLPVKKPGTEDYRPVQDLREVNKRVEDIHPTVPNPYNLLSTLPPSHPWYTVLDLKDAFFCLRLHSESQLLFAFEWRDPEIGLSGQLTWTRLPQGFKNSPTLFNEALHSDLADFRVRYPALVLLQYVDDLLLAAATRTECLEGTKALLETLGNKGYRASAKKAQICLQEVTYLGYSLKDGQRWLTKARKEAILSIPVPKNSRQVREFLGKAGYCRLFIPGFAELAAPLYPLTRPGTLFQWGTEQQLAFEDIKKALLSSPALGLPDITKPFELFIDENSGFAKGVLVQKLGPWKRPVAYLSKKLDTVASGWPPCLRMVAAIAILVKDAGKLTLGQPLTILTSHPVEALVRQPPNKWLSNARMTHYQAMLLDAERVHFGPTVSLNPATLLPLPSGGNHHDCLQILAETHGTRPDLTDQPLPDADLTWYTDGSSFIRNGEREAGAAVTTESEVIWAAPLPPGTSAQRAELIALTQALKMAEGKKLTVYTDSRYAFATTHVHGEIYRRRGWLTSEGKEIKNKNEILALLEALFLPKRLSIIHCPGHQKGDSPQAKGNRLADDTAKKAATETHSSLTVLPAGKRTADGSEFEKRTADGSEFESPKKKAKVE

SEQ ID NO: 6149 - protein, 2185 aa, synthetic construct
MPAAKRVKLDGGDKKYSIGLDIGTNSVGWAVITDEYKVPSKKFKVLGNTDRHSIKKNLIGALLFDSGETAEATRLKRTARRRYTRRKNRICYLQEIFSNEMAKVDDSFFHRLEESFLVEEDKKHERHPIFGNIVDEVAYHEKYPTIYHLRKKLVDSTDKADLRLIYLALAHMIKFRGHFLIEGDLNPDNSDVDKLFIQLVQTYNQLFEENPINASGVDAKAILSARLSKSRRLENLIAQLPGEKKNGLFGNLIALSLGLTPNFKSNFDLAEDAKLQLSKDTYDDDLDNLLAQIGDQYADLFLAAKNLSDAILLSDILRVNTEITKAPLSASMIKRYDEHHQDLTLLKALVRQQLPEKYKEIFFDQSKNGYAGYIDGGASQEEFYKFIKPILEKMDGTEELLVKLNREDLLRKQRTFDNGSIPHQIHLGELHAILRRQEDFYPFLKDNREKIEKILTFRIPYYVGPLARGNSRFAWMTRKSEETITPWNFEEVVDKGASAQSFIERMTNFDKNLPNEKVLPKHSLLYEYFTVYNELTKVKYVTEGMRKPAFLSGEQKKAIVDLLFKTNRKVTVKQLKEDYFKKIECFDSVEISGVEDRFNASLGTYHDLLKIIKDKDFLDNEENEDILEDIVLTLTLFEDREMIEERLKTYAHLFDDKVMKQLKRRRYTGWGRLSRKLINGIRDKQSGKTILDFLKSDGFANRNFMQLIHDDSLTFKEDIQKAQVSGQGDSLHEHIANLAGSPAIKKGILQTVKVVDELVKVMGRHKPENIVIEMARENQTTQKGQKNSRERMKRIEEGIKELGSQILKEHPVENTQLQNEKLYLYYLQNGRDMYVDQELDINRLSDYDVDHIVPQSFLKDDSIDNKVLTRSDKARGKSDNVPSEEVVKKMKNYWRQLLNAKLITQRKFDNLTKAERGGLSELDKAGFIKRQLVETRQITKHVAQILDSRMNTKYDENDKLIREVKVITLKSKLVSDFRKDFQFYKVREINNYHHAHDAYLNAVVGTALIKKYPKLESEFVYGDYKVYDVRKMIAKSEQEIGKATAKYFFYSNIMNFFKTEITLANGEIRKRPLIETNGETGEIVWDKGRDFATVRKVLSMPQVNIVKKTEVQTGGFSKESILPKRNSDKLIARKKDWDPKKYGGFDSPTVAYSVLVVAKVEKGKSKKLKSVKELLGITIMERSSFEKNPIDFLEAKGYKEVKKDLIIKLPKYSLFELENGRKRMLASAGELQKGNELALPSKYVNFLYLASHYEKLKGSPEDNEQKQLFVEQHKHYLDEIIEQISEFSKRVILADANLDKVLSAYNKHRDKPIREQAENIIHLFTLTNLGAPAAFKYFDTTIDRKRYTSTKEVLDATLIHQSITGLYETRIDLSQLGGDGGGGGGSGGGGSGGGGSGGGGSGGMNPLQLLQPLPAEIKGTKLLAHWNSGATITCIPESFLEDEQPIKKTLIKTIHGEKQQNVYYVTFKVKGRKVEAEVIASPYEYILLSPTDVPWLTQQPLQLTILVPLQEYQEKILSKTALPEDQKQQLKTLFVKYDNLWQHWENQVGHRKIRPHNIATGDYPPRPQKQYPINPKAKPSIQIVIDDLLKQGVLTPQNSTMNTPVYPVPKPDGRWRMVLDYREVNKTIPLTAAQNQHSAGILATIVRQKYKTTLDLANGFWAHPITPESYWLTAFTWQGKQYCWTRLPQGFLNSPALFNADVVDLLKEIPNVQVYVDDIYLSHDDPKEHVQQLEKVFQILLQAGYVVSLKKSEIGQKTVEFLGFNITKEGRGLTDTFKTKLLNITPPKDLKQLQSILGLLNFARNFIPNFAELVQPLYNLIAPAKGKYIEWSEENTKQLNMVIEALNTASNLEERLPEQRLVIKVNTSPSAGYVRYYNETGKKPIMYLNYVFSKAELKFSMLEKLLTTMHKALIKAMDLAMGQEILVYSPIVSMTKIQKTPLPERKALPIRWITWMTYLEDPRIQFHYDKTLPELKHIPDVYTSSQSPVKHPSQYEGVFYTDGSAIKSPDPTKSNNAGMGIVHATYKPEYQVLNQWSIPLGNHTAQMAEIAAVEFACKKALKIPGPVLVITDSFYVAESANKELPYWKSNGFVNNKKKPLKHISKWKSIAECLSMKPDITIQHEKGISLQIPVFILKGNALADKLATQGSYVVNAGKRTADGSEFEKRTADGSEFESPKKKAKVE

SEQ ID NO: 6150 - protein, 2185 aa, synthetic construct
MPAAKRVKLDGGDKKYSIGLDIGTNSVGWAVITDEYKVPSKKFKVLGNTDRHSIKKNLIGALLFDSGETAEATRLKRTARRRYTRRKNRICYLQEIFSNEMAKVDDSFFHRLEESFLVEEDKKHERHPIFGNIVDEVAYHEKYPTIYHLRKKLVDSTDKADLRLIYLALAHMIKFRGHFLIEGDLNPDNSDVDKLFIQLVQTYNQLFEENPINASGVDAKAILSARLSKSRRLENLIAQLPGEKKNGLFGNLIALSLGLTPNFKSNFDLAEDAKLQLSKDTYDDDLDNLLAQIGDQYADLFLAAKNLSDAILLSDILRVNTEITKAPLSASMIKRYDEHHQDLTLLKALVRQQLPEKYKEIFFDQSKNGYAGYIDGGASQEEFYKFIKPILEKMDGTEELLVKLNREDLLRKQRTFDNGSIPHQIHLGELHAILRRQEDFYPFLKDNREKIEKILTFRIPYYVGPLARGNSRFAWMTRKSEETITPWNFEEVVDKGASAQSFIERMTNFDKNLPNEKVLPKHSLLYEYFTVYNELTKVKYVTEGMRKPAFLSGEQKKAIVDLLFKTNRKVTVKQLKEDYFKKIECFDSVEISGVEDRFNASLGTYHDLLKIIKDKDFLDNEENEDILEDIVLTLTLFEDREMIEERLKTYAHLFDDKVMKQLKRRRYTGWGRLSRKLINGIRDKQSGKTILDFLKSDGFANRNFMQLIHDDSLTFKEDIQKAQVSGQGDSLHEHIANLAGSPAIKKGILQTVKVVDELVKVMGRHKPENIVIEMARENQTTQKGQKNSRERMKRIEEGIKELGSQILKEHPVENTQLQNEKLYLYYLQNGRDMYVDQELDINRLSDYDVDHIVPQSFLKDDSIDNKVLTRSDKARGKSDNVPSEEVVKKMKNYWRQLLNAKLITQRKFDNLTKAERGGLSELDKAGFIKRQLVETRQITKHVAQILDSRMNTKYDENDKLIREVKVITLKSKLVSDFRKDFQFYKVREINNYHHAHDAYLNAVVGTALIKKYPKLESEFVYGDYKVYDVRKMIAKSEQEIGKATAKYFFYSNIMNFFKTEITLANGEIRKRPLIETNGETGEIVWDKGRDFATVRKVLSMPQVNIVKKTEVQTGGFSKESILPKRNSDKLIARKKDWDPKKYGGFDSPTVAYSVLVVAKVEKGKSKKLKSVKELLGITIMERSSFEKNPIDFLEAKGYKEVKKDLIIKLPKYSLFELENGRKRMLASAGELQKGNELALPSKYVNFLYLASHYEKLKGSPEDNEQKQLFVEQHKHYLDEIIEQISEFSKRVILADANLDKVLSAYNKHRDKPIREQAENIIHLFTLTNLGAPAAFKYFDTTIDRKRYTSTKEVLDATLIHQSITGLYETRIDLSQLGGDGGGGGGSGGGGSGGGGSGGGGSGGMNPLQLLQPLPAEIKGTKLLAHWNSGATITCIPESFLEDEQPIKKTLIKTIHGEKQQNVYYVTFKVKGRKVEAEVIASPYEYILLSPTDVPWLTQQPLQLTILVPLQEYQEKILSKTALPEDQKQQLKTLFVKYDNLWQHWENQVGHRKIRPHNIATGDYPPRPQKQYPINPKAKPSIQIVIDDLLKQGVLTPQNSTMNTPVYPVPKPDGRWRMVLDYREVNKTIPLTAAQNQHSAGILATIVRQKYKTTLDLANGFWAHPITPESYWLTAFTWQGKQYCWTRLPQGFLNSPALFNADVVDLLKEIPNVQVYVDDIYLSHDDPKEHVQQLEKVFQILLQAGYVVSLKKSEIGQKTVEFLGFNITKEGRGLTDTFKTKLLNITPPKDLKQLQSILGKLNFARNFIPNFAELVQPLYNLIAPAKGKYIEWSEENTKQLNMVIEALNTASNLEERLPEQRLVIKVNTSPSAGYVRYYNETGKKPIMYLNYVFSKAELKFSMLEKLLTTMHKALIKAMDLAMGQEILVYSPIVSMTKIQKTPLPERKALPIRWITWMTYLEDPRIQFHYDKTLPELKHIPDVYTSSQSPVKHPSQYEGVFYTDGSAIKSPDPTKSNNAGMGIVHATYKPEYQVLNQWSIPLGNHTAQMAEIAAVEFACKKALKIPGPVLVITDSFYVAESANKELPYWKSNGFVNNKKKPLKHISKWKSIAECLSMKPDITIQHEKGISLQIPVFILKGNALADKLATQGSYVVNAGKRTADGSEFEKRTADGSEFESPKKKAKVE

SEQ ID NO: 6151 - protein, 2136 aa, synthetic construct
MPAAKRVKLDGGDKKYSIGLDIGTNSVGWAVITDEYKVPSKKFKVLGNTDRHSIKKNLIGALLFDSGETAEATRLKRTARRRYTRRKNRICYLQEIFSNEMAKVDDSFFHRLEESFLVEEDKKHERHPIFGNIVDEVAYHEKYPTIYHLRKKLVDSTDKADLRLIYLALAHMIKFRGHFLIEGDLNPDNSDVDKLFIQLVQTYNQLFEENPINASGVDAKAILSARLSKSRRLENLIAQLPGEKKNGLFGNLIALSLGLTPNFKSNFDLAEDAKLQLSKDTYDDDLDNLLAQIGDQYADLFLAAKNLSDAILLSDILRVNTEITKAPLSASMIKRYDEHHQDLTLLKALVRQQLPEKYKEIFFDQSKNGYAGYIDGGASQEEFYKFIKPILEKMDGTEELLVKLNREDLLRKQRTFDNGSIPHQIHLGELHAILRRQEDFYPFLKDNREKIEKILTFRIPYYVGPLARGNSRFAWMTRKSEETITPWNFEEVVDKGASAQSFIERMTNFDKNLPNEKVLPKHSLLYEYFTVYNELTKVKYVTEGMRKPAFLSGEQKKAIVDLLFKTNRKVTVKQLKEDYFKKIECFDSVEISGVEDRFNASLGTYHDLLKIIKDKDFLDNEENEDILEDIVLTLTLFEDREMIEERLKTYAHLFDDKVMKQLKRRRYTGWGRLSRKLINGIRDKQSGKTILDFLKSDGFANRNFMQLIHDDSLTFKEDIQKAQVSGQGDSLHEHIANLAGSPAIKKGILQTVKVVDELVKVMGRHKPENIVIEMARENQTTQKGQKNSRERMKRIEEGIKELGSQILKEHPVENTQLQNEKLYLYYLQNGRDMYVDQELDINRLSDYDVDHIVPQSFLKDDSIDNKVLTRSDKARGKSDNVPSEEVVKKMKNYWRQLLNAKLITQRKFDNLTKAERGGLSELDKAGFIKRQLVETRQITKHVAQILDSRMNTKYDENDKLIREVKVITLKSKLVSDFRKDFQFYKVREINNYHHAHDAYLNAVVGTALIKKYPKLESEFVYGDYKVYDVRKMIAKSEQEIGKATAKYFFYSNIMNFFKTEITLANGEIRKRPLIETNGETGEIVWDKGRDFATVRKVLSMPQVNIVKKTEVQTGGFSKESILPKRNSDKLIARKKDWDPKKYGGFDSPTVAYSVLVVAKVEKGKSKKLKSVKELLGITIMERSSFEKNPIDFLEAKGYKEVKKDLIIKLPKYSLFELENGRKRMLASAGELQKGNELALPSKYVNFLYLASHYEKLKGSPEDNEQKQLFVEQHKHYLDEIIEQISEFSKRVILADANLDKVLSAYNKHRDKPIREQAENIIHLFTLTNLGAPAAFKYFDTTIDRKRYTSTKEVLDATLIHQSITGLYETRIDLSQLGGDGGGGGGSGGGGSGGGGSGGGGSGGLLGRDLLTKLKAQIQFSTEGPQVTWEDRPAMCLVLNLEEEYRLHEKPVPPSIDPSWLQLFPMVWAEKAGMGLANQVPPVVVELKSDASPVAVRQYPMSKEAREGIRPHIQRFLDLGILVPCQSPWNTPLLPVKKPGTNDYRPVQDLREVNKRVQDIHPTVPNPYNLLSSLPPSHTWYSVLDLKDAFFCLKLHPNSQPLFAFEWRDPEKGNTGQLTWTRLPQGFKNSPTLFNEALHRDLASFRALNPQVVMLQYVDDLLVAAPTYRDCKEGTRRLLQELSKLGYRVSAKKAQLCREEVTYLGYLLKGGKRWLTPARKATVMKIPTPTTPRQVREFLGTAGFCRLWIPGFASLAAPLYPLTRPKVPFTWTEAHQEAFGRIKEALLSAPALALPDLTKPFALYVDEKEGVARGVLTQTLGPWRRPVAYLSKKLDPVASGWPTCLKAIAAVALLLKDADKLTLGQNVLVIAPHNLESIVRQPPDRWMTNARMTHYQSLLLNERVSFAPPAILNPATLLPVESDDTPIHICSEILAEETGTRPDLRDQPLPGVPAWYTDGSSFIMDGRRQAGAAIVDNKRTVWASNLPEGTSAQKAELIALTQALRLAEGKSINIYTDSRYAFATAHVHGAIYKQRGWLTSAGKDIKNKEEILALLEAIHLPKRVAIIHCPGHQRGTDPVATGNRKADEAAKQAAQSTRILTETTKNAGKRTADGSEFEKRTADGSEFESPKKKAKVE

SEQ ID NO: 6152 - protein, 2136 aa, synthetic construct
MPAAKRVKLDGGDKKYSIGLDIGTNSVGWAVITDEYKVPSKKFKVLGNTDRHSIKKNLIGALLFDSGETAEATRLKRTARRRYTRRKNRICYLQEIFSNEMAKVDDSFFHRLEESFLVEEDKKHERHPIFGNIVDEVAYHEKYPTIYHLRKKLVDSTDKADLRLIYLALAHMIKFRGHFLIEGDLNPDNSDVDKLFIQLVQTYNQLFEENPINASGVDAKAILSARLSKSRRLENLIAQLPGEKKNGLFGNLIALSLGLTPNFKSNFDLAEDAKLQLSKDTYDDDLDNLLAQIGDQYADLFLAAKNLSDAILLSDILRVNTEITKAPLSASMIKRYDEHHQDLTLLKALVRQQLPEKYKEIFFDQSKNGYAGYIDGGASQEEFYKFIKPILEKMDGTEELLVKLNREDLLRKQRTFDNGSIPHQIHLGELHAILRRQEDFYPFLKDNREKIEKILTFRIPYYVGPLARGNSRFAWMTRKSEETITPWNFEEVVDKGASAQSFIERMTNFDKNLPNEKVLPKHSLLYEYFTVYNELTKVKYVTEGMRKPAFLSGEQKKAIVDLLFKTNRKVTVKQLKEDYFKKIECFDSVEISGVEDRFNASLGTYHDLLKIIKDKDFLDNEENEDILEDIVLTLTLFEDREMIEERLKTYAHLFDDKVMKQLKRRRYTGWGRLSRKLINGIRDKQSGKTILDFLKSDGFANRNFMQLIHDDSLTFKEDIQKAQVSGQGDSLHEHIANLAGSPAIKKGILQTVKVVDELVKVMGRHKPENIVIEMARENQTTQKGQKNSRERMKRIEEGIKELGSQILKEHPVENTQLQNEKLYLYYLQNGRDMYVDQELDINRLSDYDVDHIVPQSFLKDDSIDNKVLTRSDKARGKSDNVPSEEVVKKMKNYWRQLLNAKLITQRKFDNLTKAERGGLSELDKAGFIKRQLVETRQITKHVAQILDSRMNTKYDENDKLIREVKVITLKSKLVSDFRKDFQFYKVREINNYHHAHDAYLNAVVGTALIKKYPKLESEFVYGDYKVYDVRKMIAKSEQEIGKATAKYFFYSNIMNFFKTEITLANGEIRKRPLIETNGETGEIVWDKGRDFATVRKVLSMPQVNIVKKTEVQTGGFSKESILPKRNSDKLIARKKDWDPKKYGGFDSPTVAYSVLVVAKVEKGKSKKLKSVKELLGITIMERSSFEKNPIDFLEAKGYKEVKKDLIIKLPKYSLFELENGRKRMLASAGELQKGNELALPSKYVNFLYLASHYEKLKGSPEDNEQKQLFVEQHKHYLDEIIEQISEFSKRVILADANLDKVLSAYNKHRDKPIREQAENIIHLFTLTNLGAPAAFKYFDTTIDRKRYTSTKEVLDATLIHQSITGLYETRIDLSQLGGDGGGGGGSGGGGSGGGGSGGGGSGGLLGRDLLTKLKAQIQFSTEGPQVTWEDRPAMCLVLNLEEEYRLHEKPVPPSIDPSWLQLFPMVWAEKAGMGLANQVPPVVVELKSDASPVAVRQYPMSKEAREGIRPHIQRFLDLGILVPCQSPWNTPLLPVKKPGTNDYRPVQDLREVNKRVQDIHPTVPNPYNLLSSLPPSHTWYSVLDLKDAFFCLKLHPNSQPLFAFEWRDPEKGNTGQLTWTRLPQGFKNSPTLFNEALHRDLASFRALNPQVVMLQYVDDLLVAAPTYRDCKEGTRRLLQELSKLGYRVSAKKAQLCREEVTYLGYLLKGGKRWLTPARKATVMKIPTPTTPRQVREFLGKAGFCRLFIPGFASLAAPLYPLTRPKVPFTWTEAHQEAFGRIKEALLSAPALALPDLTKPFALYVDEKEGVARGVLTQTLGPWRRPVAYLSKKLDPVASGWPTCLKAIAAVALLLKDADKLTLGQNVLVIAPHNLESIVRQPPDRWMTNARMTHYQSLLLNERVSFAPPAILNPATLLPVESDDTPIHICSEILAEETGTRPDLRDQPLPGVPAWYTDGSSFIMDGRRQAGAAIVDNKRTVWASNLPEGTSAQKAELIALTQALRLAEGKSINIYTDSRYAFATAHVHGAIYKQRGWLTSAGKDIKNKEEILALLEAIHLPKRVAIIHCPGHQRGTDPVATGNRKADEAAKQAAQSTRILTETTKNAGKRTADGSEFEKRTADGSEFESPKKKAKVE

SEQ ID NO: 6153 - protein, 2227 aa, synthetic construct
MPAAKRVKLDGGDKKYSIGLDIGTNSVGWAVITDEYKVPSKKFKVLGNTDRHSIKKNLIGALLFDSGETAEATRLKRTARRRYTRRKNRICYLQEIFSNEMAKVDDSFFHRLEESFLVEEDKKHERHPIFGNIVDEVAYHEKYPTIYHLRKKLVDSTDKADLRLIYLALAHMIKFRGHFLIEGDLNPDNSDVDKLFIQLVQTYNQLFEENPINASGVDAKAILSARLSKSRRLENLIAQLPGEKKNGLFGNLIALSLGLTPNFKSNFDLAEDAKLQLSKDTYDDDLDNLLAQIGDQYADLFLAAKNLSDAILLSDILRVNTEITKAPLSASMIKRYDEHHQDLTLLKALVRQQLPEKYKEIFFDQSKNGYAGYIDGGASQEEFYKFIKPILEKMDGTEELLVKLNREDLLRKQRTFDNGSIPHQIHLGELHAILRRQEDFYPFLKDNREKIEKILTFRIPYYVGPLARGNSRFAWMTRKSEETITPWNFEEVVDKGASAQSFIERMTNFDKNLPNEKVLPKHSLLYEYFTVYNELTKVKYVTEGMRKPAFLSGEQKKAIVDLLFKTNRKVTVKQLKEDYFKKIECFDSVEISGVEDRFNASLGTYHDLLKIIKDKDFLDNEENEDILEDIVLTLTLFEDREMIEERLKTYAHLFDDKVMKQLKRRRYTGWGRLSRKLINGIRDKQSGKTILDFLKSDGFANRNFMQLIHDDSLTFKEDIQKAQVSGQGDSLHEHIANLAGSPAIKKGILQTVKVVDELVKVMGRHKPENIVIEMARENQTTQKGQKNSRERMKRIEEGIKELGSQILKEHPVENTQLQNEKLYLYYLQNGRDMYVDQELDINRLSDYDVDHIVPQSFLKDDSIDNKVLTRSDKARGKSDNVPSEEVVKKMKNYWRQLLNAKLITQRKFDNLTKAERGGLSELDKAGFIKRQLVETRQITKHVAQILDSRMNTKYDENDKLIREVKVITLKSKLVSDFRKDFQFYKVREINNYHHAHDAYLNAVVGTALIKKYPKLESEFVYGDYKVYDVRKMIAKSEQEIGKATAKYFFYSNIMNFFKTEITLANGEIRKRPLIETNGETGEIVWDKGRDFATVRKVLSMPQVNIVKKTEVQTGGFSKESILPKRNSDKLIARKKDWDPKKYGGFDSPTVAYSVLVVAKVEKGKSKKLKSVKELLGITIMERSSFEKNPIDFLEAKGYKEVKKDLIIKLPKYSLFELENGRKRMLASAGELQKGNELALPSKYVNFLYLASHYEKLKGSPEDNEQKQLFVEQHKHYLDEIIEQISEFSKRVILADANLDKVLSAYNKHRDKPIREQAENIIHLFTLTNLGAPAAFKYFDTTIDRKRYTSTKEVLDATLIHQSITGLYETRIDLSQLGGDGGGGGGSGGGGSGGGGSGGGGSGGTLGDQGSRGSDPLPEPRVTLTVEGIPTEFLVNTGAEHSVLTKPMGKMGSKRTVVAGATGSKVYPWTTKRLLKIGQKQVTHSFLVIPECPAPLLGRDLLTKLKAQIQFSTEGPQVTWEDRPAMCLVLNLEEEYRLHEKPVPPSIDPSWLQLFPMVWAEKAGMGLANQVPPVVVELKSDASPVAVRQYPMSKEAREGIRPHIQRFLDLGILVPCQSPWNTPLLPVKKPGTNDYRPVQDLREVNKRVQDIHPTVPNPYNLLSSLPPSHTWYSVLDLKDAFFCLKLHPNSQPLFAFEWRDPEKGNTGQLTWTRLPQGFKNSPTLFNEALHRDLASFRALNPQVVMLQYVDDLLVAAPTYRDCKEGTRRLLQELSKLGYRVSAKKAQLCREEVTYLGYLLKGGKRWLTPARKATVMKIPTPTTPRQVREFLGTAGFCRLWIPGFASLAAPLYPLTRPKVPFTWTEAHQEAFGRIKEALLSAPALALPDLTKPFALYVDEKEGVARGVLTQTLGPWRRPVAYLSKKLDPVASGWPTCLKAIAAVALLLKDADKLTLGQNVLVIAPHNLESIVRQPPDRWMTNARMTHYQSLLLNERVSFAPPAILNPATLLPVESDDTPIHICSEILAEETGTRPDLRDQPLPGVPAWYTDGSSFIMDGRRQAGAAIVDNKRTVWASNLPEGTSAQKAELIALTQALRLAEGKSINIYTDSRYAFATAHVHGAIYKQRGWLTSAGKDIKNKEEILALLEAIHLPKRVAIIHCPGHQRGTDPVATGNRKADEAAKQAAQSTRILTETTKNAGKRTADGSEFEKRTADGSEFESPKKKAKVE

SEQ ID NO: 6154 - protein, 2105 aa, synthetic construct
MPAAKRVKLDGGDKKYSIGLDIGTNSVGWAVITDEYKVPSKKFKVLGNTDRHSIKKNLIGALLFDSGETAEATRLKRTARRRYTRRKNRICYLQEIFSNEMAKVDDSFFHRLEESFLVEEDKKHERHPIFGNIVDEVAYHEKYPTIYHLRKKLVDSTDKADLRLIYLALAHMIKFRGHFLIEGDLNPDNSDVDKLFIQLVQTYNQLFEENPINASGVDAKAILSARLSKSRRLENLIAQLPGEKKNGLFGNLIALSLGLTPNFKSNFDLAEDAKLQLSKDTYDDDLDNLLAQIGDQYADLFLAAKNLSDAILLSDILRVNTEITKAPLSASMIKRYDEHHQDLTLLKALVRQQLPEKYKEIFFDQSKNGYAGYIDGGASQEEFYKFIKPILEKMDGTEELLVKLNREDLLRKQRTFDNGSIPHQIHLGELHAILRRQEDFYPFLKDNREKIEKILTFRIPYYVGPLARGNSRFAWMTRKSEETITPWNFEEVVDKGASAQSFIERMTNFDKNLPNEKVLPKHSLLYEYFTVYNELTKVKYVTEGMRKPAFLSGEQKKAIVDLLFKTNRKVTVKQLKEDYFKKIECFDSVEISGVEDRFNASLGTYHDLLKIIKDKDFLDNEENEDILEDIVLTLTLFEDREMIEERLKTYAHLFDDKVMKQLKRRRYTGWGRLSRKLINGIRDKQSGKTILDFLKSDGFANRNFMQLIHDDSLTFKEDIQKAQVSGQGDSLHEHIANLAGSPAIKKGILQTVKVVDELVKVMGRHKPENIVIEMARENQTTQKGQKNSRERMKRIEEGIKELGSQILKEHPVENTQLQNEKLYLYYLQNGRDMYVDQELDINRLSDYDVDHIVPQSFLKDDSIDNKVLTRSDKARGKSDNVPSEEVVKKMKNYWRQLLNAKLITQRKFDNLTKAERGGLSELDKAGFIKRQLVETRQITKHVAQILDSRMNTKYDENDKLIREVKVITLKSKLVSDFRKDFQFYKVREINNYHHAHDAYLNAVVGTALIKKYPKLESEFVYGDYKVYDVRKMIAKSEQEIGKATAKYFFYSNIMNFFKTEITLANGEIRKRPLIETNGETGEIVWDKGRDFATVRKVLSMPQVNIVKKTEVQTGGFSKESILPKRNSDKLIARKKDWDPKKYGGFDSPTVAYSVLVVAKVEKGKSKKLKSVKELLGITIMERSSFEKNPIDFLEAKGYKEVKKDLIIKLPKYSLFELENGRKRMLASAGELQKGNELALPSKYVNFLYLASHYEKLKGSPEDNEQKQLFVEQHKHYLDEIIEQISEFSKRVILADANLDKVLSAYNKHRDKPIREQAENIIHLFTLTNLGAPAAFKYFDTTIDRKRYTSTKEVLDATLIHQSITGLYETRIDLSQLGGDGGGGGGSGGGGSGGGGSGGGGSGGTLNIEDEYRLHETSKEPDVSLGSTWLSDFPQAWAETGGMGLAVRQAPLIIPLKATSTPVSIKQYPMSQEARLGIKPHIQRLLDQGILVPCQSPWNTPLLPVKKPGTNDYRPVQDLREVNKRVEDIHPTVPNPYNLLSGLPPSHQWYTVLDLKDAFFCLRLHPTSQPLFAFEWRDPEMGISGQLTWTRLPQGFKNSPTLFNEALHRDLAGFRIQHPDLILLQYVDDLLLAATSELDCQQGTRALLQTLGDLGYRASAKKAQICQKQVKYLGYLLKEGQRWLTEARKETVMGQPIPKTPRQLREFLGTAGFCRLWIPGFAEMAAPLYPLTKPGTLFNWGPDQQKAFQEIKQALLTAPALGLPDLTKPFELFVDEKQGYAKGVLTQKLGPWRRPVAYLSKKLDPVAAGWPPCLRMVAAIAVLTKDAGKLTMGQPLVILAPHAVEALVKQPPDRWLSNARMTHYQALLLDTDRVQFGPVVALNPATLLPLPEEGLQHDCLDILAEAHGTRSDLMDQPLPDADHTWYTDGSSFLQEGQRKAGAAVTTETEVIWARALPAGTSAQRAELIALTQALKMAEGKKLNVYTDSRYAFATAHIHGEIYRRRGWLTSEGKEIKNKDEILALLKALFLPKRLSIIHCPGHQKGNSAEARGNRMADQAAREVATRETPETSTLLAGKRTADGSEFEKRTADGSEFESPKKKAKVE

SEQ ID NO: 6155 - protein, 2105 aa, synthetic construct
MPAAKRVKLDGGDKKYSIGLDIGTNSVGWAVITDEYKVPSKKFKVLGNTDRHSIKKNLIGALLFDSGETAEATRLKRTARRRYTRRKNRICYLQEIFSNEMAKVDDSFFHRLEESFLVEEDKKHERHPIFGNIVDEVAYHEKYPTIYHLRKKLVDSTDKADLRLIYLALAHMIKFRGHFLIEGDLNPDNSDVDKLFIQLVQTYNQLFEENPINASGVDAKAILSARLSKSRRLENLIAQLPGEKKNGLFGNLIALSLGLTPNFKSNFDLAEDAKLQLSKDTYDDDLDNLLAQIGDQYADLFLAAKNLSDAILLSDILRVNTEITKAPLSASMIKRYDEHHQDLTLLKALVRQQLPEKYKEIFFDQSKNGYAGYIDGGASQEEFYKFIKPILEKMDGTEELLVKLNREDLLRKQRTFDNGSIPHQIHLGELHAILRRQEDFYPFLKDNREKIEKILTFRIPYYVGPLARGNSRFAWMTRKSEETITPWNFEEVVDKGASAQSFIERMTNFDKNLPNEKVLPKHSLLYEYFTVYNELTKVKYVTEGMRKPAFLSGEQKKAIVDLLFKTNRKVTVKQLKEDYFKKIECFDSVEISGVEDRFNASLGTYHDLLKIIKDKDFLDNEENEDILEDIVLTLTLFEDREMIEERLKTYAHLFDDKVMKQLKRRRYTGWGRLSRKLINGIRDKQSGKTILDFLKSDGFANRNFMQLIHDDSLTFKEDIQKAQVSGQGDSLHEHIANLAGSPAIKKGILQTVKVVDELVKVMGRHKPENIVIEMARENQTTQKGQKNSRERMKRIEEGIKELGSQILKEHPVENTQLQNEKLYLYYLQNGRDMYVDQELDINRLSDYDVDHIVPQSFLKDDSIDNKVLTRSDKARGKSDNVPSEEVVKKMKNYWRQLLNAKLITQRKFDNLTKAERGGLSELDKAGFIKRQLVETRQITKHVAQILDSRMNTKYDENDKLIREVKVITLKSKLVSDFRKDFQFYKVREINNYHHAHDAYLNAVVGTALIKKYPKLESEFVYGDYKVYDVRKMIAKSEQEIGKATAKYFFYSNIMNFFKTEITLANGEIRKRPLIETNGETGEIVWDKGRDFATVRKVLSMPQVNIVKKTEVQTGGFSKESILPKRNSDKLIARKKDWDPKKYGGFDSPTVAYSVLVVAKVEKGKSKKLKSVKELLGITIMERSSFEKNPIDFLEAKGYKEVKKDLIIKLPKYSLFELENGRKRMLASAGELQKGNELALPSKYVNFLYLASHYEKLKGSPEDNEQKQLFVEQHKHYLDEIIEQISEFSKRVILADANLDKVLSAYNKHRDKPIREQAENIIHLFTLTNLGAPAAFKYFDTTIDRKRYTSTKEVLDATLIHQSITGLYETRIDLSQLGGDGGGGGGSGGGGSGGGGSGGGGSGGTLNIEDEYRLHETSKGPDVPLGSTWLSDFPQAWAETGGMGLAVRQAPLIIPLKATSTPVSIKQYPMSQEARLGIKPHIQRLLDQGILVPCQSPWNTPLLPVKKPGTNDYRPVQDLREVNKRVEDIHPTVPNPYNLLSGLPPSHQWYTVLDLKDAFFCLRLHPTSQSLFAFEWRDPEMGISGQLTWTRLPQGFKNSPTLFNEALHRDLADFRIQHPDLILLQYVDDLLLAATSELDCQQGTRALLQTLGDLGYRASAKKAQICQKQVKYLGYLLKEGQRWLTEARKETVMGQPTPKTPRQLREFLGKAGFCRLFIPGFAEMAAPLYPLTKPGTLFEWGPDQQKAYQEIKQALLTAPALGLPDLTKPFELFVDEKQGYAKGVLTQKLGPWRRPVAYLSKKLDPVAAGWPPCLRMVAAIAVLTKDAGKLTMGQPLVILAPHAVEALVKQPPDRWLSNARMTHYQALLLDTDRVQFGPIVALNPATLLPLPEEGLQHDCLDILAEAHGTRPDLTDQPLPDADHTWYTDGSSFLQEGQRKAGAAVTTETEVVWAKALPAGTSAQRAELIALTQALKMAEGKKLNVYTDSRYAFATAHIHGEIYRRRGWLTSEGKEIKNKDEILALLKALFLPKRLSIIHCPGHQKGNRAEARGNRMADQAAREVATRETPETSTLLAGKRTADGSEFEKRTADGSEFESPKKKAKVE

SEQ ID NO: 6156 - protein, 2105 aa, synthetic construct
MPAAKRVKLDGGDKKYSIGLDIGTNSVGWAVITDEYKVPSKKFKVLGNTDRHSIKKNLIGALLFDSGETAEATRLKRTARRRYTRRKNRICYLQEIFSNEMAKVDDSFFHRLEESFLVEEDKKHERHPIFGNIVDEVAYHEKYPTIYHLRKKLVDSTDKADLRLIYLALAHMIKFRGHFLIEGDLNPDNSDVDKLFIQLVQTYNQLFEENPINASGVDAKAILSARLSKSRRLENLIAQLPGEKKNGLFGNLIALSLGLTPNFKSNFDLAEDAKLQLSKDTYDDDLDNLLAQIGDQYADLFLAAKNLSDAILLSDILRVNTEITKAPLSASMIKRYDEHHQDLTLLKALVRQQLPEKYKEIFFDQSKNGYAGYIDGGASQEEFYKFIKPILEKMDGTEELLVKLNREDLLRKQRTFDNGSIPHQIHLGELHAILRRQEDFYPFLKDNREKIEKILTFRIPYYVGPLARGNSRFAWMTRKSEETITPWNFEEVVDKGASAQSFIERMTNFDKNLPNEKVLPKHSLLYEYFTVYNELTKVKYVTEGMRKPAFLSGEQKKAIVDLLFKTNRKVTVKQLKEDYFKKIECFDSVEISGVEDRFNASLGTYHDLLKIIKDKDFLDNEENEDILEDIVLTLTLFEDREMIEERLKTYAHLFDDKVMKQLKRRRYTGWGRLSRKLINGIRDKQSGKTILDFLKSDGFANRNFMQLIHDDSLTFKEDIQKAQVSGQGDSLHEHIANLAGSPAIKKGILQTVKVVDELVKVMGRHKPENIVIEMARENQTTQKGQKNSRERMKRIEEGIKELGSQILKEHPVENTQLQNEKLYLYYLQNGRDMYVDQELDINRLSDYDVDHIVPQSFLKDDSIDNKVLTRSDKARGKSDNVPSEEVVKKMKNYWRQLLNAKLITQRKFDNLTKAERGGLSELDKAGFIKRQLVETRQITKHVAQILDSRMNTKYDENDKLIREVKVITLKSKLVSDFRKDFQFYKVREINNYHHAHDAYLNAVVGTALIKKYPKLESEFVYGDYKVYDVRKMIAKSEQEIGKATAKYFFYSNIMNFFKTEITLANGEIRKRPLIETNGETGEIVWDKGRDFATVRKVLSMPQVNIVKKTEVQTGGFSKESILPKRNSDKLIARKKDWDPKKYGGFDSPTVAYSVLVVAKVEKGKSKKLKSVKELLGITIMERSSFEKNPIDFLEAKGYKEVKKDLIIKLPKYSLFELENGRKRMLASAGELQKGNELALPSKYVNFLYLASHYEKLKGSPEDNEQKQLFVEQHKHYLDEIIEQISEFSKRVILADANLDKVLSAYNKHRDKPIREQAENIIHLFTLTNLGAPAAFKYFDTTIDRKRYTSTKEVLDATLIHQSITGLYETRIDLSQLGGDGGGGGGSGGGGSGGGGSGGGGSGGTLNIEDEHRLHETSKEPDVSLGSTWLSDFPQAWAETGGMGLAVRQAPLIIPLKATSTPVSIKQYPMSQEARLGIKPHIQRLLDQGILVPCQSPWNTPLLPVKKPGTNDYRPVQDLREVNKRVEDIHPTVPNPYNLLSGLPPSHQWYTVLDLKDAFFCLRLHPTSQPLFAFEWRDPEMGISGQLTWTRLPQGFKNSPTLFDEALHRDLADFRIQHPDLILLQYVDDLLLAATSELDCQQGTRALLQTLGNLGYRASAKKAQICQKQVKYLGYLLKEGQRWLTEARKETVMGQPTPKTPRQLREFLGTAGFCRLWIPGFAEMAAPLYPLTKTGTLFNWGPDQQKAYQEIKQALLTAPALGLPDLTKPFELFVDEKQGYAKGVLTQKLGPWRRPVAYLSKKLDPVAAGWPPCLRMVAAIAVLTKDAGKLTMGQPLVILAPHAVEALVKQPPDRWLSNARMTHYQALLLDTDRVQFGPVVALNPATLLPLPEEGLQHNCLDILAEAHGTRPDLTDQPLPDADHTWYTDGSSLLQEGQRKAGAAVTTETEVIWAKALPAGTSAQRAELIALTQALKMAEGKKLNVYTDSRYAFATAHIHGEIYRRRGLLTSEGKEIKNKDEILALLKALFLPKRLSIIHCPGHQKGHSAEARGNRMADQAARKAAITETPDTSTLLAGKRTADGSEFEKRTADGSEFESPKKKAKVE

SEQ ID NO: 6157 - protein, 2033 aa, synthetic construct
MPAAKRVKLDGGDKKYSIGLDIGTNSVGWAVITDEYKVPSKKFKVLGNTDRHSIKKNLIGALLFDSGETAEATRLKRTARRRYTRRKNRICYLQEIFSNEMAKVDDSFFHRLEESFLVEEDKKHERHPIFGNIVDEVAYHEKYPTIYHLRKKLVDSTDKADLRLIYLALAHMIKFRGHFLIEGDLNPDNSDVDKLFIQLVQTYNQLFEENPINASGVDAKAILSARLSKSRRLENLIAQLPGEKKNGLFGNLIALSLGLTPNFKSNFDLAEDAKLQLSKDTYDDDLDNLLAQIGDQYADLFLAAKNLSDAILLSDILRVNTEITKAPLSASMIKRYDEHHQDLTLLKALVRQQLPEKYKEIFFDQSKNGYAGYIDGGASQEEFYKFIKPILEKMDGTEELLVKLNREDLLRKQRTFDNGSIPHQIHLGELHAILRRQEDFYPFLKDNREKIEKILTFRIPYYVGPLARGNSRFAWMTRKSEETITPWNFEEVVDKGASAQSFIERMTNFDKNLPNEKVLPKHSLLYEYFTVYNELTKVKYVTEGMRKPAFLSGEQKKAIVDLLFKTNRKVTVKQLKEDYFKKIECFDSVEISGVEDRFNASLGTYHDLLKIIKDKDFLDNEENEDILEDIVLTLTLFEDREMIEERLKTYAHLFDDKVMKQLKRRRYTGWGRLSRKLINGIRDKQSGKTILDFLKSDGFANRNFMQLIHDDSLTFKEDIQKAQVSGQGDSLHEHIANLAGSPAIKKGILQTVKVVDELVKVMGRHKPENIVIEMARENQTTQKGQKNSRERMKRIEEGIKELGSQILKEHPVENTQLQNEKLYLYYLQNGRDMYVDQELDINRLSDYDVDHIVPQSFLKDDSIDNKVLTRSDKARGKSDNVPSEEVVKKMKNYWRQLLNAKLITQRKFDNLTKAERGGLSELDKAGFIKRQLVETRQITKHVAQILDSRMNTKYDENDKLIREVKVITLKSKLVSDFRKDFQFYKVREINNYHHAHDAYLNAVVGTALIKKYPKLESEFVYGDYKVYDVRKMIAKSEQEIGKATAKYFFYSNIMNFFKTEITLANGEIRKRPLIETNGETGEIVWDKGRDFATVRKVLSMPQVNIVKKTEVQTGGFSKESILPKRNSDKLIARKKDWDPKKYGGFDSPTVAYSVLVVAKVEKGKSKKLKSVKELLGITIMERSSFEKNPIDFLEAKGYKEVKKDLIIKLPKYSLFELENGRKRMLASAGELQKGNELALPSKYVNFLYLASHYEKLKGSPEDNEQKQLFVEQHKHYLDEIIEQISEFSKRVILADANLDKVLSAYNKHRDKPIREQAENIIHLFTLTNLGAPAAFKYFDTTIDRKRYTSTKEVLDATLIHQSITGLYETRIDLSQLGGDGGGGGGSGGGGSGGGGSGGGGSGGGRDIMKDIKVRLMTDSPDDSQDLMIGAIESNLFADQISWKSDQPVWLNQWPLKQEKLQALQQLVTEQLQLGHLEESNSPWNTPVFVIKKKSGKWRLLQDLRAVNATMHDMGALQPGLPSPVAVPKGWEIIIIDLQDCFFNIKLHPEDCKRFAFSVPSPNFKRPYQRFQWKVLPQGMKNSPTLCQKFVDKAILTVRDKYQDSYIVHYMDDILLAHPSRSIVDEILTSMIQALNKHGLVVSTEKIQKYDNLKYLGTHIQGDSVSYQKLQIRTDKLRTLNDFQKLLGNINWIRPFLKLTTGELKPLFEILNGDSNPISTRKLTPEACKALQLMNERLSTARVKRLDLSQPWSLCILKTEYTPTACLWQDGVVEWIHLPHISPKVITPYDIFCTQLIIKGRHRSKELFSKDPDYIVVPYTKVQFDLLLQEKEDWPISLLGFLGEVHFHLPKDPLLTFTLQTAIIFPHMTSTTPLEKGIVIFTDGSANGRSVTYIQGREPIIKENTQNTAQQAEIVAVITAFEEVSQPFNLYTDSKYVTGLFPEIETATLSPRTKIYTELKHLQRLIHKRQEKFYIGHIRGHTGLPGPLAQGNAYADSLTRILTAGKRTADGSEFEKRTADGSEFESPKKKAKVE

SEQ ID NO: 6158 - protein, 2097 aa, synthetic construct
MPAAKRVKLDGGDKKYSIGLDIGTNSVGWAVITDEYKVPSKKFKVLGNTDRHSIKKNLIGALLFDSGETAEATRLKRTARRRYTRRKNRICYLQEIFSNEMAKVDDSFFHRLEESFLVEEDKKHERHPIFGNIVDEVAYHEKYPTIYHLRKKLVDSTDKADLRLIYLALAHMIKFRGHFLIEGDLNPDNSDVDKLFIQLVQTYNQLFEENPINASGVDAKAILSARLSKSRRLENLIAQLPGEKKNGLFGNLIALSLGLTPNFKSNFDLAEDAKLQLSKDTYDDDLDNLLAQIGDQYADLFLAAKNLSDAILLSDILRVNTEITKAPLSASMIKRYDEHHQDLTLLKALVRQQLPEKYKEIFFDQSKNGYAGYIDGGASQEEFYKFIKPILEKMDGTEELLVKLNREDLLRKQRTFDNGSIPHQIHLGELHAILRRQEDFYPFLKDNREKIEKILTFRIPYYVGPLARGNSRFAWMTRKSEETITPWNFEEVVDKGASAQSFIERMTNFDKNLPNEKVLPKHSLLYEYFTVYNELTKVKYVTEGMRKPAFLSGEQKKAIVDLLFKTNRKVTVKQLKEDYFKKIECFDSVEISGVEDRFNASLGTYHDLLKIIKDKDFLDNEENEDILEDIVLTLTLFEDREMIEERLKTYAHLFDDKVMKQLKRRRYTGWGRLSRKLINGIRDKQSGKTILDFLKSDGFANRNFMQLIHDDSLTFKEDIQKAQVSGQGDSLHEHIANLAGSPAIKKGILQTVKVVDELVKVMGRHKPENIVIEMARENQTTQKGQKNSRERMKRIEEGIKELGSQILKEHPVENTQLQNEKLYLYYLQNGRDMYVDQELDINRLSDYDVDHIVPQSFLKDDSIDNKVLTRSDKARGKSDNVPSEEVVKKMKNYWRQLLNAKLITQRKFDNLTKAERGGLSELDKAGFIKRQLVETRQITKHVAQILDSRMNTKYDENDKLIREVKVITLKSKLVSDFRKDFQFYKVREINNYHHAHDAYLNAVVGTALIKKYPKLESEFVYGDYKVYDVRKMIAKSEQEIGKATAKYFFYSNIMNFFKTEITLANGEIRKRPLIETNGETGEIVWDKGRDFATVRKVLSMPQVNIVKKTEVQTGGFSKESILPKRNSDKLIARKKDWDPKKYGGFDSPTVAYSVLVVAKVEKGKSKKLKSVKELLGITIMERSSFEKNPIDFLEAKGYKEVKKDLIIKLPKYSLFELENGRKRMLASAGELQKGNELALPSKYVNFLYLASHYEKLKGSPEDNEQKQLFVEQHKHYLDEIIEQISEFSKRVILADANLDKVLSAYNKHRDKPIREQAENIIHLFTLTNLGAPAAFKYFDTTIDRKRYTSTKEVLDATLIHQSITGLYETRIDLSQLGGDGGGGGGSGGGGSGGGGSGGGGSGGLDDEYRLYSPLVKPDQNIQFWLEQFPQAWAETAGMGLAKQVPPQVIQLKASATPVSVRQYPLSKEAQEGIRPHVQRLIQQGILVPVQSPWNTPLLPVRKPGTNDYRPVQDLREVNKRVQDIHPTVPNPYNLLCALPPQRSWYTVLDLKDAFFCLRLHPTSQPLFAFEWRDPGTGRTGQLTWTRLPQGFKNSPTIFNEALHRDLANFRIQHPQVTLLQYVDDLLLAGATKQDCLEGTKALLLELSDLGYRASAKKAQICRREVTYLGYSLRDGQRWLTEARKKTVVQIPAPTTAKQVREFLGKAGFCRLFIPGFATLAAPLYPLTKPKGEFSWAPEHQKAFDAIKKALLSAPALALPDVTKPFTLYVDERKGVARGVLTQTLGPWRRPVAYLSKKLDPVASGWPVCLKAIAAVAILVKDADKLTLGQNITVIAPHALENIVRQPPDRWMTNARMTHYQSLLLTERVTFAPPAALNPATLLPEETDEPVTHDCHQLLIEETGVRKDLTDIPLTGEVLTWFTDGSSYVVEGKRMAGAAVVDGTRTIWASSLPEGTSAQKAELMALTQALRLAEGKSINIYTDSRYAFATAHVHGAIYKQRGWLTSAGREIKNKEEILSLLEALHLPKRLAIIHCPGHQKAKDPISRGNQMADRVAKQAAQGVNLLPAGKRTADGSEFEKRTADGSEFESPKKKAKVE

SEQ ID NO: 6159 - protein, 2097 aa, synthetic construct; identical to SEQ ID NO: 6158

SEQ ID NO: 6160 - protein, 2096 aa, synthetic construct
MPAAKRVKLDGGDKKYSIGLDIGTNSVGWAVITDEYKVPSKKFKVLGNTDRHSIKKNLIGALLFDSGETAEATRLKRTARRRYTRRKNRICYLQEIFSNEMAKVDDSFFHRLEESFLVEEDKKHERHPIFGNIVDEVAYHEKYPTIYHLRKKLVDSTDKADLRLIYLALAHMIKFRGHFLIEGDLNPDNSDVDKLFIQLVQTYNQLFEENPINASGVDAKAILSARLSKSRRLENLIAQLPGEKKNGLFGNLIALSLGLTPNFKSNFDLAEDAKLQLSKDTYDDDLDNLLAQIGDQYADLFLAAKNLSDAILLSDILRVNTEITKAPLSASMIKRYDEHHQDLTLLKALVRQQLPEKYKEIFFDQSKNGYAGYIDGGASQEEFYKFIKPILEKMDGTEELLVKLNREDLLRKQRTFDNGSIPHQIHLGELHAILRRQEDFYPFLKDNREKIEKILTFRIPYYVGPLARGNSRFAWMTRKSEETITPWNFEEVVDKGASAQSFIERMTNFDKNLPNEKVLPKHSLLYEYFTVYNELTKVKYVTEGMRKPAFLSGEQKKAIVDLLFKTNRKVTVKQLKEDYFKKIECFDSVEISGVEDRFNASLGTYHDLLKIIKDKDFLDNEENEDILEDIVLTLTLFEDREMIEERLKTYAHLFDDKVMKQLKRRRYTGWGRLSRKLINGIRDKQSGKTILDFLKSDGFANRNFMQLIHDDSLTFKEDIQKAQVSGQGDSLHEHIANLAGSPAIKKGILQTVKVVDELVKVMGRHKPENIVIEMARENQTTQKGQKNSRERMKRIEEGIKELGSQILKEHPVENTQLQNEKLYLYYLQNGRDMYVDQELDINRLSDYDVDHIVPQSFLKDDSIDNKVLTRSDKARGKSDNVPSEEVVKKMKNYWRQLLNAKLITQRKFDNLTKAERGGLSELDKAGFIKRQLVETRQITKHVAQILDSRMNTKYDENDKLIREVKVITLKSKLVSDFRKDFQFYKVREINNYHHAHDAYLNAVVGTALIKKYPKLESEFVYGDYKVYDVRKMIAKSEQEIGKATAKYFFYSNIMNFFKTEITLANGEIRKRPLIETNGETGEIVWDKGRDFATVRKVLSMPQVNIVKKTEVQTGGFSKESILPKRNSDKLIARKKDWDPKKYGGFDSPTVAYSVLVVAKVEKGKSKKLKSVKELLGITIMERSSFEKNPIDFLEAKGYKEVKKDLIIKLPKYSLFELENGRKRMLASAGELQKGNELALPSKYVNFLYLASHYEKLKGSPEDNEQKQLFVEQHKHYLDEIIEQISEFSKRVILADANLDKVLSAYNKHRDKPIREQAENIIHLFTLTNLGAPAAFKYFDTTIDRKRYTSTKEVLDATLIHQSITGLYETRIDLSQLGGDGGGGGGSGGGGSGGGGSGGGGSGGVPWLMKKPLQLTVLVPLHEYQERLLQQTALPKEQKELLQKLFLKYDALWQHWENQVGHRRIKPHNIATGTLAPRPQKQYPINPKAKPSIQIVIDDLLKQGVLIQQNSTMNTPVYPVPKPDGKWRMVLDYREVNKTIPLIAAQNQHSAGILSSIYRGKYKTTLDLTNGFWAHPITPESYWLTAFTWQGKQYCWTRLPQGFLNSPALFTADVVDLLKEIPNVQAYVDDIYISHDDPQEHLEQLEKIFSILLNAGYVVSLKKSEIAQREVEFLGFNITKEGRGLTDTFKQKLLNITPPKDLKQLQSILGLLNFARNFIPNYSELVKPLYTIVANANGKFISWTEDNSNQLQHIISVLNQADNLEERNPETRLIIKVNSSPSAGYIRYYNEGSKRPIMYVNYIFSKAEAKFTQTEKLLTTMHKGLIKAMDLAMGQEILVYSPIVSMTKIQRTPLPERKALPVRWITWMTYLEDPRIQFHYDKSLPELQQIPNVTEDVIAKTKHPSEFAMVFYTDGSAIKHPDVNKSHSAGMGIAQVQFIPEYKIVHQWSIPLGDHTAQLAEIAAVEFACKKALKISGPVLIVTDSFYVAESANKELPYWKSNGFLNNKKKPLRHVSKWKSIAECLQLKPDIIIMHEKGHQQPMTTLHTEGNNLADKLATQGSYVVHAGKRTADGSEFEKRTADGSEFESPKKKAKVE

SEQ ID NO: 6161 - protein, 2185 aa, synthetic construct
MPAAKRVKLDGGDKKYSIGLDIGTNSVGWAVITDEYKVPSKKFKVLGNTDRHSIKKNLIGALLFDSGETAEATRLKRTARRRYTRRKNRICYLQEIFSNEMAKVDDSFFHRLEESFLVEEDKKHERHPIFGNIVDEVAYHEKYPTIYHLRKKLVDSTDKADLRLIYLALAHMIKFRGHFLIEGDLNPDNSDVDKLFIQLVQTYNQLFEENPINASGVDAKAILSARLSKSRRLENLIAQLPGEKKNGLFGNLIALSLGLTPNFKSNFDLAEDAKLQLSKDTYDDDLDNLLAQIGDQYADLFLAAKNLSDAILLSDILRVNTEITKAPLSASMIKRYDEHHQDLTLLKALVRQQLPEKYKEIFFDQSKNGYAGYIDGGASQEEFYKFIKPILEKMDGTEELLVKLNREDLLRKQRTFDNGSIPHQIHLGELHAILRRQEDFYPFLKDNREKIEKILTFRIPYYVGPLARGNSRFAWMTRKSEETITPWNFEEVVDKGASAQSFIERMTNFDKNLPNEKVLPKHSLLYEYFTVYNELTKVKYVTEGMRKPAFLSGEQKKAIVDLLFKTNRKVTVKQLKEDYFKKIECFDSVEISGVEDRFNASLGTYHDLLKIIKDKDFLDNEENEDILEDIVLTLTLFEDREMIEERLKTYAHLFDDKVMKQLKRRRYTGWGRLSRKLINGIRDKQSGKTILDFLKSDGFANRNFMQLIHDDSLTFKEDIQKAQVSGQGDSLHEHIANLAGSPAIKKGILQTVKVVDELVKVMGRHKPENIVIEMARENQTTQKGQKNSRERMKRIEEGIKELGSQILKEHPVENTQLQNEKLYLYYLQNGRDMYVDQELDINRLSDYDVDHIVPQSFLKDDSIDNKVLTRSDKARGKSDNVPSEEVVKKMKNYWRQLLNAKLITQRKFDNLTKAERGGLSELDKAGFIKRQLVETRQITKHVAQILDSRMNTKYDENDKLIREVKVITLKSKLVSDFRKDFQFYKVREINNYHHAHDAYLNAVVGTALIKKYPKLESEFVYGDYKVYDVRKMIAKSEQEIGKATAKYFFYSNIMNFFKTEITLANGEIRKRPLIETNGETGEIVWDKGRDFATVRKVLSMPQVNIVKKTEVQTGGFSKESILPKRNSDKLIARKKDWDPKKYGGFDSPTVAYSVLVVAKVEKGKSKKLKSVKELLGITIMERSSFEKNPIDFLEAKGYKEVKKDLIIKLPKYSLFELENGRKRMLASAGELQKGNELALPSKYVNFLYLASHYEKLKGSPEDNEQKQLFVEQHKHYLDEIIEQISEFSKRVILADANLDKVLSAYNKHRDKPIREQAENIIHLFTLTNLGAPAAFKYFDTTIDRKRYTSTKEVLDATLIHQSITGLYETRIDLSQLGGDGGGGGGSGGGGSGGGGSGGGGSGGMDPLQLLQPLEAEIKGTKLKAHWNSGATITCVPQAFLEEEVPIKNIWIKTIHGEKEQPVYYLTFKIQGRKVEAEVISSPYDYILVSPSDIPWLMKKPLQLTTLVPLQEYEERLLKQTMLTGSYKEKLQSLFLKYDALWQHWENQVGHRRIKPHHIATGTVNPRPQKQYPINPKAKASIQTVINDLLKQGVLIQQNSIMNTPVYPVPKPDGKWRMVLDYREVNKTIPLIAAQNQHSAGILSSIFRGKYKTTLDLSNGFWAHSITPESYWLTAFTWLGQQYCWTRLPQGFLNSPALFTADVVDLLKEVPNVQVYVDDIYISHDDPREHLEQLEKVFSLLLNAGYVVSLKKSEIAQHEVEFLGFNITKEGRGLTETFKQKLLNITPPRDLKQLQSILGLLNFARNFIPNFSELVKPLYNIIATANGKYITWTTDNSQQLQNIISMLNSAENLEERNPEVRLIMKVNTSPSAGYIRFYNEFAKRPIMYLNYVYTKAEVKFTNTEKLLTTIHKGLIKALDLGMGQEILVYSPIVSMTKIQKTPLPERKALPIRWITWMSYLEDPRIQFHYDKTLPELQQVPTVTDDIIAKIKHPSEFSMVFYTDGSAIKHPNVNKSHNAGMGIAQVQFKPEFTVINTWSIPLGDHTAQLAEVAAVEFACKKALKIDGPVLIVTDSFYVAESVNKELPYWQSNGFFNNKKKPLKHVSKWKSIADCIQLKPDIIIIHEKGHQPTASTFHTEGNNLADKLATQGSYVVNAGKRTADGSEFEKRTADGSEFESPKKKAKVE

SEQ ID NO: 6162 - protein, 2096 aa, synthetic construct
MPAAKRVKLDGGDKKYSIGLDIGTNSVGWAVITDEYKVPSKKFKVLGNTDRHSIKKNLIGALLFDSGETAEATRLKRTARRRYTRRKNRICYLQEIFSNEMAKVDDSFFHRLEESFLVEEDKKHERHPIFGNIVDEVAYHEKYPTIYHLRKKLVDSTDKADLRLIYLALAHMIKFRGHFLIEGDLNPDNSDVDKLFIQLVQTYNQLFEENPINASGVDAKAILSARLSKSRRLENLIAQLPGEKKNGLFGNLIALSLGLTPNFKSNFDLAEDAKLQLSKDTYDDDLDNLLAQIGDQYADLFLAAKNLSDAILLSDILRVNTEITKAPLSASMIKRYDEHHQDLTLLKALVRQQLPEKYKEIFFDQSKNGYAGYIDGGASQEEFYKFIKPILEKMDGTEELLVKLNREDLLRKQRTFDNGSIPHQIHLGELHAILRRQEDFYPFLKDNREKIEKILTFRIPYYVGPLARGNSRFAWMTRKSEETITPWNFEEVVDKGASAQSFIERMTNFDKNLPNEKVLPKHSLLYEYFTVYNELTKVKYVTEGMRKPAFLSGEQKKAIVDLLFKTNRKVTVKQLKEDYFKKIECFDSVEISGVEDRFNASLGTYHDLLKIIKDKDFLDNEENEDILEDIVLTLTLFEDREMIEERLKTYAHLFDDKVMKQLKRRRYTGWGRLSRKLINGIRDKQSGKTILDFLKSDGFANRNFMQLIHDDSLTFKEDIQKAQVSGQGDSLHEHIANLAGSPAIKKGILQTVKVVDELVKVMGRHKPENIVIEMARENQTTQKGQKNSRERMKRIEEGIKELGSQILKEHPVENTQLQNEKLYLYYLQNGRDMYVDQELDINRLSDYDVDHIVPQSFLKDDSIDNKVLTRSDKARGKSDNVPSEEVVKKMKNYWRQLLNAKLITQRKFDNLTKAERGGLSELDKAGFIKRQLVETRQITKHVAQILDSRMNTKYDENDKLIREVKVITLKSKLVSDFRKDFQFYKVREINNYHHAHDAYLNAVVGTALIKKYPKLESEFVYGDYKVYDVRKMIAKSEQEIGKATAKYFFYSNIMNFFKTEITLANGEIRKRPLIETNGETGEIVWDKGRDFATVRKVLSMPQVNIVKKTEVQTGGFSKESILPKRNSDKLIARKKDWDPKKYGGFDSPTVAYSVLVVAKVEKGKSKKLKSVKELLGITIMERSSFEKNPIDFLEAKGYKEVKKDLIIKLPKYSLFELENGRKRMLASAGELQKGNELALPSKYVNFLYLASHYEKLKGSPEDNEQKQLFVEQHKHYLDEIIEQISEFSKRVILADANLDKVLSAYNKHRDKPIREQAENIIHLFTLTNLGAPAAFKYFDTTIDRKRYTSTKEVLDATLIHQSITGLYETRIDLSQLGGDGGGGGGSGGGGSGGGGSGGGGSGGIPWLMKKPLQLTTLVPLQEYEERLLKQTMLTGSYKEKLQSLFLKYDALWQHWENQVGHRRIKPHHIATGTVNPRPQKQYPINPKAKASIQTVINDLLKQGVLIQQNSIMNTPVYPVPKPDGKWRMVLDYREVNKTIPLIAAQNQHSAGILSSIFRGKYKTTLDLSNGFWAHSITPESYWLTAFTWLGQQYCWTRLPQGFLNSPALFNADVVDLLKEVPNVQVYVDDIYISHDDPREHLEQLEKVFSLLLNAGYVVSLKKSEIAQHEVEFLGFNITKEGRGLTETFKQKLLNITPPRDLKQLQSILGKLNFARNFIPNFSELVKPLYNIIATAPGKYITWTTDNSQQLQNIISMLNSAENLEERNPEVRLIMKVNTSPSAGYIRFYNEFAKRPIMYLNYVYTKAEVKFTNTEKLLTTIHKGLIKALDLGMGQEILVYSPIVSMTKIQKTPLPERKALPIRWITWMSYLEDPRIQFHYDKTLPELQQVPTVTDDIIAKIKHPSEFSMVFYTDGSAIKHPNVNKSHNAGMGIAQVQFKPEFTVINTWSIPLGDHTAQLAEVAAVEFACKKALKIDGPVLIVTDSFYVAESVNKELPYWQSNGFFNNKKKPLKHVSKWKSIADCIQLKPDIIIIHEKGHQPTASTFHTEGNNLADKLATQGSYVVNAGKRTADGSEFEKRTADGSEFESPKKKAKVE

SEQ ID NO: 6163 - protein, 2103 aa, synthetic construct
MPAAKRVKLDGGDKKYSIGLDIGTNSVGWAVITDEYKVPSKKFKVLGNTDRHSIKKNLIGALLFDSGETAEATRLKRTARRRYTRRKNRICYLQEIFSNEMAKVDDSFFHRLEESFLVEEDKKHERHPIFGNIVDEVAYHEKYPTIYHLRKKLVDSTDKADLRLIYLALAHMIKFRGHFLIEGDLNPDNSDVDKLFIQLVQTYNQLFEENPINASGVDAKAILSARLSKSRRLENLIAQLPGEKKNGLFGNLIALSLGLTPNFKSNFDLAEDAKLQLSKDTYDDDLDNLLAQIGDQYADLFLAAKNLSDAILLSDILRVNTEITKAPLSASMIKRYDEHHQDLTLLKALVRQQLPEKYKEIFFDQSKNGYAGYIDGGASQEEFYKFIKPILEKMDGTEELLVKLNREDLLRKQRTFDNGSIPHQIHLGELHAILRRQEDFYPFLKDNREKIEKILTFRIPYYVGPLARGNSRFAWMTRKSEETITPWNFEEVVDKGASAQSFIERMTNFDKNLPNEKVLPKHSLLYEYFTVYNELTKVKYVTEGMRKPAFLSGEQKKAIVDLLFKTNRKVTVKQLKEDYFKKIECFDSVEISGVEDRFNASLGTYHDLLKIIKDKDFLDNEENEDILEDIVLTLTLFEDREMIEERLKTYAHLFDDKVMKQLKRRRYTGWGRLSRKLINGIRDKQSGKTILDFLKSDGFANRNFMQLIHDDSLTFKEDIQKAQVSGQGDSLHEHIANLAGSPAIKKGILQTVKVVDELVKVMGRHKPENIVIEMARENQTTQKGQKNSRERMKRIEEGIKELGSQILKEHPVENTQLQNEKLYLYYLQNGRDMYVDQELDINRLSDYDVDHIVPQSFLKDDSIDNKVLTRSDKARGKSDNVPSEEVVKKMKNYWRQLLNAKLITQRKFDNLTKAERGGLSELDKAGFIKRQLVETRQITKHVAQILDSRMNTKYDENDKLIREVKVITLKSKLVSDFRKDFQFYKVREINNYHHAHDAYLNAVVGTALIKKYPKLESEFVYGDYKVYDVRKMIAKSEQEIGKATAKYFFYSNIMNFFKTEITLANGEIRKRPLIETNGETGEIVWDKGRDFATVRKVLSMPQVNIVKKTEVQTGGFSKESILPKRNSDKLIARKKDWDPKKYGGFDSPTVAYSVLVVAKVEKGKSKKLKSVKELLGITIMERSSFEKNPIDFLEAKGYKEVKKDLIIKLPKYSLFELENGRKRMLASAGELQKGNELALPSKYVNFLYLASHYEKLKGSPEDNEQKQLFVEQHKHYLDEIIEQISEFSKRVILADANLDKVLSAYNKHRDKPIREQAENIIHLFTLTNLGAPAAFKYFDTTIDRKRYTSTKEVLDATLIHQSITGLYETRIDLSQLGGDGGGGGGSGGGGSGGGGSGGGGSGGVLNLEEEYRLHEKPVPSSIDPSWLQLFPTVWAERAGMGLANQVPPVVVELRSGASPVAVRQYPMSKEAREGIRPHIQRFLDLGVLVPCQSPWNTPLLPVKKPGTNDYRPVQDLREINKRVQDIHPTVPNPYNLLSSLPPSHTWYSVLDLKDAFFCLKLHPNSQPLFAFEWRDPEKGNTGQLTWTRLPQGFKNSPTLFNEALHRDLAPFRALNPQVVLLQYVDDLLVAAPTYRDCKEGTQKLLQELSKLGYRVSAKKAQLCQKEVTYLGYLLKEGKRWLTPARKATVMKIPPPTTPRQVREFLGKAGFCRLFIPGFASLAAPLYPLTKPSIPFIWTEEHQKAFDRIKEALLSAPALALPDLTKPFTLYVDERAGVARGVLTQTLGPWRRPVAYLSKKLDPVASGWPTCLKAVAAVALLLKDADKLTLGQNVTVIASHSLESIVRQPPDRWMTNARMTHYQSLLLNERVSFAPPAVLNPATLLPVESEATPVHRCSEILAEETGTRRDLKDQPLPGVPAWYTDGSSFIAEGKRRAGAAIVDGKRTVWASSLPEGTSAQKAELVALTQALRLAEGKDINIYTDSRYAFATAHIHGAIYKQRGWLTSAGKDIKNKEEILALLEAIHLPKRVAIIHCPGHQKGNDPVATGNRRADEAAKQAALSTRVLAETTKPAGKRTADGSEFEKRTADGSEFESPKKKAKVE

SEQ ID NO: 6164 - protein, 2112 aa, synthetic construct
MPAAKRVKLDGGDKKYSIGLDIGTNSVGWAVITDEYKVPSKKFKVLGNTDRHSIKKNLIGALLFDSGETAEATRLKRTARRRYTRRKNRICYLQEIFSNEMAKVDDSFFHRLEESFLVEEDKKHERHPIFGNIVDEVAYHEKYPTIYHLRKKLVDSTDKADLRLIYLALAHMIKFRGHFLIEGDLNPDNSDVDKLFIQLVQTYNQLFEENPINASGVDAKAILSARLSKSRRLENLIAQLPGEKKNGLFGNLIALSLGLTPNFKSNFDLAEDAKLQLSKDTYDDDLDNLLAQIGDQYADLFLAAKNLSDAILLSDILRVNTEITKAPLSASMIKRYDEHHQDLTLLKALVRQQLPEKYKEIFFDQSKNGYAGYIDGGASQEEFYKFIKPILEKMDGTEELLVKLNREDLLRKQRTFDNGSIPHQIHLGELHAILRRQEDFYPFLKDNREKIEKILTFRIPYYVGPLARGNSRFAWMTRKSEETITPWNFEEVVDKGASAQSFIERMTNFDKNLPNEKVLPKHSLLYEYFTVYNELTKVKYVTEGMRKPAFLSGEQKKAIVDLLFKTNRKVTVKQLKEDYFKKIECFDSVEISGVEDRFNASLGTYHDLLKIIKDKDFLDNEENEDILEDIVLTLTLFEDREMIEERLKTYAHLFDDKVMKQLKRRRYTGWGRLSRKLINGIRDKQSGKTILDFLKSDGFANRNFMQLIHDDSLTFKEDIQKAQVSGQGDSLHEHIANLAGSPAIKKGILQTVKVVDELVKVMGRHKPENIVIEMARENQTTQKGQKNSRERMKRIEEGIKELGSQILKEHPVENTQLQNEKLYLYYLQNGRDMYVDQELDINRLSDYDVDHIVPQSFLKDDSIDNKVLTRSDKARGKSDNVPSEEVVKKMKNYWRQLLNAKLITQRKFDNLTKAERGGLSELDKAGFIKRQLVETRQITKHVAQILDSRMNTKYDENDKLIREVKVITLKSKLVSDFRKDFQFYKVREINNYHHAHDAYLNAVVGTALIKKYPKLESEFVYGDYKVYDVRKMIAKSEQEIGKATAKYFFYSNIMNFFKTEITLANGEIRKRPLIETNGETGEIVWDKGRDFATVRKVLSMPQVNIVKKTEVQTGGFSKESILPKRNSDKLIARKKDWDPKKYGGFDSPTVAYSVLVVAKVEKGKSKKLKSVKELLGITIMERSSFEKNPIDFLEAKGYKEVKKDLIIKLPKYSLFELENGRKRMLASAGELQKGNELALPSKYVNFLYLASHYEKLKGSPEDNEQKQLFVEQHKHYLDEIIEQISEFSKRVILADANLDKVLSAYNKHRDKPIREQAENIIHLFTLTNLGAPAAFKYFDTTIDRKRYTSTKEVLDATLIHQSITGLYETRIDLSQLGGDGGGGGGSGGGGSGGGGSGGGGSGGGGSGGTAPLEEEYRLFLEAPIQNVTLLEQWKREIPKVWAEINPPGLASTQAPIHVQLLSTALPVRVRQYPITLEAKRSLRETIRKFRAAGILRPVHSPWNTPLLPVRKSGTSEYRMVQDLREVNKRVETIHPTVPNPYTLLSLLPPDRIWYSVLDLKDAFFCIPLAPESQLIFAFEWADAEEGESGQLTWTRLPQGFKNSPTLFNEALNRDLQGFRLDHPSVSLLQYVDDLLIAADTQAACLSATRDLLMTLAELGYRVSGKKAQLCQEEVTYLGFKIHKGSRSLSNSRTQAILQIPVPKTKRQVREFLGTIGYCRLWIPGFAELAQPLYAATRPGNDPLVWGEKEEEAFQSLKLALTQPPALALPSLDKPFQLFVEETSGAAKGVLTQALGPWKRPVAYLSKRLDPVAAGWPRCLRAIAAAALLTREASKLTFGQDIEITSSHNLESLLRSPPDKWLTNARITQYQVLLLDPPRVRFKQTAALNPATLLPETDDTLPIHHCLDTLDSLTSTRPDLTDQPLAQAEATLFTDGSSYIRDGKRYAGAAVVTLDSVIWAEPLPIGTSAQKAELIALTKALEWSKDKSVNIYTDSRYAFATLHVHGMIYRERGWLTAGGKAIKNAPEILALLTAVWLPKRVAVMHCKGHQKDDAPTSTGNRRADEVAREVAIRPLSTQATISAGKRTADGSEFEKRTADGSEFESPKKKAKVE

SEQ ID NO: 6165 - protein, 2112 aa, synthetic construct
MPAAKRVKLDGGDKKYSIGLDIGTNSVGWAVITDEYKVPSKKFKVLGNTDRHSIKKNLIGALLFDSGETAEATRLKRTARRRYTRRKNRICYLQEIFSNEMAKVDDSFFHRLEESFLVEEDKKHERHPIFGNIVDEVAYHEKYPTIYHLRKKLVDSTDKADLRLIYLALAHMIKFRGHFLIEGDLNPDNSDVDKLFIQLVQTYNQLFEENPINASGVDAKAILSARLSKSRRLENLIAQLPGEKKNGLFGNLIALSLGLTPNFKSNFDLAEDAKLQLSKDTYDDDLDNLLAQIGDQYADLFLAAKNLSDAILLSDILRVNTEITKAPLSASMIKRYDEHHQDLTLLKALVRQQLPEKYKEIFFDQSKNGYAGYIDGGASQEEFYKFIKPILEKMDGTEELLVKLNREDLLRKQRTFDNGSIPHQIHLGELHAILRRQEDFYPFLKDNREKIEKILTFRIPYYVGPLARGNSRFAWMTRKSEETITPWNFEEVVDKGASAQSFIERMTNFDKNLPNEKVLPKHSLLYEYFTVYNELTKVKYVTEGMRKPAFLSGEQKKAIVDLLFKTNRKVTVKQLKEDYFKKIECFDSVEISGVEDRFNASLGTYHDLLKIIKDKDFLDNEENEDILEDIVLTLTLFEDREMIEERLKTYAHLFDDKVMKQLKRRRYTGWGRLSRKLINGIRDKQSGKTILDFLKSDGFANRNFMQLIHDDSLTFKEDIQKAQVSGQGDSLHEHIANLAGSPAIKKGILQTVKVVDELVKVMGRHKPENIVIEMARENQTTQKGQKNSRERMKRIEEGIKELGSQILKEHPVENTQLQNEKLYLYYLQNGRDMYVDQELDINRLSDYDVDHIVPQSFLKDDSIDNKVLTRSDKARGKSDNVPSEEVVKKMKNYWRQLLNAKLITQRKFDNLTKAERGGLSELDKAGFIKRQLVETRQITKHVAQILDSRMNTKYDENDKLIREVKVITLKSKLVSDFRKDFQFYKVREINNYHHAHDAYLNAVVGTALIKKYPKLESEFVYGDYKVYDVRKMIAKSEQEIGKATAKYFFYSNIMNFFKTEITLANGEIRKRPLIETNGETGEIVWDKGRDFATVRKVLSMPQVNIVKKTEVQTGGFSKESILPKRNSDKLIARKKDWDPKKYGGFDSPTVAYSVLVVAKVEKGKSKKLKSVKELLGITIMERSSFEKNPIDFLEAKGYKEVKKDLIIKLPKYSLFELENGRKRMLASAGELQKGNELALPSKYVNFLYLASHYEKLKGSPEDNEQKQLFVEQHKHYLDEIIEQISEFSKRVILADANLDKVLSAYNKHRDKPIREQAENIIHLFTLTNLGAPAAFKYFDTTIDRKRYTSTKEVLDATLIHQSITGLYETRIDLSQLGGDGGGGGGSGGGGSGGGGSGGGGSGGGGSGGTAPLEEEYRLFLEAPIQNVTLLEQWKREIPKVWAEINPPGLASTQAPIHVQLLSTALPVRVRQYPITLEAKRSLRETIRKFRAAGILRPVHSPWNTPLLPVRKSGTSEYRMVQDLREVNKRVETIHPTVPNPYTLLSLLPPDRIWYSVLDLKDAFFCIPLAPESQLIFAFEWADAEEGESGQLTWTRLPQGFKNSPTLFNEALNRDLQGFRLDHPSVSLLQYVDDLLIAADTQAACLSATRDLLMTLAELGYRVSGKKAQLCQEEVTYLGFKIHKGSRSLSNSRTQAILQIPVPKTKRQVREFLGKIGYCRLFIPGFAELAQPLYAATRPGNDPLVWGEKEEEAFQSLKLALTQPPALALPSLDKPFQLFVEETSGAAKGVLTQALGPWKRPVAYLSKRLDPVAAGWPRCLRAIAAAALLTREASKLTFGQDIEITSSHNLESLLRSPPDKWLTNARITQYQVLLLDPPRVRFKQTAALNPATLLPETDDTLPIHHCLDTLDSLTSTRPDLTDQPLAQAEATLFTDGSSYIRDGKRYAGAAVVTLDSVIWAEPLPIGTSAQKAELIALTKALEWSKDKSVNIYTDSRYAFATLHVHGMIYRERGWLTAGGKAIKNAPEILALLTAVWLPKRVAVMHCKGHQKDDAPTSTGNRRADEVAREVAIRPLSTQATISAGKRTADGSEFEKRTADGSEFESPKKKAKVE

SEQ ID NO: 6166 - protein, 2116 aa, synthetic construct
MPAAKRVKLDGGDKKYSIGLDIGTNSVGWAVITDEYKVPSKKFKVLGNTDRHSIKKNLIGALLFDSGETAEATRLKRTARRRYTRRKNRICYLQEIFSNEMAKVDDSFFHRLEESFLVEEDKKHERHPIFGNIVDEVAYHEKYPTIYHLRKKLVDSTDKADLRLIYLALAHMIKFRGHFLIEGDLNPDNSDVDKLFIQLVQTYNQLFEENPINASGVDAKAILSARLSKSRRLENLIAQLPGEKKNGLFGNLIALSLGLTPNFKSNFDLAEDAKLQLSKDTYDDDLDNLLAQIGDQYADLFLAAKNLSDAILLSDILRVNTEITKAPLSASMIKRYDEHHQDLTLLKALVRQQLPEKYKEIFFDQSKNGYAGYIDGGASQEEFYKFIKPILEKMDGTEELLVKLNREDLLRKQRTFDNGSIPHQIHLGELHAILRRQEDFYPFLKDNREKIEKILTFRIPYYVGPLARGNSRFAWMTRKSEETITPWNFEEVVDKGASAQSFIERMTNFDKNLPNEKVLPKHSLLYEYFTVYNELTKVKYVTEGMRKPAFLSGEQKKAIVDLLFKTNRKVTVKQLKEDYFKKIECFDSVEISGVEDRFNASLGTYHDLLKIIKDKDFLDNEENEDILEDIVLTLTLFEDREMIEERLKTYAHLFDDKVMKQLKRRRYTGWGRLSRKLINGIRDKQSGKTILDFLKSDGFANRNFMQLIHDDSLTFKEDIQKAQVSGQGDSLHEHIANLAGSPAIKKGILQTVKVVDELVKVMGRHKPENIVIEMARENQTTQKGQKNSRERMKRIEEGIKELGSQILKEHPVENTQLQNEKLYLYYLQNGRDMYVDQELDINRLSDYDVDHIVPQSFLKDDSIDNKVLTRSDKARGKSDNVPSEEVVKKMKNYWRQLLNAKLITQRKFDNLTKAERGGLSELDKAGFIKRQLVETRQITKHVAQILDSRMNTKYDENDKLIREVKVITLKSKLVSDFRKDFQFYKVREINNYHHAHDAYLNAVVGTALIKKYPKLESEFVYGDYKVYDVRKMIAKSEQEIGKATAKYFFYSNIMNFFKTEITLANGEIRKRPLIETNGETGEIVWDKGRDFATVRKVLSMPQVNIVKKTEVQTGGFSKESILPKRNSDKLIARKKDWDPKKYGGFDSPTVAYSVLVVAKVEKGKSKKLKSVKELLGITIMERSSFEKNPIDFLEAKGYKEVKKDLIIKLPKYSLFELENGRKRMLASAGELQKGNELALPSKYVNFLYLASHYEKLKGSPEDNEQKQLFVEQHKHYLDEIIEQISEFSKRVILADANLDKVLSAYNKHRDKPIREQAENIIHLFTLTNLGAPAAFKYFDTTIDRKRYTSTKEVLDATLIHQSITGLYETRIDLSQLGGDGGGGGGSGGGGSGGGGSGGGGSGGGGSGGTVSLQDEHRLFDIPVTTSLPDVWLQDFPQAWAETGGLGRAKCQAPIIIDLKPTAVPVSIKQYPMSLEAHMGIRQHIIKFLELGVLRPCRSPWNTPLLPVKKPGTQDYRPVQDLREINKRTVDIHPTVPNPYNLLSTLKPDYSWYTVLDLKDAFFCLPLAPQSQELFAFEWKDPERGISGQLTWTRLPQGFKNSPTLFDEALHRDLTDFRTQHPEVTLLQYVDDLLLAAPTKKACTQGTRHLLQELGEKGYRASAKKAQICQTKVTYLGYILSEGKRWLTPGRIETVARIPPPRNPREVREFLGTAGFCRLWIPGFAELAAPLYALTKESTPFTWQTEHQLAFEALKKALLSAPALGLPDTSKPFTLFLDERQGIAKGVLTQKLGPWKRPVAYLSKKLDPVAAGWPPCLRIMAATAMLVKDSAKLTLGQPLTVITPHTLEAIVRQPPDRWITNARLTHYQALLLDTDRVQFGPPVTLNPATLLPVPENQPSPHDCRQVLAETHGTREDLKDQELPDADHTWYTDGSSYLDSGTRRAGAAVVDGHNTIWAQSLPPGTSAQKAELIALTKALELSKGKKANIYTDSRYAFATAHTHGSIYERRGLLTSEGKEIKNKAEIIALLKALFLPQEVAIIHCPGHQKGQDPVAVGNRQADRVARQAAMAEVLTLATEPDNTSHITAGKRTADGSEFEKRTADGSEFESPKKKAKVE

SEQ ID NO: 6167 - protein, 2015 aa, synthetic construct
MPAAKRVKLDGGDKKYSIGLDIGTNSVGWAVITDEYKVPSKKFKVLGNTDRHSIKKNLIGALLFDSGETAEATRLKRTARRRYTRRKNRICYLQEIFSNEMAKVDDSFFHRLEESFLVEEDKKHERHPIFGNIVDEVAYHEKYPTIYHLRKKLVDSTDKADLRLIYLALAHMIKFRGHFLIEGDLNPDNSDVDKLFIQLVQTYNQLFEENPINASGVDAKAILSARLSKSRRLENLIAQLPGEKKNGLFGNLIALSLGLTPNFKSNFDLAEDAKLQLSKDTYDDDLDNLLAQIGDQYADLFLAAKNLSDAILLSDILRVNTEITKAPLSASMIKRYDEHHQDLTLLKALVRQQLPEKYKEIFFDQSKNGYAGYIDGGASQEEFYKFIKPILEKMDGTEELLVKLNREDLLRKQRTFDNGSIPHQIHLGELHAILRRQEDFYPFLKDNREKIEKILTFRIPYYVGPLARGNSRFAWMTRKSEETITPWNFEEVVDKGASAQSFIERMTNFDKNLPNEKVLPKHSLLYEYFTVYNELTKVKYVTEGMRKPAFLSGEQKKAIVDLLFKTNRKVTVKQLKEDYFKKIECFDSVEISGVEDRFNASLGTYHDLLKIIKDKDFLDNEENEDILEDIVLTLTLFEDREMIEERLKTYAHLFDDKVMKQLKRRRYTGWGRLSRKLINGIRDKQSGKTILDFLKSDGFANRNFMQLIHDDSLTFKEDIQKAQVSGQGDSLHEHIANLAGSPAIKKGILQTVKVVDELVKVMGRHKPENIVIEMARENQTTQKGQKNSRERMKRIEEGIKELGSQILKEHPVENTQLQNEKLYLYYLQNGRDMYVDQELDINRLSDYDVDHIVPQSFLKDDSIDNKVLTRSDKARGKSDNVPSEEVVKKMKNYWRQLLNAKLITQRKFDNLTKAERGGLSELDKAGFIKRQLVETRQITKHVAQILDSRMNTKYDENDKLIREVKVITLKSKLVSDFRKDFQFYKVREINNYHHAHDAYLNAVVGTALIKKYPKLESEFVYGDYKVYDVRKMIAKSEQEIGKATAKYFFYSNIMNFFKTEITLANGEIRKRPLIETNGETGEIVWDKGRDFATVRKVLSMPQVNIVKKTEVQTGGFSKESILPKRNSDKLIARKKDWDPKKYGGFDSPTVAYSVLVVAKVEKGKSKKLKSVKELLGITIMERSSFEKNPIDFLEAKGYKEVKKDLIIKLPKYSLFELENGRKRMLASAGELQKGNELALPSKYVNFLYLASHYEKLKGSPEDNEQKQLFVEQHKHYLDEIIEQISEFSKRVILADANLDKVLSAYNKHRDKPIREQAENIIHLFTLTNLGAPAAFKYFDTTIDRKRYTSTKEVLDATLIHQSITGLYETRIDLSQLGGDGGGGGGSGGGGSGGGGSGGGGSGGGGSGGGVLDAPPSHIGLEHLPPPPEVPQFPLNLERLQALQDLVHRSLEAGYISPWDGPGNNPVFPVRKPNGAWRFVHDLRVTNALTKPIPALSPGPPDLTAIPTHLPHIICLDLKDAFFQIPVEDRFRSYFAFTLPTPGGLQPHRRFAWRVLPQGFINSPALFQRALQEPLRQVSAAFSQSLLVSYMDDILYVSPTEEQRLQCYQTMAAHLRDLGFQVASEKTRQTPSPVPFLGQMVHERMVTYQSLPTLQISSPISLHQLQTVLGDLQWVSRGTPTTRRPLQLLYSSLKPIDDPRAIIHLSPEQQQGIAELRQALSHNARSRYNEQEPLLAYVHLTRAGSTLVLFQKGAQFPLAYFQTPLTDNQASPWGLLLLLGCQYLQAQALSSYAKTILKYYHNLPKTSLDNWIQSSEDPRVQELLQLWPQISSQGIQPPGPWKTLVTRAEVFLTPQFSPEPIPAALCLFSDGAARRGAYCLWKDHLLDFQAVPAPESAQKGELAGLLAGLAAAPPEPLNIWVDSKYLYSLLRTLVLGAWLQPDPVPSYALLYKSLLRHPAIFVGHVRSHSSASHPIASLNNYVDQLAGKRTADGSEFEKRTADGSEFESPKKKAKVE

SEQ ID NO: 6168 - protein, 2187 aa, synthetic construct
MPAAKRVKLDGGDKKYSIGLDIGTNSVGWAVITDEYKVPSKKFKVLGNTDRHSIKKNLIGALLFDSGETAEATRLKRTARRRYTRRKNRICYLQEIFSNEMAKVDDSFFHRLEESFLVEEDKKHERHPIFGNIVDEVAYHEKYPTIYHLRKKLVDSTDKADLRLIYLALAHMIKFRGHFLIEGDLNPDNSDVDKLFIQLVQTYNQLFEENPINASGVDAKAILSARLSKSRRLENLIAQLPGEKKNGLFGNLIALSLGLTPNFKSNFDLAEDAKLQLSKDTYDDDLDNLLAQIGDQYADLFLAAKNLSDAILLSDILRVNTEITKAPLSASMIKRYDEHHQDLTLLKALVRQQLPEKYKEIFFDQSKNGYAGYIDGGASQEEFYKFIKPILEKMDGTEELLVKLNREDLLRKQRTFDNGSIPHQIHLGELHAILRRQEDFYPFLKDNREKIEKILTFRIPYYVGPLARGNSRFAWMTRKSEETITPWNFEEVVDKGASAQSFIERMTNFDKNLPNEKVLPKHSLLYEYFTVYNELTKVKYVTEGMRKPAFLSGEQKKAIVDLLFKTNRKVTVKQLKEDYFKKIECFDSVEISGVEDRFNASLGTYHDLLKIIKDKDFLDNEENEDILEDIVLTLTLFEDREMIEERLKTYAHLFDDKVMKQLKRRRYTGWGRLSRKLINGIRDKQSGKTILDFLKSDGFANRNFMQLIHDDSLTFKEDIQKAQVSGQGDSLHEHIANLAGSPAIKKGILQTVKVVDELVKVMGRHKPENIVIEMARENQTTQKGQKNSRERMKRIEEGIKELGSQILKEHPVENTQLQNEKLYLYYLQNGRDMYVDQELDINRLSDYDVDHIVPQSFLKDDSIDNKVLTRSDKARGKSDNVPSEEVVKKMKNYWRQLLNAKLITQRKFDNLTKAERGGLSELDKAGFIKRQLVETRQITKHVAQILDSRMNTKYDENDKLIREVKVITLKSKLVSDFRKDFQFYKVREINNYHHAHDAYLNAVVGTALIKKYPKLESEFVYGDYKVYDVRKMIAKSEQEIGKATAKYFFYSNIMNFFKTEITLANGEIRKRPLIETNGETGEIVWDKGRDFATVRKVLSMPQVNIVKKTEVQTGGFSKESILPKRNSDKLIARKKDWDPKKYGGFDSPTVAYSVLVVAKVEKGKSKKLKSVKELLGITIMERSSFEKNPIDFLEAKGYKEVKKDLIIKLPKYSLFELENGRKRMLASAGELQKGNELALPSKYVNFLYLASHYEKLKGSPEDNEQKQLFVEQHKHYLDEIIEQISEFSKRVILADANLDKVLSAYNKHRDKPIREQAENIIHLFTLTNLGAPAAFKYFDTTIDRKRYTSTKEVLDATLIHQSITGLYETRIDLSQLGGDGGGGGGSGGGGSGGGGSGGGGSGGGGSGGMDLLKPLTVERKGVKIKGYWNSQADITCVPKDLLQGEEPVRQQNVTTIHGTQEGDVYYVNLKIDGRRINTEVIGTTLDYAIITPGDVPWILKKPLELTIKLDLEEQQGTLLNNSILSKKGKEELKQLFEKYSALWQSWENQVGHRRIRPHKIATGTVKPTPQKQYHINPKAKPDIQIVINDLLKQGVLIQKESTMNTPVYPVPKPNGRWRMVLDYRAVNKVTPLIAVQNQHSYGILGSLFKGRYKTTIDLSNGFWAHPIVPEDYWITAFTWQGKQYCWTVLPQGFLNSPGLFTGDVVDLLQGIPNVEVYVDDVYISHDSEKEHLEYLDILFNRLKEAGYIISLKKSNIANSIVDFLGFQITNEGRGLTDTFKEKLENITAPTTLKQLQSILGLLNFARNFIPDFTELIAPLYALIPKSTKNYVPWQIEHSTTLETLITKLNGAEYLQGRKGDKTLIMKVNASYTTGYIRYYNEGEKKPISYVSIVFSKTELKFTELEKLLTTVHKGLLKALDLSMGQNIHVYSPIVSMQNIQKTPQTAKKALASRWLSWLSYLEDPRIRFFYDPQMPALKDLPAVDTGKDNKKHPSNFQHIFYTDGSAITSPTKEGHLNAGMGIVYFINKDGNLQKQQEWSISLGNHTAQFAEIAAFEFALKKCLPLGGNILVVTDSNYVAKAYNEELDVWASNGFVNNRKKPLKHISKWKSVADLKRLRPDVVVTHEPGHQKLDSSPHAYGNNLADQLATQASFKVHAGKRTADGSEFEKRTADGSEFESPKKKAKVE

SEQ ID NO: 6169 - protein, 2101 aa, synthetic construct
MPAAKRVKLDGGDKKYSIGLDIGTNSVGWAVITDEYKVPSKKFKVLGNTDRHSIKKNLIGALLFDSGETAEATRLKRTARRRYTRRKNRICYLQEIFSNEMAKVDDSFFHRLEESFLVEEDKKHERHPIFGNIVDEVAYHEKYPTIYHLRKKLVDSTDKADLRLIYLALAHMIKFRGHFLIEGDLNPDNSDVDKLFIQLVQTYNQLFEENPINASGVDAKAILSARLSKSRRLENLIAQLPGEKKNGLFGNLIALSLGLTPNFKSNFDLAEDAKLQLSKDTYDDDLDNLLAQIGDQYADLFLAAKNLSDAILLSDILRVNTEITKAPLSASMIKRYDEHHQDLTLLKALVRQQLPEKYKEIFFDQSKNGYAGYIDGGASQEEFYKFIKPILEKMDGTEELLVKLNREDLLRKQRTFDNGSIPHQIHLGELHAILRRQEDFYPFLKDNREKIEKILTFRIPYYVGPLARGNSRFAWMTRKSEETITPWNFEEVVDKGASAQSFIERMTNFDKNLPNEKVLPKHSLLYEYFTVYNELTKVKYVTEGMRKPAFLSGEQKKAIVDLLFKTNRKVTVKQLKEDYFKKIECFDSVEISGVEDRFNASLGTYHDLLKIIKDKDFLDNEENEDILEDIVLTLTLFEDREMIEERLKTYAHLFDDKVMKQLKRRRYTGWGRLSRKLINGIRDKQSGKTILDFLKSDGFANRNFMQLIHDDSLTFKEDIQKAQVSGQGDSLHEHIANLAGSPAIKKGILQTVKVVDELVKVMGRHKPENIVIEMARENQTTQKGQKNSRERMKRIEEGIKELGSQILKEHPVENTQLQNEKLYLYYLQNGRDMYVDQELDINRLSDYDVDHIVPQSFLKDDSIDNKVLTRSDKARGKSDNVPSEEVVKKMKNYWRQLLNAKLITQRKFDNLTKAERGGLSELDKAGFIKRQLVETRQITKHVAQILDSRMNTKYDENDKLIREVKVITLKSKLVSDFRKDFQFYKVREINNYHHAHDAYLNAVVGTALIKKYPKLESEFVYGDYKVYDVRKMIAKSEQEIGKATAKYFFYSNIMNFFKTEITLANGEIRKRPLIETNGETGEIVWDKGRDFATVRKVLSMPQVNIVKKTEVQTGGFSKESILPKRNSDKLIARKKDWDPKKYGGFDSPTVAYSVLVVAKVEKGKSKKLKSVKELLGITIMERSSFEKNPIDFLEAKGYKEVKKDLIIKLPKYSLFELENGRKRMLASAGELQKGNELALPSKYVNFLYLASHYEKLKGSPEDNEQKQLFVEQHKHYLDEIIEQISEFSKRVILADANLDKVLSAYNKHRDKPIREQAENIIHLFTLTNLGAPAAFKYFDTTIDRKRYTSTKEVLDATLIHQSITGLYETRIDLSQLGGDGGGGGGSGGGGSGGGGSGGGGSGGGGSGGVPWILKKPLELTIKLDLEEQQGTLLNNSILSKKGKEELKQLFEKYSALWQSWENQVGHRRIRPHKIATGTVKPTPQKQYHINPKAKPDIQIVINDLLKQGVLIQKESTMNTPVYPVPKPNGRWRMVLDYRAVNKVTPLIAVQNQHSYGILGSLFKGRYKTTIDLSNGFWAHPIVPEDYWITAFTWQGKQYCWTVLPQGFLNSPGLFTGDVVDLLQGIPNVEVYVDDVYISHDSEKEHLEYLDILFNRLKEAGYIISLKKSNIANSIVDFLGFQITNEGRGLTDTFKEKLENITAPTTLKQLQSILGLLNFARNFIPDFTELIAPLYALIPKSTKNYVPWQIEHSTTLETLITKLNGAEYLQGRKGDKTLIMKVNASYTTGYIRYYNEGEKKPISYVSIVFSKTELKFTELEKLLTTVHKGLLKALDLSMGQNIHVYSPIVSMQNIQKTPQTAKKALASRWLSWLSYLEDPRIRFFYDPQMPALKDLPAVDTGKDNKKHPSNFQHIFYTDGSAITSPTKEGHLNAGMGIVYFINKDGNLQKQQEWSISLGNHTAQFAEIAAFEFALKKCLPLGGNILVVTDSNYVAKAYNEELDVWASNGFVNNRKKPLKHISKWKSVADLKRLRPDVVVTHEPGHQKLDSSPHAYGNNLADQLATQASFKVHAGKRTADGSEFEKRTADGSEFESPKKKAKVE

SEQ ID NO: 6170 - protein, 2101 aa, synthetic construct
MPAAKRVKLDGGDKKYSIGLDIGTNSVGWAVITDEYKVPSKKFKVLGNTDRHSIKKNLIGALLFDSGETAEATRLKRTARRRYTRRKNRICYLQEIFSNEMAKVDDSFFHRLEESFLVEEDKKHERHPIFGNIVDEVAYHEKYPTIYHLRKKLVDSTDKADLRLIYLALAHMIKFRGHFLIEGDLNPDNSDVDKLFIQLVQTYNQLFEENPINASGVDAKAILSARLSKSRRLENLIAQLPGEKKNGLFGNLIALSLGLTPNFKSNFDLAEDAKLQLSKDTYDDDLDNLLAQIGDQYADLFLAAKNLSDAILLSDILRVNTEITKAPLSASMIKRYDEHHQDLTLLKALVRQQLPEKYKEIFFDQSKNGYAGYIDGGASQEEFYKFIKPILEKMDGTEELLVKLNREDLLRKQRTFDNGSIPHQIHLGELHAILRRQEDFYPFLKDNREKIEKILTFRIPYYVGPLARGNSRFAWMTRKSEETITPWNFEEVVDKGASAQSFIERMTNFDKNLPNEKVLPKHSLLYEYFTVYNELTKVKYVTEGMRKPAFLSGEQKKAIVDLLFKTNRKVTVKQLKEDYFKKIECFDSVEISGVEDRFNASLGTYHDLLKIIKDKDFLDNEENEDILEDIVLTLTLFEDREMIEERLKTYAHLFDDKVMKQLKRRRYTGWGRLSRKLINGIRDKQSGKTILDFLKSDGFANRNFMQLIHDDSLTFKEDIQKAQVSGQGDSLHEHIANLAGSPAIKKGILQTVKVVDELVKVMGRHKPENIVIEMARENQTTQKGQKNSRERMKRIEEGIKELGSQILKEHPVENTQLQNEKLYLYYLQNGRDMYVDQELDINRLSDYDVDHIVPQSFLKDDSIDNKVLTRSDKARGKSDNVPSEEVVKKMKNYWRQLLNAKLITQRKFDNLTKAERGGLSELDKAGFIKRQLVETRQITKHVAQILDSRMNTKYDENDKLIREVKVITLKSKLVSDFRKDFQFYKVREINNYHHAHDAYLNAVVGTALIKKYPKLESEFVYGDYKVYDVRKMIAKSEQEIGKATAKYFFYSNIMNFFKTEITLANGEIRKRPLIETNGETGEIVWDKGRDFATVRKVLSMPQVNIVKKTEVQTGGFSKESILPKRNSDKLIARKKDWDPKKYGGFDSPTVAYSVLVVAKVEKGKSKKLKSVKELLGITIMERSSFEKNPIDFLEAKGYKEVKKDLIIKLPKYSLFELENGRKRMLASAGELQKGNELALPSKYVNFLYLASHYEKLKGSPEDNEQKQLFVEQHKHYLDEIIEQISEFSKRVILADANLDKVLSAYNKHRDKPIREQAENIIHLFTLTNLGAPAAFKYFDTTIDRKRYTSTKEVLDATLIHQSITGLYETRIDLSQLGGDGGGGGGSGGGGSGGGGSGGGGSGGGGSGGVPWILKKPLELTIKLDLEEQQGTLLNNSILSKKGKEELKQLFEKYSALWQSWENQVGHRRIRPHKIATGTVKPTPQKQYHINPKAKPDIQIVINDLLKQGVLIQKESTMNTPVYPVPKPNGRWRMVLDYRAVNKVTPLIAVQNQHSYGILGSLFKGRYKTTIDLSNGFWAHPIVPEDYWITAFTWQGKQYCWTVLPQGFLNSPGLFNGDVVDLLQGIPNVEVYVDDVYISHDSEKEHLEYLDILFNRLKEAGYIISLKKSNIANSIVDFLGFQITNEGRGLTDTFKEKLENITAPTTLKQLQSILGLLNFARNFIPDFTELIAPLYALIPKSPKNYVPWQIEHSTTLETLITKLNGAEYLQGRKGDKTLIMKVNASYTTGYIRYYNEGEKKPISYVSIVFSKTELKFTELEKLLTTVHKGLLKALDLSMGQNIHVYSPIVSMQNIQKTPQTAKKALASRWLSWLSYLEDPRIRFFYDPQMPALKDLPAVDTGKDNKKHPSNFQHIFYTDGSAITSPTKEGHLNAGMGIVYFINKDGNLQKQQEWSISLGNHTAQFAEIAAFEFALKKCLPLGGNILVVTDSNYVAKAYNEELDVWASNGFVNNRKKPLKHISKWKSVADLKRLRPDVVVTHEPGHQKLDSSPHAYGNNLADQLATQASFKVHAGKRTADGSEFEKRTADGSEFESPKKKAKVE

SEQ ID NO: 6171 - protein, 2109 aa, synthetic construct
MPAAKRVKLDGGDKKYSIGLDIGTNSVGWAVITDEYKVPSKKFKVLGNTDRHSIKKNLIGALLFDSGETAEATRLKRTARRRYTRRKNRICYLQEIFSNEMAKVDDSFFHRLEESFLVEEDKKHERHPIFGNIVDEVAYHEKYPTIYHLRKKLVDSTDKADLRLIYLALAHMIKFRGHFLIEGDLNPDNSDVDKLFIQLVQTYNQLFEENPINASGVDAKAILSARLSKSRRLENLIAQLPGEKKNGLFGNLIALSLGLTPNFKSNFDLAEDAKLQLSKDTYDDDLDNLLAQIGDQYADLFLAAKNLSDAILLSDILRVNTEITKAPLSASMIKRYDEHHQDLTLLKALVRQQLPEKYKEIFFDQSKNGYAGYIDGGASQEEFYKFIKPILEKMDGTEELLVKLNREDLLRKQRTFDNGSIPHQIHLGELHAILRRQEDFYPFLKDNREKIEKILTFRIPYYVGPLARGNSRFAWMTRKSEETITPWNFEEVVDKGASAQSFIERMTNFDKNLPNEKVLPKHSLLYEYFTVYNELTKVKYVTEGMRKPAFLSGEQKKAIVDLLFKTNRKVTVKQLKEDYFKKIECFDSVEISGVEDRFNASLGTYHDLLKIIKDKDFLDNEENEDILEDIVLTLTLFEDREMIEERLKTYAHLFDDKVMKQLKRRRYTGWGRLSRKLINGIRDKQSGKTILDFLKSDGFANRNFMQLIHDDSLTFKEDIQKAQVSGQGDSLHEHIANLAGSPAIKKGILQTVKVVDELVKVMGRHKPENIVIEMARENQTTQKGQKNSRERMKRIEEGIKELGSQILKEHPVENTQLQNEKLYLYYLQNGRDMYVDQELDINRLSDYDVDHIVPQSFLKDDSIDNKVLTRSDKARGKSDNVPSEEVVKKMKNYWRQLLNAKLITQRKFDNLTKAERGGLSELDKAGFIKRQLVETRQITKHVAQILDSRMNTKYDENDKLIREVKVITLKSKLVSDFRKDFQFYKVREINNYHHAHDAYLNAVVGTALIKKYPKLESEFVYGDYKVYDVRKMIAKSEQEIGKATAKYFFYSNIMNFFKTEITLANGEIRKRPLIETNGETGEIVWDKGRDFATVRKVLSMPQVNIVKKTEVQTGGFSKESILPKRNSDKLIARKKDWDPKKYGGFDSPTVAYSVLVVAKVEKGKSKKLKSVKELLGITIMERSSFEKNPIDFLEAKGYKEVKKDLIIKLPKYSLFELENGRKRMLASAGELQKGNELALPSKYVNFLYLASHYEKLKGSPEDNEQKQLFVEQHKHYLDEIIEQISEFSKRVILADANLDKVLSAYNKHRDKPIREQAENIIHLFTLTNLGAPAAFKYFDTTIDRKRYTSTKEVLDATLIHQSITGLYETRIDLSQLGGDGGGGGGSGGGGSGGGGSGGGGSGGGGSGGTLQLEEEYRLFEPESTQKQEMDIWLKNFPQAWAETGGMGTAHCQAPVLIQLKATATPISIRQYPMPHEAYQGIKPHIRRMLDQGILKPCQSPWNTPLLPVKKPGTEDYRPVQDLREVNKRVEDIHPTVPNPYNLLSTLPPSHPWYTVLDLKDAFFCLRLHSESQLLFAFEWRDPEIGLSGQLTWTRLPQGFKNSPTLFNEALHSDLADFRVRYPALVLLQYVDDLLLAAATRTECLEGTKALLETLGNKGYRASAKKAQICLQEVTYLGYSLKDGQRWLTKARKEAILSIPVPKNSRQVREFLGTAGYCRLWIPGFAELAAPLYPLTRPGTLFQWGTEQQLAFEDIKKALLSSPALGLPDITKPFELFIDENSGFAKGVLVQKLGPWKRPVAYLSKKLDTVASGWPPCLRMVAAIAILVKDAGKLTLGQPLTILTSHPVEALVRQPPNKWLSNARMTHYQAMLLDAERVHFGPTVSLNPATLLPLPSGGNHHDCLQILAETHGTRPDLTDQPLPDADLTWYTDGSSFIRNGEREAGAAVTTESEVIWAAPLPPGTSAQRAELIALTQALKMAEGKKLTVYTDSRYAFATTHVHGEIYRRRGWLTSEGKEIKNKNEILALLEALFLPKRLSIIHCPGHQKGDSPQAKGNRLADDTAKKAATETHSSLTVLPAGKRTADGSEFEKRTADGSEFESPKKKAKVE

SEQ ID NO: 6172 - protein, 2108 aa, synthetic construct
MPAAKRVKLDGGDKKYSIGLDIGTNSVGWAVITDEYKVPSKKFKVLGNTDRHSIKKNLIGALLFDSGETAEATRLKRTARRRYTRRKNRICYLQEIFSNEMAKVDDSFFHRLEESFLVEEDKKHERHPIFGNIVDEVAYHEKYPTIYHLRKKLVDSTDKADLRLIYLALAHMIKFRGHFLIEGDLNPDNSDVDKLFIQLVQTYNQLFEENPINASGVDAKAILSARLSKSRRLENLIAQLPGEKKNGLFGNLIALSLGLTPNFKSNFDLAEDAKLQLSKDTYDDDLDNLLAQIGDQYADLFLAAKNLSDAILLSDILRVNTEITKAPLSASMIKRYDEHHQDLTLLKALVRQQLPEKYKEIFFDQSKNGYAGYIDGGASQEEFYKFIKPILEKMDGTEELLVKLNREDLLRKQRTFDNGSIPHQIHLGELHAILRRQEDFYPFLKDNREKIEKILTFRIPYYVGPLARGNSRFAWMTRKSEETITPWNFEEVVDKGASAQSFIERMTNFDKNLPNEKVLPKHSLLYEYFTVYNELTKVKYVTEGMRKPAFLSGEQKKAIVDLLFKTNRKVTVKQLKEDYFKKIECFDSVEISGVEDRFNASLGTYHDLLKIIKDKDFLDNEENEDILEDIVLTLTLFEDREMIEERLKTYAHLFDDKVMKQLKRRRYTGWGRLSRKLINGIRDKQSGKTILDFLKSDGFANRNFMQLIHDDSLTFKEDIQKAQVSGQGDSLHEHIANLAGSPAIKKGILQTVKVVDELVKVMGRHKPENIVIEMARENQTTQKGQKNSRERMKRIEEGIKELGSQILKEHPVENTQLQNEKLYLYYLQNGRDMYVDQELDINRLSDYDVDHIVPQSFLKDDSIDNKVLTRSDKARGKSDNVPSEEVVKKMKNYWRQLLNAKLITQRKFDNLTKAERGGLSELDKAGFIKRQLVETRQITKHVAQILDSRMNTKYDENDKLIREVKVITLKSKLVSDFRKDFQFYKVREINNYHHAHDAYLNAVVGTALIKKYPKLESEFVYGDYKVYDVRKMIAKSEQEIGKATAKYFFYSNIMNFFKTEITLANGEIRKRPLIETNGETGEIVWDKGRDFATVRKVLSMPQVNIVKKTEVQTGGFSKESILPKRNSDKLIARKKDWDPKKYGGFDSPTVAYSVLVVAKVEKGKSKKLKSVKELLGITIMERSSFEKNPIDFLEAKGYKEVKKDLIIKLPKYSLFELENGRKRMLASAGELQKGNELALPSKYVNFLYLASHYEKLKGSPEDNEQKQLFVEQHKHYLDEIIEQISEFSKRVILADANLDKVLSAYNKHRDKPIREQAENIIHLFTLTNLGAPAAFKYFDTTIDRKRYTSTKEVLDATLIHQSITGLYETRIDLSQLGGDGGGGGGSGGGGSGGGGSGGGGSGGGGSGGVLNLEEEYRLHEKPVPSSIDPSWLQLFPTVWAERAGMGLANQVPPVVVELRSGASPVAVRQYPMSKEAREGIRPHIQKFLDLGVLVPCRSPWNTPLLPVKKPGTNDYRPVQDLREINKRVQDIHPTVPNPYNLLSSLPPSYTWYSVLDLKDAFFCLRLHPNSQPLFAFEWKDPEKGNTGQLTWTRLPQGFKNSPTLFNEALHRDLAPFRALNPQVVLLQYVDDLLVAAPTYEDCKKGTQKLLQELSKLGYRVSAKKAQLCQREVTYLGYLLKEGKRWLTPARKATVMKIPVPTTPRQVREFLGKAGFCRLFIPGFASLAAPLYPLTKPSIPFIWTEEHQQAFDHIKKALLSAPALALPDLTKPFTLYIDERAGVARGVLTQTLGPWRRPVAYLSKKLDPVASGWPTCLKAVAAVALLLKDADKLTLGQNVTVIASHSLESIVRQPPDRWMTNARMTHYQSLLLNERVSFAPPAVLNPATLLPVESEATPVHRCSEILAEETGTRRDLEDQPLPGVPTWYTDGSSFITEGKRRAGAPIVDGKRTVWASSLPEGTSAQKAELVALTQALRLAEGKNINIYTDSRYAFATAHIHGAIYKQRGWLTSAGKDIKNKEEILALLEAIHLPRRVAIIHCPGHQRGSNPVATGNRRADEAAKQAALSTRVLAGTTKPAGKRTADGSEFEKRTADGSEFESPKKKAKVE

SEQ ID NO: 6173 - protein, 2232 aa, synthetic construct
MPAAKRVKLDGGDKKYSIGLDIGTNSVGWAVITDEYKVPSKKFKVLGNTDRHSIKKNLIGALLFDSGETAEATRLKRTARRRYTRRKNRICYLQEIFSNEMAKVDDSFFHRLEESFLVEEDKKHERHPIFGNIVDEVAYHEKYPTIYHLRKKLVDSTDKADLRLIYLALAHMIKFRGHFLIEGDLNPDNSDVDKLFIQLVQTYNQLFEENPINASGVDAKAILSARLSKSRRLENLIAQLPGEKKNGLFGNLIALSLGLTPNFKSNFDLAEDAKLQLSKDTYDDDLDNLLAQIGDQYADLFLAAKNLSDAILLSDILRVNTEITKAPLSASMIKRYDEHHQDLTLLKALVRQQLPEKYKEIFFDQSKNGYAGYIDGGASQEEFYKFIKPILEKMDGTEELLVKLNREDLLRKQRTFDNGSIPHQIHLGELHAILRRQEDFYPFLKDNREKIEKILTFRIPYYVGPLARGNSRFAWMTRKSEETITPWNFEEVVDKGASAQSFIERMTNFDKNLPNEKVLPKHSLLYEYFTVYNELTKVKYVTEGMRKPAFLSGEQKKAIVDLLFKTNRKVTVKQLKEDYFKKIECFDSVEISGVEDRFNASLGTYHDLLKIIKDKDFLDNEENEDILEDIVLTLTLFEDREMIEERLKTYAHLFDDKVMKQLKRRRYTGWGRLSRKLINGIRDKQSGKTILDFLKSDGFANRNFMQLIHDDSLTFKEDIQKAQVSGQGDSLHEHIANLAGSPAIKKGILQTVKVVDELVKVMGRHKPENIVIEMARENQTTQKGQKNSRERMKRIEEGIKELGSQILKEHPVENTQLQNEKLYLYYLQNGRDMYVDQELDINRLSDYDVDHIVPQSFLKDDSIDNKVLTRSDKARGKSDNVPSEEVVKKMKNYWRQLLNAKLITQRKFDNLTKAERGGLSELDKAGFIKRQLVETRQITKHVAQILDSRMNTKYDENDKLIREVKVITLKSKLVSDFRKDFQFYKVREINNYHHAHDAYLNAVVGTALIKKYPKLESEFVYGDYKVYDVRKMIAKSEQEIGKATAKYFFYSNIMNFFKTEITLANGEIRKRPLIETNGETGEIVWDKGRDFATVRKVLSMPQVNIVKKTEVQTGGFSKESILPKRNSDKLIARKKDWDPKKYGGFDSPTVAYSVLVVAKVEKGKSKKLKSVKELLGITIMERSSFEKNPIDFLEAKGYKEVKKDLIIKLPKYSLFELENGRKRMLASAGELQKGNELALPSKYVNFLYLASHYEKLKGSPEDNEQKQLFVEQHKHYLDEIIEQISEFSKRVILADANLDKVLSAYNKHRDKPIREQAENIIHLFTLTNLGAPAAFKYFDTTIDRKRYTSTKEVLDATLIHQSITGLYETRIDLSQLGGDGGGGGGSGGGGSGGGGSGGGGSGGGGSGGTLGDQGSRGSDPLPEPRVTLTVEGIPTEFLVNTGAEHSVLTKPMGKMGSKRTVVAGATGSKVYPWTTKRLLKIGQKQVTHSFLVIPECPAPLLGRDLLTKLKAQIQFSTEGPQVTWEDRPAMCLVLNLEEEYRLHEKPVPPSIDPSWLQLFPMVWAEKAGMGLANQVPPVVVELKSDASPVAVRQYPMSKEAREGIRPHIQRFLDLGILVPCQSPWNTPLLPVKKPGTNDYRPVQDLREVNKRVQDIHPTVPNPYNLLSSLPPSHTWYSVLDLKDAFFCLKLHPNSQPLFAFEWRDPEKGNTGQLTWTRLPQGFKNSPTLFDEALHRDLASFRALNPQVVMLQYVDDLLVAAPTYRDCKEGTRRLLQELSKLGYRVSAKKAQLCREEVTYLGYLLKGGKRWLTPARKATVMKIPTPTTPRQVREFLGTAGFCRLWIPGFASLAAPLYPLTREKVPFTWTEAHQEAFGRIKEALLSAPALALPDLTKPFALYVDEKEGVARGVLTQTLGPWRRPVAYLSKKLDPVASGWPTCLKAIAAVALLLKDADKLTLGQNVLVIAPHNLESIVRQPPDRWMTNARMTHYQSLLLNERVSFAPPAILNPATLLPVESDDTPIHICSEILAEETGTRPDLRDQPLPGVPAWYTDGSSFIMDGRRQAGAAIVDNKRTVWASNLPEGTSAQKAELIALTQALRLAEGKSINIYTDSRYAFATAHVHGAIYKQRGLLTSAGKDIKNKEEILALLEAIHLPKRVAIIHCPGHQRGTDPVATGNRKADEAAKQAAQSTRILTETTKNAGKRTADGSEFEKRTADGSEFESPKKKAKVE

SEQ ID NO: 6174 - protein, 2141 aa, synthetic construct
MPAAKRVKLDGGDKKYSIGLDIGTNSVGWAVITDEYKVPSKKFKVLGNTDRHSIKKNLIGALLFDSGETAEATRLKRTARRRYTRRKNRICYLQEIFSNEMAKVDDSFFHRLEESFLVEEDKKHERHPIFGNIVDEVAYHEKYPTIYHLRKKLVDSTDKADLRLIYLALAHMIKFRGHFLIEGDLNPDNSDVDKLFIQLVQTYNQLFEENPINASGVDAKAILSARLSKSRRLENLIAQLPGEKKNGLFGNLIALSLGLTPNFKSNFDLAEDAKLQLSKDTYDDDLDNLLAQIGDQYADLFLAAKNLSDAILLSDILRVNTEITKAPLSASMIKRYDEHHQDLTLLKALVRQQLPEKYKEIFFDQSKNGYAGYIDGGASQEEFYKFIKPILEKMDGTEELLVKLNREDLLRKQRTFDNGSIPHQIHLGELHAILRRQEDFYPFLKDNREKIEKILTFRIPYYVGPLARGNSRFAWMTRKSEETITPWNFEEVVDKGASAQSFIERMTNFDKNLPNEKVLPKHSLLYEYFTVYNELTKVKYVTEGMRKPAFLSGEQKKAIVDLLFKTNRKVTVKQLKEDYFKKIECFDSVEISGVEDRFNASLGTYHDLLKIIKDKDFLDNEENEDILEDIVLTLTLFEDREMIEERLKTYAHLFDDKVMKQLKRRRYTGWGRLSRKLINGIRDKQSGKTILDFLKSDGFANRNFMQLIHDDSLTFKEDIQKAQVSGQGDSLHEHIANLAGSPAIKKGILQTVKVVDELVKVMGRHKPENIVIEMARENQTTQKGQKNSRERMKRIEEGIKELGSQILKEHPVENTQLQNEKLYLYYLQNGRDMYVDQELDINRLSDYDVDHIVPQSFLKDDSIDNKVLTRSDKARGKSDNVPSEEVVKKMKNYWRQLLNAKLITQRKFDNLTKAERGGLSELDKAGFIKRQLVETRQITKHVAQILDSRMNTKYDENDKLIREVKVITLKSKLVSDFRKDFQFYKVREINNYHHAHDAYLNAVVGTALIKKYPKLESEFVYGDYKVYDVRKMIAKSEQEIGKATAKYFFYSNIMNFFKTEITLANGEIRKRPLIETNGETGEIVWDKGRDFATVRKVLSMPQVNIVKKTEVQTGGFSKESILPKRNSDKLIARKKDWDPKKYGGFDSPTVAYSVLVVAKVEKGKSKKLKSVKELLGITIMERSSFEKNPIDFLEAKGYKEVKKDLIIKLPKYSLFELENGRKRMLASAGELQKGNELALPSKYVNFLYLASHYEKLKGSPEDNEQKQLFVEQHKHYLDEIIEQISEFSKRVILADANLDKVLSAYNKHRDKPIREQAENIIHLFTLTNLGAPAAFKYFDTTIDRKRYTSTKEVLDATLIHQSITGLYETRIDLSQLGGDGGGGGGSGGGGSGGGGSGGGGSGGGGSGGLLGRDLLTKLKAQIQFSTEGPQVTWEDRPAMCLVLNLEEEYRLHEKPVPPSIDPSWLQLFPMVWAEKAGMGLANQVPPVVVELKSDASPVAVRQYPMSKEAREGIRPHIQRFLDLGILVPCQSPWNTPLLPVKKPGTNDYRPVQDLREVNKRVQDIHPTVPNPYNLLSSLPPSHTWYSVLDLKDAFFCLKLHPNSQPLFAFEWRDPEKGNTGQLTWTRLPQGFKNSPTLFDEALHRDLASFRALNPQVVMLQYVDDLLVAAPTYRDCKEGTRRLLQELSKLGYRVSAKKAQLCREEVTYLGYLLKGGKRWLTPARKATVMKIPTPTTPRQVREFLGTAGFCRLWIPGFASLAAPLYPLTREKVPFTWTEAHQEAFGRIKEALLSAPALALPDLTKPFALYVDEKEGVARGVLTQTLGPWRRPVAYLSKKLDPVASGWPTCLKAIAAVALLLKDADKLTLGQNVLVIAPHNLESIVRQPPDRWMTNARMTHYQSLLLNERVSFAPPAILNPATLLPVESDDTPIHICSEILAEETGTRPDLRDQPLPGVPAWYTDGSSFIMDGRRQAGAAIVDNKRTVWASNLPEGTSAQKAELIALTQALRLAEGKSINIYTDSRYAFATAHVHGAIYKQRGLLTSAGKDIKNKEEILALLEAIHLPKRVAIIHCPGHQRGTDPVATGNRKADEAAKQAAQSTRILTETTKNAGKRTADGSEFEKRTADGSEFESPKKKAKVE

SEQ ID NO: 6175 - protein, 2141 aa, synthetic construct
MPAAKRVKLDGGDKKYSIGLDIGTNSVGWAVITDEYKVPSKKFKVLGNTDRHSIKKNLIGALLFDSGETAEATRLKRTARRRYTRRKNRICYLQEIFSNEMAKVDDSFFHRLEESFLVEEDKKHERHPIFGNIVDEVAYHEKYPTIYHLRKKLVDSTDKADLRLIYLALAHMIKFRGHFLIEGDLNPDNSDVDKLFIQLVQTYNQLFEENPINASGVDAKAILSARLSKSRRLENLIAQLPGEKKNGLFGNLIALSLGLTPNFKSNFDLAEDAKLQLSKDTYDDDLDNLLAQIGDQYADLFLAAKNLSDAILLSDILRVNTEITKAPLSASMIKRYDEHHQDLTLLKALVRQQLPEKYKEIFFDQSKNGYAGYIDGGASQEEFYKFIKPILEKMDGTEELLVKLNREDLLRKQRTFDNGSIPHQIHLGELHAILRRQEDFYPFLKDNREKIEKILTFRIPYYVGPLARGNSRFAWMTRKSEETITPWNFEEVVDKGASAQSFIERMTNFDKNLPNEKVLPKHSLLYEYFTVYNELTKVKYVTEGMRKPAFLSGEQKKAIVDLLFKTNRKVTVKQLKEDYFKKIECFDSVEISGVEDRFNASLGTYHDLLKIIKDKDFLDNEENEDILEDIVLTLTLFEDREMIEERLKTYAHLFDDKVMKQLKRRRYTGWGRLSRKLINGIRDKQSGKTILDFLKSDGFANRNFMQLIHDDSLTFKEDIQKAQVSGQGDSLHEHIANLAGSPAIKKGILQTVKVVDELVKVMGRHKPENIVIEMARENQTTQKGQKNSRERMKRIEEGIKELGSQILKEHPVENTQLQNEKLYLYYLQNGRDMYVDQELDINRLSDYDVDHIVPQSFLKDDSIDNKVLTRSDKARGKSDNVPSEEVVKKMKNYWRQLLNAKLITQRKFDNLTKAERGGLSELDKAGFIKRQLVETRQITKHVAQILDSRMNTKYDENDKLIREVKVITLKSKLVSDFRKDFQFYKVREINNYHHAHDAYLNAVVGTALIKKYPKLESEFVYGDYKVYDVRKMIAKSEQEIGKATAKYFFYSNIMNFFKTEITLANGEIRKRPLIETNGETGEIVWDKGRDFATVRKVLSMPQVNIVKKTEVQTGGFSKESILPKRNSDKLIARKKDWDPKKYGGFDSPTVAYSVLVVAKVEKGKSKKLKSVKELLGITIMERSSFEKNPIDFLEAKGYKEVKKDLIIKLPKYSLFELENGRKRMLASAGELQKGNELALPSKYVNFLYLASHYEKLKGSPEDNEQKQLFVEQHKHYLDEIIEQISEFSKRVILADANLDKVLSAYNKHRDKPIREQAENIIHLFTLTNLGAPAAFKYFDTTIDRKRYTSTKEVLDATLIHQSITGLYETRIDLSQLGGDGGGGGGSGGGGSGGGGSGGGGSGGGGSGGLLGRDLLTKLKAQIQFSTEGPQVTWEDRPAMCLVLNLEEEYRLHEKPVPPSIDPSWLQLFPMVWAEKAGMGLANQVPPVVVELKSDASPVAVRQYPMSKEAREGIRPHIQRFLDLGILVPCQSPWNTPLLPVKKPGTNDYRPVQDLREVNKRVQDIHPTVPNPYNLLSSLPPSHTWYSVLDLKDAFFCLKLHPNSQPLFAFEWRDPEKGNTGQLTWTRLPQGFKNSPTLFNEALHRDLASFRALNPQVVMLQYVDDLLVAAPTYRDCKEGTRRLLQELSKLGYRVSAKKAQLCREEVTYLGYLLKGGKRWLTPARKATVMKIPTPTTPRQVREFLGTAGFCRLWIPGFASLAAPLYPLTRPKVPFTWTEAHQEAFGRIKEALLSAPALALPDLTKPFALYVDEKEGVARGVLTQTLGPWRRPVAYLSKKLDPVASGWPTCLKAIAAVALLLKDADKLTLGQNVLVIAPHNLESIVRQPPDRWMTNARMTHYQSLLLNERVSFAPPAILNPATLLPVESDDTPIHICSEILAEETGTRPDLRDQPLPGVPAWYTDGSSFIMDGRRQAGAAIVDNKRTVWASNLPEGTSAQKAELIALTQALRLAEGKSINIYTDSRYAFATAHVHGAIYKQRGWLTSAGKDIKNKEEILALLEAIHLPKRVAIIHCPGHQRGTDPVATGNRKADEAAKQAAQSTRILTETTKNAGKRTADGSEFEKRTADGSEFESPKKKAKVE

SEQ ID NO: 6176 - protein, 2141 aa, synthetic construct
MPAAKRVKLDGGDKKYSIGLDIGTNSVGWAVITDEYKVPSKKFKVLGNTDRHSIKKNLIGALLFDSGETAEATRLKRTARRRYTRRKNRICYLQEIFSNEMAKVDDSFFHRLEESFLVEEDKKHERHPIFGNIVDEVAYHEKYPTIYHLRKKLVDSTDKADLRLIYLALAHMIKFRGHFLIEGDLNPDNSDVDKLFIQLVQTYNQLFEENPINASGVDAKAILSARLSKSRRLENLIAQLPGEKKNGLFGNLIALSLGLTPNFKSNFDLAEDAKLQLSKDTYDDDLDNLLAQIGDQYADLFLAAKNLSDAILLSDILRVNTEITKAPLSASMIKRYDEHHQDLTLLKALVRQQLPEKYKEIFFDQSKNGYAGYIDGGASQEEFYKFIKPILEKMDGTEELLVKLNREDLLRKQRTFDNGSIPHQIHLGELHAILRRQEDFYPFLKDNREKIEKILTFRIPYYVGPLARGNSRFAWMTRKSEETITPWNFEEVVDKGASAQSFIERMTNFDKNLPNEKVLPKHSLLYEYFTVYNELTKVKYVTEGMRKPAFLSGEQKKAIVDLLFKTNRKVTVKQLKEDYFKKIECFDSVEISGVEDRFNASLGTYHDLLKIIKDKDFLDNEENEDILEDIVLTLTLFEDREMIEERLKTYAHLFDDKVMKQLKRRRYTGWGRLSRKLINGIRDKQSGKTILDFLKSDGFANRNFMQLIHDDSLTFKEDIQKAQVSGQGDSLHEHIANLAGSPAIKKGILQTVKVVDELVKVMGRHKPENIVIEMARENQTTQKGQKNSRERMKRIEEGIKELGSQILKEHPVENTQLQNEKLYLYYLQNGRDMYVDQELDINRLSDYDVDHIVPQSFLKDDSIDNKVLTRSDKARGKSDNVPSEEVVKKMKNYWRQLLNAKLITQRKFDNLTKAERGGLSELDKAGFIKRQLVETRQITKHVAQILDSRMNTKYDENDKLIREVKVITLKSKLVSDFRKDFQFYKVREINNYHHAHDAYLNAVVGTALIKKYPKLESEFVYGDYKVYDVRKMIAKSEQEIGKATAKYFFYSNIMNFFKTEITLANGEIRKRPLIETNGETGEIVWDKGRDFATVRKVLSMPQVNIVKKTEVQTGGFSKESILPKRNSDKLIARKKDWDPKKYGGFDSPTVAYSVLVVAKVEKGKSKKLKSVKELLGITIMERSSFEKNPIDFLEAKGYKEVKKDLIIKLPKYSLFELENGRKRMLASAGELQKGNELALPSKYVNFLYLASHYEKLKGSPEDNEQKQLFVEQHKHYLDEIIEQISEFSKRVILADANLDKVLSAYNKHRDKPIREQAENIIHLFTLTNLGAPAAFKYFDTTIDRKRYTSTKEVLDATLIHQSITGLYETRIDLSQLGGDGGGGGGSGGGGSGGGGSGGGGSGGGGSGGLLGRDLLTKLKAQIQFSTEGPQVTWEDRPAMCLVLNLEEEYRLHEKPVPPSIDPSWLQLFPMVWAEKAGMGLANQVPPVVVELKSDASPVAVRQYPMSKEAREGIRPHIQRFLDLGILVPCQSPWNTPLLPVKKPGTNDYRPVQDLREVNKRVQDIHPTVPNPYNLLSSLPPSHTWYSVLDLKDAFFCLKLHPNSQPLFAFEWRDPEKGNTGQLTWTRLPQGFKNSPTLFNEALHRDLASFRALNPQVVMLQYVDDLLVAAPTYRDCKEGTRRLLQELSKLGYRVSAKKAQLCREEVTYLGYLLKGGKRWLTPARKATVMKIPTPTTPRQVREFLGKAGFCRLFIPGFASLAAPLYPLTRPKVPFTWTEAHQEAFGRIKEALLSAPALALPDLTKPFALYVDEKEGVARGVLTQTLGPWRRPVAYLSKKLDPVASGWPTCLKAIAAVALLLKDADKLTLGQNVLVIAPHNLESIVRQPPDRWMTNARMTHYQSLLLNERVSFAPPAILNPATLLPVESDDTPIHICSEILAEETGTRPDLRDQPLPGVPAWYTDGSSFIMDGRRQAGAAIVDNKRTVWASNLPEGTSAQKAELIALTQALRLAEGKSINIYTDSRYAFATAHVHGAIYKQRGWLTSAGKDIKNKEEILALLEAIHLPKRVAIIHCPGHQRGTDPVATGNRKADEAAKQAAQSTRILTETTKNAGKRTADGSEFEKRTADGSEFESPKKKAKVE

SEQ ID NO: 6177 - protein, 2232 aa, synthetic construct
MPAAKRVKLDGGDKKYSIGLDIGTNSVGWAVITDEYKVPSKKFKVLGNTDRHSIKKNLIGALLFDSGETAEATRLKRTARRRYTRRKNRICYLQEIFSNEMAKVDDSFFHRLEESFLVEEDKKHERHPIFGNIVDEVAYHEKYPTIYHLRKKLVDSTDKADLRLIYLALAHMIKFRGHFLIEGDLNPDNSDVDKLFIQLVQTYNQLFEENPINASGVDAKAILSARLSKSRRLENLIAQLPGEKKNGLFGNLIALSLGLTPNFKSNFDLAEDAKLQLSKDTYDDDLDNLLAQIGDQYADLFLAAKNLSDAILLSDILRVNTEITKAPLSASMIKRYDEHHQDLTLLKALVRQQLPEKYKEIFFDQSKNGYAGYIDGGASQEEFYKFIKPILEKMDGTEELLVKLNREDLLRKQRTFDNGSIPHQIHLGELHAILRRQEDFYPFLKDNREKIEKILTFRIPYYVGPLARGNSRFAWMTRKSEETITPWNFEEVVDKGASAQSFIERMTNFDKNLPNEKVLPKHSLLYEYFTVYNELTKVKYVTEGMRKPAFLSGEQKKAIVDLLFKTNRKVTVKQLKEDYFKKIECFDSVEISGVEDRFNASLGTYHDLLKIIKDKDFLDNEENEDILEDIVLTLTLFEDREMIEERLKTYAHLFDDKVMKQLKRRRYTGWGRLSRKLINGIRDKQSGKTILDFLKSDGFANRNFMQLIHDDSLTFKEDIQKAQVSGQGDSLHEHIANLAGSPAIKKGILQTVKVVDELVKVMGRHKPENIVIEMARENQTTQKGQKNSRERMKRIEEGIKELGSQILKEHPVENTQLQNEKLYLYYLQNGRDMYVDQELDINRLSDYDVDHIVPQSFLKDDSIDNKVLTRSDKARGKSDNVPSEEVVKKMKNYWRQLLNAKLITQRKFDNLTKAERGGLSELDKAGFIKRQLVETRQITKHVAQILDSRMNTKYDENDKLIREVKVITLKSKLVSDFRKDFQFYKVREINNYHHAHDAYLNAVVGTALIKKYPKLESEFVYGDYKVYDVRKMIAKSEQEIGKATAKYFFYSNIMNFFKTEITLANGEIRKRPLIETNGETGEIVWDKGRDFATVRKVLSMPQVNIVKKTEVQTGGFSKESILPKRNSDKLIARKKDWDPKKYGGFDSPTVAYSVLVVAKVEKGKSKKLKSVKELLGITIMERSSFEKNPIDFLEAKGYKEVKKDLIIKLPKYSLFELENGRKRMLASAGELQKGNELALPSKYVNFLYLASHYEKLKGSPEDNEQKQLFVEQHKHYLDEIIEQISEFSKRVILADANLDKVLSAYNKHRDKPIREQAENIIHLFTLTNLGAPAAFKYFDTTIDRKRYTSTKEVLDATLIHQSITGLYETRIDLSQLGGDGGGGGGSGGGGSGGGGSGGGGSGGGGSGGTLGDQGSRGSDPLPEPRVTLTVEGIPTEFLVNTGAEHSVLTKPMGKMGSKRTVVAGATGSKVYPWTTKRLLKIGQKQVTHSFLVIPECPAPLLGRDLLTKLKAQIQFSTEGPQVTWEDRPAMCLVLNLEEEYRLHEKPVPPSIDPSWLQLFPMVWAEKAGMGLANQVPPVVVELKSDASPVAVRQYPMSKEAREGIRPHIQRFLDLGILVPCQSPWNTPLLPVKKPGTNDYRPVQDLREVNKRVQDIHPTVPNPYNLLSSLPPSHTWYSVLDLKDAFFCLKLHPNSQPLFAFEWRDPEKGNTGQLTWTRLPQGFKNSPTLFNEALHRDLASFRALNPQVVMLQYVDDLLVAAPTYRDCKEGTRRLLQELSKLGYRVSAKKAQLCREEVTYLGYLLKGGKRWLTPARKATVMKIPTPTTPRQVREFLGTAGFCRLWIPGFASLAAPLYPLTRPKVPFTWTEAHQEAFGRIKEALLSAPALALPDLTKPFALYVDEKEGVARGVLTQTLGPWRRPVAYLSKKLDPVASGWPTCLKAIAAVALLLKDADKLTLGQNVLVIAPHNLESIVRQPPDRWMTNARMTHYQSLLLNERVSFAPPAILNPATLLPVESDDTPIHICSEILAEETGTRPDLRDQPLPGVPAWYTDGSSFIMDGRRQAGAAIVDNKRTVWASNLPEGTSAQKAELIALTQALRLAEGKSINIYTDSRYAFATAHVHGAIYKQRGWLTSAGKDIKNKEEILALLEAIHLPKRVAIIHCPGHQRGTDPVATGNRKADEAAKQAAQSTRILTETTKNAGKRTADGSEFEKRTADGSEFESPKKKAKVE

SEQ ID NO: 6178 - protein, 2110 aa, synthetic construct
MPAAKRVKLDGGDKKYSIGLDIGTNSVGWAVITDEYKVPSKKFKVLGNTDRHSIKKNLIGALLFDSGETAEATRLKRTARRRYTRRKNRICYLQEIFSNEMAKVDDSFFHRLEESFLVEEDKKHERHPIFGNIVDEVAYHEKYPTIYHLRKKLVDSTDKADLRLIYLALAHMIKFRGHFLIEGDLNPDNSDVDKLFIQLVQTYNQLFEENPINASGVDAKAILSARLSKSRRLENLIAQLPGEKKNGLFGNLIALSLGLTPNFKSNFDLAEDAKLQLSKDTYDDDLDNLLAQIGDQYADLFLAAKNLSDAILLSDILRVNTEITKAPLSASMIKRYDEHHQDLTLLKALVRQQLPEKYKEIFFDQSKNGYAGYIDGGASQEEFYKFIKPILEKMDGTEELLVKLNREDLLRKQRTFDNGSIPHQIHLGELHAILRRQEDFYPFLKDNREKIEKILTFRIPYYVGPLARGNSRFAWMTRKSEETITPWNFEEVVDKGASAQSFIERMTNFDKNLPNEKVLPKHSLLYEYFTVYNELTKVKYVTEGMRKPAFLSGEQKKAIVDLLFKTNRKVTVKQLKEDYFKKIECFDSVEISGVEDRFNASLGTYHDLLKIIKDKDFLDNEENEDILEDIVLTLTLFEDREMIEERLKTYAHLFDDKVMKQLKRRRYTGWGRLSRKLINGIRDKQSGKTILDFLKSDGFANRNFMQLIHDDSLTFKEDIQKAQVSGQGDSLHEHIANLAGSPAIKKGILQTVKVVDELVKVMGRHKPENIVIEMARENQTTQKGQKNSRERMKRIEEGIKELGSQILKEHPVENTQLQNEKLYLYYLQNGRDMYVDQELDINRLSDYDVDHIVPQSFLKDDSIDNKVLTRSDKARGKSDNVPSEEVVKKMKNYWRQLLNAKLITQRKFDNLTKAERGGLSELDKAGFIKRQLVETRQITKHVAQILDSRMNTKYDENDKLIREVKVITLKSKLVSDFRKDFQFYKVREINNYHHAHDAYLNAVVGTALIKKYPKLESEFVYGDYKVYDVRKMIAKSEQEIGKATAKYFFYSNIMNFFKTEITLANGEIRKRPLIETNGETGEIVWDKGRDFATVRKVLSMPQVNIVKKTEVQTGGFSKESILPKRNSDKLIARKKDWDPKKYGGFDSPTVAYSVLVVAKVEKGKSKKLKSVKELLGITIMERSSFEKNPIDFLEAKGYKEVKKDLIIKLPKYSLFELENGRKRMLASAGELQKGNELALPSKYVNFLYLASHYEKLKGSPEDNEQKQLFVEQHKHYLDEIIEQISEFSKRVILADANLDKVLSAYNKHRDKPIREQAENIIHLFTLTNLGAPAAFKYFDTTIDRKRYTSTKEVLDATLIHQSITGLYETRIDLSQLGGDGGGGGGSGGGGSGGGGSGGGGSGGGGSGGTLNLEDEYRLYETSAEPEVSPGSTWLSDFPQAWAETGGMGLAVRQAPLIIPLKATSTPVSIKQYPMSQEAKLGIKPHIQRLLDQGILVPCQSPWNTPLLPVKKPGTNDYRPVQDLREVNKRVEDIHPTVPNPYNLLSGLPPSHRWYTVLDLKDAFFCLRLHPTSQPLFAFEWRDPGMGISGQLTWTRLPQGFKNSPTLFNEALHRDLADFRIQHPDLILLQYVDDILLAATSELDCQQGTRALLLTLGNLGYRASAKKAQLCQKQVKYLGYLLKEGQRWLTEARKETVMGQPTPKTPRQLREFLGKAGFCRLFIPGFAEMAAPLYPLTKPGTLFNWGPDQQKAYQEIKQALLTAPALGLPDLTKPFELFVDEKQGYAKGVLTQKLGPWRRPVAYLSKKLDPVAAGWPPCLRMVAAIAVLRKDAGKLTMGQPLVILAPHAVEALVKQPPDRWLSNARMTHYQAMLLDTDRVQFGPVVALNPATLLPLPEEGAPHDCLEILAETHGTRPDLTDQPIPDADHTWYTDGSSFLQEGQRKAGAAVTTETEVIWARALPAGTSAQRAELIALTQALKMAEGKRLNVYTDSRYAFATAHIHGEIYRRRGWLTSEGREIKNKSEILALLKALFLPKRLSIIHCLGHQKGDSAEARGNRLADQAAREAAIKTPPDTSTLLAGKRTADGSEFEKRTADGSEFESPKKKAKVE

SEQ ID NO: 6179 - protein, 2110 aa, synthetic construct
MPAAKRVKLDGGDKKYSIGLDIGTNSVGWAVITDEYKVPSKKFKVLGNTDRHSIKKNLIGALLFDSGETAEATRLKRTARRRYTRRKNRICYLQEIFSNEMAKVDDSFFHRLEESFLVEEDKKHERHPIFGNIVDEVAYHEKYPTIYHLRKKLVDSTDKADLRLIYLALAHMIKFRGHFLIEGDLNPDNSDVDKLFIQLVQTYNQLFEENPINASGVDAKAILSARLSKSRRLENLIAQLPGEKKNGLFGNLIALSLGLTPNFKSNFDLAEDAKLQLSKDTYDDDLDNLLAQIGDQYADLFLAAKNLSDAILLSDILRVNTEITKAPLSASMIKRYDEHHQDLTLLKALVRQQLPEKYKEIFFDQSKNGYAGYIDGGASQEEFYKFIKPILEKMDGTEELLVKLNREDLLRKQRTFDNGSIPHQIHLGELHAILRRQEDFYPFLKDNREKIEKILTFRIPYYVGPLARGNSRFAWMTRKSEETITPWNFEEVVDKGASAQSFIERMTNFDKNLPNEKVLPKHSLLYEYFTVYNELTKVKYVTEGMRKPAFLSGEQKKAIVDLLFKTNRKVTVKQLKEDYFKKIECFDSVEISGVEDRFNASLGTYHDLLKIIKDKDFLDNEENEDILEDIVLTLTLFEDREMIEERLKTYAHLFDDKVMKQLKRRRYTGWGRLSRKLINGIRDKQSGKTILDFLKSDGFANRNFMQLIHDDSLTFKEDIQKAQVSGQGDSLHEHIANLAGSPAIKKGILQTVKVVDELVKVMGRHKPENIVIEMARENQTTQKGQKNSRERMKRIEEGIKELGSQILKEHPVENTQLQNEKLYLYYLQNGRDMYVDQELDINRLSDYDVDHIVPQSFLKDDSIDNKVLTRSDKARGKSDNVPSEEVVKKMKNYWRQLLNAKLITQRKFDNLTKAERGGLSELDKAGFIKRQLVETRQITKHVAQILDSRMNTKYDENDKLIREVKVITLKSKLVSDFRKDFQFYKVREINNYHHAHDAYLNAVVGTALIKKYPKLESEFVYGDYKVYDVRKMIAKSEQEIGKATAKYFFYSNIMNFFKTEITLANGEIRKRPLIETNGETGEIVWDKGRDFATVRKVLSMPQVNIVKKTEVQTGGFSKESILPKRNSDKLIARKKDWDPKKYGGFDSPTVAYSVLVVAKVEKGKSKKLKSVKELLGITIMERSSFEKNPIDFLEAKGYKEVKKDLIIKLPKYSLFELENGRKRMLASAGELQKGNELALPSKYVNFLYLASHYEKLKGSPEDNEQKQLFVEQHKHYLDEIIEQISEFSKRVILADANLDKVLSAYNKHRDKPIREQAENIIHLFTLTNLGAPAAFKYFDTTIDRKRYTSTKEVLDATLIHQSITGLYETRIDLSQLGGDGGGGGGSGGGGSGGGGSGGGGSGGGGSGGTLNIEDEYRLHETSKGPDVPLGSTWLSDFPQAWAETGGMGLAFRQAPLIISLKATSTPVSIKQYPMSQEARLGIKPHIQRLLDQGILVPCQSPWNTPLLPVKKPGTNDYRPVQDLREVNKRVEDIHPTVPNPYNLLSGLPPSHQWYTVLDLKDAFFCLRLHPTSQSLFAFEWKDPEMGISGQLTWTRLPQGFKNSPTLFNEALHRDLADFRIQHPDLILLQYVDDLLLAATSELDCQQGTRALLQTLGDLGYRASAKKAQICQKQVKYLGYLLKEGQRWLTEARKETVMGQPTPKTPRQLREFLGTAGLCRLWIPGFAEMAAPLYPLTKPGTLFKWGPDQQKAYQEIKQALLTAPALGLPDLTKPFELFVDEKQGYAKGVLTQKLGPWRRPVAYLSKKLDPVAAGWPPCLRMVAAIAVLTKDVGKLTMGQPLVILAPHAVEALVKQPPDRWLSNARMTHYQALLLDTDRVQFGPIVALNPATLLPLPEEGLQHDCLDILAEAHGTRPDLTDQPLPDADHTWYTDGSSFLQEGQRRAGAAVTTETEVIWAKALPAGTSAQRAELIALTQALKMAAGKKLNVYTDSRYAFATAHIHGEIYRRRGWLTSEGKEIKNKDEILALLKALFLPKRLSIIHCPGHQKGNHAEARGNRMADQAAREVATRETPETSTLLAGKRTADGSEFEKRTADGSEFESPKKKAKVE

SEQ ID NO: 6180 - protein, 2110 aa, synthetic construct
MPAAKRVKLDGGDKKYSIGLDIGTNSVGWAVITDEYKVPSKKFKVLGNTDRHSIKKNLIGALLFDSGETAEATRLKRTARRRYTRRKNRICYLQEIFSNEMAKVDDSFFHRLEESFLVEEDKKHERHPIFGNIVDEVAYHEKYPTIYHLRKKLVDSTDKADLRLIYLALAHMIKFRGHFLIEGDLNPDNSDVDKLFIQLVQTYNQLFEENPINASGVDAKAILSARLSKSRRLENLIAQLPGEKKNGLFGNLIALSLGLTPNFKSNFDLAEDAKLQLSKDTYDDDLDNLLAQIGDQYADLFLAAKNLSDAILLSDILRVNTEITKAPLSASMIKRYDEHHQDLTLLKALVRQQLPEKYKEIFFDQSKNGYAGYIDGGASQEEFYKFIKPILEKMDGTEELLVKLNREDLLRKQRTFDNGSIPHQIHLGELHAILRRQEDFYPFLKDNREKIEKILTFRIPYYVGPLARGNSRFAWMTRKSEETITPWNFEEVVDKGASAQSFIERMTNFDKNLPNEKVLPKHSLLYEYFTVYNELTKVKYVTEGMRKPAFLSGEQKKAIVDLLFKTNRKVTVKQLKEDYFKKIECFDSVEISGVEDRFNASLGTYHDLLKIIKDKDFLDNEENEDILEDIVLTLTLFEDREMIEERLKTYAHLFDDKVMKQLKRRRYTGWGRLSRKLINGIRDKQSGKTILDFLKSDGFANRNFMQLIHDDSLTFKEDIQKAQVSGQGDSLHEHIANLAGSPAIKKGILQTVKVVDELVKVMGRHKPENIVIEMARENQTTQKGQKNSRERMKRIEEGIKELGSQILKEHPVENTQLQNEKLYLYYLQNGRDMYVDQELDINRLSDYDVDHIVPQSFLKDDSIDNKVLTRSDKARGKSDNVPSEEVVKKMKNYWRQLLNAKLITQRKFDNLTKAERGGLSELDKAGFIKRQLVETRQITKHVAQILDSRMNTKYDENDKLIREVKVITLKSKLVSDFRKDFQFYKVREINNYHHAHDAYLNAVVGTALIKKYPKLESEFVYGDYKVYDVRKMIAKSEQEIGKATAKYFFYSNIMNFFKTEITLANGEIRKRPLIETNGETGEIVWDKGRDFATVRKVLSMPQVNIVKKTEVQTGGFSKESILPKRNSDKLIARKKDWDPKKYGGFDSPTVAYSVLVVAKVEKGKSKKLKSVKELLGITIMERSSFEKNPIDFLEAKGYKEVKKDLIIKLPKYSLFELENGRKRMLASAGELQKGNELALPSKYVNFLYLASHYEKLKGSPEDNEQKQLFVEQHKHYLDEIIEQISEFSKRVILADANLDKVLSAYNKHRDKPIREQAENIIHLFTLTNLGAPAAFKYFDTTIDRKRYTSTKEVLDATLIHQSITGLYETRIDLSQLGGDGGGGGGSGGGGSGGGGSGGGGSGGGGSGGTLNIEDEHRLHETSKEPDVSLGSTWLSDFPQAWAETGGMGLAVRQAPLIIPLKATSTPVSIKQYPMSQEARLGIKPHIQRLLDQGILVPCQSPWNTPLLPVKKPGTNDYRPVQDLREVNKRVEDIHPTVPNPYNLLSGLPPSHQWYTVLDLKDAFFCLRLHPTSQPLFAFEWRDPEMGISGQLTWTRLPQGFKNSPTLFNEALHRDLADFRIQHPDLILLQYVDDLLLAATSELDCQQGTRALLQTLGNLGYRASAKKAQICQKQVKYLGYLLKEGQRWLTEARKETVMGQPTPKTPRQLREFLGTAGFCRLWIPGFAEMAAPLYPLTKPGTLFNWGPDQQKAYQEIKQALLTAPALGLPDLTKPFELFVDEKQGYAKGVLTQKLGPWRRPVAYLSKKLDPVAAGWPPCLRMVAAIAVLTKDAGKLTMGQPLVILAPHAVEALVKQPPDRWLSNARMTHYQALLLDTDRVQFGPVVALNPATLLPLPEEGLQHNCLDILAEAHGTRPDLTDQPLPDADHTWYTDGSSLLQEGQRKAGAAVTTETEVIWAKALPAGTSAQRAELIALTQALKMAEGKKLNVYTDSRYAFATAHIHGEIYRRRGWLTSEGKEIKNKDEILALLKALFLPKRLSIIHCPGHQKGHSAEARGNRMADQAARKAAITETPDTSTLLAGKRTADGSEFEKRTADGSEFESPKKKAKVE

SEQ ID NO: 6181 - protein, 2110 aa, synthetic construct; identical to SEQ ID NO: 4504

SEQ ID NO: 6182 - protein, 2110 aa, synthetic construct; identical to SEQ ID NO: 6180

SEQ ID NO: 6183 - protein, 2110 aa, synthetic construct; identical to SEQ ID NO: 4504

SEQ ID NO: 6184 - protein, 2130 aa, synthetic construct
MPAAKRVKLDGGDKKYSIGLDIGTNSVGWAVITDEYKVPSKKFKVLGNTDRHSIKKNLIGALLFDSGETAEATRLKRTARRRYTRRKNRICYLQEIFSNEMAKVDDSFFHRLEESFLVEEDKKHERHPIFGNIVDEVAYHEKYPTIYHLRKKLVDSTDKADLRLIYLALAHMIKFRGHFLIEGDLNPDNSDVDKLFIQLVQTYNQLFEENPINASGVDAKAILSARLSKSRRLENLIAQLPGEKKNGLFGNLIALSLGLTPNFKSNFDLAEDAKLQLSKDTYDDDLDNLLAQIGDQYADLFLAAKNLSDAILLSDILRVNTEITKAPLSASMIKRYDEHHQDLTLLKALVRQQLPEKYKEIFFDQSKNGYAGYIDGGASQEEFYKFIKPILEKMDGTEELLVKLNREDLLRKQRTFDNGSIPHQIHLGELHAILRRQEDFYPFLKDNREKIEKILTFRIPYYVGPLARGNSRFAWMTRKSEETITPWNFEEVVDKGASAQSFIERMTNFDKNLPNEKVLPKHSLLYEYFTVYNELTKVKYVTEGMRKPAFLSGEQKKAIVDLLFKTNRKVTVKQLKEDYFKKIECFDSVEISGVEDRFNASLGTYHDLLKIIKDKDFLDNEENEDILEDIVLTLTLFEDREMIEERLKTYAHLFDDKVMKQLKRRRYTGWGRLSRKLINGIRDKQSGKTILDFLKSDGFANRNFMQLIHDDSLTFKEDIQKAQVSGQGDSLHEHIANLAGSPAIKKGILQTVKVVDELVKVMGRHKPENIVIEMARENQTTQKGQKNSRERMKRIEEGIKELGSQILKEHPVENTQLQNEKLYLYYLQNGRDMYVDQELDINRLSDYDVDHIVPQSFLKDDSIDNKVLTRSDKARGKSDNVPSEEVVKKMKNYWRQLLNAKLITQRKFDNLTKAERGGLSELDKAGFIKRQLVETRQITKHVAQILDSRMNTKYDENDKLIREVKVITLKSKLVSDFRKDFQFYKVREINNYHHAHDAYLNAVVGTALIKKYPKLESEFVYGDYKVYDVRKMIAKSEQEIGKATAKYFFYSNIMNFFKTEITLANGEIRKRPLIETNGETGEIVWDKGRDFATVRKVLSMPQVNIVKKTEVQTGGFSKESILPKRNSDKLIARKKDWDPKKYGGFDSPTVAYSVLVVAKVEKGKSKKLKSVKELLGITIMERSSFEKNPIDFLEAKGYKEVKKDLIIKLPKYSLFELENGRKRMLASAGELQKGNELALPSKYVNFLYLASHYEKLKGSPEDNEQKQLFVEQHKHYLDEIIEQISEFSKRVILADANLDKVLSAYNKHRDKPIREQAENIIHLFTLTNLGAPAAFKYFDTTIDRKRYTSTKEVLDATLIHQSITGLYETRIDLSQLGGDGGGGGGSGGGGSGGGGSGGGGSGGGGSGGVQEISDSRPMLHIYLNGRRFLGLLDTGADKTCIAGRDWPANWPIHQTESSLQGLGMACGVARSSQPLRWQHEDKSGIIHPFVIPTLPFTLWGRDIMKDIKVRLMTDSPDDSQDLMIGAIESNLFADQISWKSDQPVWLNQWPLKQEKLQALQQLVTEQLQLGHLEESNSPWNTPVFVIKKKSGKWRLLQDLRAVNATMHDMGALQPGLPSPVAVPKGWEIIIIDLQDCFFNIKLHPEDCKRFAFSVPSPNFKRPYQRFQWKVLPQGMKNSPTLCQKFVDKAILTVRDKYQDSYIVHYMDDILLAHPSRSIVDEILTSMIQALNKHGLVVSTEKIQKYDNLKYLGTHIQGDSVSYQKLQIRTDKLRTLNDFQKLLGNINWIRPFLKLTTGELKPLFEILNGDSNPISTRKLTPEACKALQLMNERLSTARVKRLDLSQPWSLCILKTEYTPTACLWQDGVVEWIHLPHISPKVITPYDIFCTQLIIKGRHRSKELFSKDPDYIVVPYTKVQFDLLLQEKEDWPISLLGFLGEVHFHLPKDPLLTFTLQTAIIFPHMTSTTPLEKGIVIFTDGSANGRSVTYIQGREPIIKENTQNTAQQAEIVAVITAFEEVSQPFNLYTDSKYVTGLFPEIETATLSPRTKIYTELKHLQRLIHKRQEKFYIGHIRGHTGLPGPLAQGNAYADSLTRILTAAGKRTADGSEFEKRTADGSEFESPKKKAKVE

SEQ ID NO: 6185 - protein, 2130 aa, synthetic construct
MPAAKRVKLDGGDKKYSIGLDIGTNSVGWAVITDEYKVPSKKFKVLGNTDRHSIKKNLIGALLFDSGETAEATRLKRTARRRYTRRKNRICYLQEIFSNEMAKVDDSFFHRLEESFLVEEDKKHERHPIFGNIVDEVAYHEKYPTIYHLRKKLVDSTDKADLRLIYLALAHMIKFRGHFLIEGDLNPDNSDVDKLFIQLVQTYNQLFEENPINASGVDAKAILSARLSKSRRLENLIAQLPGEKKNGLFGNLIALSLGLTPNFKSNFDLAEDAKLQLSKDTYDDDLDNLLAQIGDQYADLFLAAKNLSDAILLSDILRVNTEITKAPLSASMIKRYDEHHQDLTLLKALVRQQLPEKYKEIFFDQSKNGYAGYIDGGASQEEFYKFIKPILEKMDGTEELLVKLNREDLLRKQRTFDNGSIPHQIHLGELHAILRRQEDFYPFLKDNREKIEKILTFRIPYYVGPLARGNSRFAWMTRKSEETITPWNFEEVVDKGASAQSFIERMTNFDKNLPNEKVLPKHSLLYEYFTVYNELTKVKYVTEGMRKPAFLSGEQKKAIVDLLFKTNRKVTVKQLKEDYFKKIECFDSVEISGVEDRFNASLGTYHDLLKIIKDKDFLDNEENEDILEDIVLTLTLFEDREMIEERLKTYAHLFDDKVMKQLKRRRYTGWGRLSRKLINGIRDKQSGKTILDFLKSDGFANRNFMQLIHDDSLTFKEDIQKAQVSGQGDSLHEHIANLAGSPAIKKGILQTVKVVDELVKVMGRHKPENIVIEMARENQTTQKGQKNSRERMKRIEEGIKELGSQILKEHPVENTQLQNEKLYLYYLQNGRDMYVDQELDINRLSDYDVDHIVPQSFLKDDSIDNKVLTRSDKARGKSDNVPSEEVVKKMKNYWRQLLNAKLITQRKFDNLTKAERGGLSELDKAGFIKRQLVETRQITKHVAQILDSRMNTKYDENDKLIREVKVITLKSKLVSDFRKDFQFYKVREINNYHHAHDAYLNAVVGTALIKKYPKLESEFVYGDYKVYDVRKMIAKSEQEIGKATAKYFFYSNIMNFFKTEITLANGEIRKRPLIETNGETGEIVWDKGRDFATVRKVLSMPQVNIVKKTEVQTGGFSKESILPKRNSDKLIARKKDWDPKKYGGFDSPTVAYSVLVVAKVEKGKSKKLKSVKELLGITIMERSSFEKNPIDFLEAKGYKEVKKDLIIKLPKYSLFELENGRKRMLASAGELQKGNELALPSKYVNFLYLASHYEKLKGSPEDNEQKQLFVEQHKHYLDEIIEQISEFSKRVILADANLDKVLSAYNKHRDKPIREQAENIIHLFTLTNLGAPAAFKYFDTTIDRKRYTSTKEVLDATLIHQSITGLYETRIDLSQLGGDGGGGGGSGGGGSGGGGSGGGGSGGGGSGGWVQEISDSRPMLHIYLNGRRFLGLLNTGADKTCIAGRDWPANWPIHQTESSLQGLGMACGVARSSQPLRWQHEDKSGIIHPFVIPTLPFTLWGRDIMKDIKVRLMTDSPDDSQDLMIGAIESNLFADQISWKSDQPVWLNQWPLKQEKLQALQQLVTEQLQLGHLEESNSPWNTPVFVIKKKSGKWRLLQDLRAVNATMHDMGALQPGLPSPVAVPKGWEIIIIDLQDCFFNIKLHPEDCKRFAFSVPSPNFKRPYQRFQWKVLPQGMKNSPTLCQKFVDKAILTVRDKYQDSYIVHYMDDILLAHPSRSIVDEILTSMIQALNKHGLVVSTEKIQKYDNLKYLGTHIQGDSVSYQKLQIRTDKLRTLNDFQKLLGNINWIRPFLKLTTGELKPLFEILNGDSNPISTRKLTPEACKALQLMNERLSTARVKRLDLSQPWSLCILKTEYTPTACLWQDGVVEWIHLPHISPKVITPYDIFCTQLIIKGRHRSKELFSKDPDYIVVPYTKVQFDLLLQEKEDWPISLLGFLGEVHFHLPKDPLLTFTLQTAIIFPHMTSTTPLEKGIVIFTDGSANGRSVTYIQGREPIIKENTQNTAQQAEIVAVITAFEEVSQPFNLYTDSKYVTGLFPEIETATLSPRTKIYTELKHLQRLIHKRQEKFYIGHIRGHTGLPGPLAQGNAYADSLTRILTAGKRTADGSEFEKRTADGSEFESPKKKAKVE

SEQ ID NO: 6186 - protein, 2130 aa, synthetic construct; identical to SEQ ID NO: 6185

SEQ ID NO: 6187 - protein, 2038 aa, synthetic construct
MPAAKRVKLDGGDKKYSIGLDIGTNSVGWAVITDEYKVPSKKFKVLGNTDRHSIKKNLIGALLFDSGETAEATRLKRTARRRYTRRKNRICYLQEIFSNEMAKVDDSFFHRLEESFLVEEDKKHERHPIFGNIVDEVAYHEKYPTIYHLRKKLVDSTDKADLRLIYLALAHMIKFRGHFLIEGDLNPDNSDVDKLFIQLVQTYNQLFEENPINASGVDAKAILSARLSKSRRLENLIAQLPGEKKNGLFGNLIALSLGLTPNFKSNFDLAEDAKLQLSKDTYDDDLDNLLAQIGDQYADLFLAAKNLSDAILLSDILRVNTEITKAPLSASMIKRYDEHHQDLTLLKALVRQQLPEKYKEIFFDQSKNGYAGYIDGGASQEEFYKFIKPILEKMDGTEELLVKLNREDLLRKQRTFDNGSIPHQIHLGELHAILRRQEDFYPFLKDNREKIEKILTFRIPYYVGPLARGNSRFAWMTRKSEETITPWNFEEVVDKGASAQSFIERMTNFDKNLPNEKVLPKHSLLYEYFTVYNELTKVKYVTEGMRKPAFLSGEQKKAIVDLLFKTNRKVTVKQLKEDYFKKIECFDSVEISGVEDRFNASLGTYHDLLKIIKDKDFLDNEENEDILEDIVLTLTLFEDREMIEERLKTYAHLFDDKVMKQLKRRRYTGWGRLSRKLINGIRDKQSGKTILDFLKSDGFANRNFMQLIHDDSLTFKEDIQKAQVSGQGDSLHEHIANLAGSPAIKKGILQTVKVVDELVKVMGRHKPENIVIEMARENQTTQKGQKNSRERMKRIEEGIKELGSQILKEHPVENTQLQNEKLYLYYLQNGRDMYVDQELDINRLSDYDVDHIVPQSFLKDDSIDNKVLTRSDKARGKSDNVPSEEVVKKMKNYWRQLLNAKLITQRKFDNLTKAERGGLSELDKAGFIKRQLVETRQITKHVAQILDSRMNTKYDENDKLIREVKVITLKSKLVSDFRKDFQFYKVREINNYHHAHDAYLNAVVGTALIKKYPKLESEFVYGDYKVYDVRKMIAKSEQEIGKATAKYFFYSNIMNFFKTEITLANGEIRKRPLIETNGETGEIVWDKGRDFATVRKVLSMPQVNIVKKTEVQTGGFSKESILPKRNSDKLIARKKDWDPKKYGGFDSPTVAYSVLVVAKVEKGKSKKLKSVKELLGITIMERSSFEKNPIDFLEAKGYKEVKKDLIIKLPKYSLFELENGRKRMLASAGELQKGNELALPSKYVNFLYLASHYEKLKGSPEDNEQKQLFVEQHKHYLDEIIEQISEFSKRVILADANLDKVLSAYNKHRDKPIREQAENIIHLFTLTNLGAPAAFKYFDTTIDRKRYTSTKEVLDATLIHQSITGLYETRIDLSQLGGDGGGGGGSGGGGSGGGGSGGGGSGGGGSGGGRDIMKDIKVRLMTDSPDDSQDLMIGAIESNLFADQISWKSDQPVWLNQWPLKQEKLQALQQLVTEQLQLGHLEESNSPWNTPVFVIKKKSGKWRLLQDLRAVNATMHDMGALQPGLPSPVAVPKGWEIIIIDLQDCFFNIKLHPEDCKRFAFSVPSPNFKRPYQRFQWKVLPQGMKNSPTLCQKFVDKAILTVRDKYQDSYIVHYMDDILLAHPSRSIVDEILTSMIQALNKHGLVVSTEKIQKYDNLKYLGTHIQGDSVSYQKLQIRTDKLRTLNDFQKLLGNINWIRPFLKLTTGELKPLFEILNGDSNPISTRKLTPEACKALQLMNERLSTARVKRLDLSQPWSLCILKTEYTPTACLWQDGVVEWIHLPHISPKVITPYDIFCTQLIIKGRHRSKELFSKDPDYIVVPYTKVQFDLLLQEKEDWPISLLGFLGEVHFHLPKDPLLTFTLQTAIIFPHMTSTTPLEKGIVIFTDGSANGRSVTYIQGREPIIKENTQNTAQQAEIVAVITAFEEVSQPFNLYTDSKYVTGLFPEIETATLSPRTKIYTELKHLQRLIHKRQEKFYIGHIRGHTGLPGPLAQGNAYADSLTRILTAGKRTADGSEFEKRTADGSEFESPKKKAKVE

SEQ ID NO: 6188 - protein, 2102 aa, synthetic construct
MPAAKRVKLDGGDKKYSIGLDIGTNSVGWAVITDEYKVPSKKFKVLGNTDRHSIKKNLIGALLFDSGETAEATRLKRTARRRYTRRKNRICYLQEIFSNEMAKVDDSFFHRLEESFLVEEDKKHERHPIFGNIVDEVAYHEKYPTIYHLRKKLVDSTDKADLRLIYLALAHMIKFRGHFLIEGDLNPDNSDVDKLFIQLVQTYNQLFEENPINASGVDAKAILSARLSKSRRLENLIAQLPGEKKNGLFGNLIALSLGLTPNFKSNFDLAEDAKLQLSKDTYDDDLDNLLAQIGDQYADLFLAAKNLSDAILLSDILRVNTEITKAPLSASMIKRYDEHHQDLTLLKALVRQQLPEKYKEIFFDQSKNGYAGYIDGGASQEEFYKFIKPILEKMDGTEELLVKLNREDLLRKQRTFDNGSIPHQIHLGELHAILRRQEDFYPFLKDNREKIEKILTFRIPYYVGPLARGNSRFAWMTRKSEETITPWNFEEVVDKGASAQSFIERMTNFDKNLPNEKVLPKHSLLYEYFTVYNELTKVKYVTEGMRKPAFLSGEQKKAIVDLLFKTNRKVTVKQLKEDYFKKIECFDSVEISGVEDRFNASLGTYHDLLKIIKDKDFLDNEENEDILEDIVLTLTLFEDREMIEERLKTYAHLFDDKVMKQLKRRRYTGWGRLSRKLINGIRDKQSGKTILDFLKSDGFANRNFMQLIHDDSLTFKEDIQKAQVSGQGDSLHEHIANLAGSPAIKKGILQTVKVVDELVKVMGRHKPENIVIEMARENQTTQKGQKNSRERMKRIEEGIKELGSQILKEHPVENTQLQNEKLYLYYLQNGRDMYVDQELDINRLSDYDVDHIVPQSFLKDDSIDNKVLTRSDKARGKSDNVPSEEVVKKMKNYWRQLLNAKLITQRKFDNLTKAERGGLSELDKAGFIKRQLVETRQITKHVAQILDSRMNTKYDENDKLIREVKVITLKSKLVSDFRKDFQFYKVREINNYHHAHDAYLNAVVGTALIKKYPKLESEFVYGDYKVYDVRKMIAKSEQEIGKATAKYFFYSNIMNFFKTEITLANGEIRKRPLIETNGETGEIVWDKGRDFATVRKVLSMPQVNIVKKTEVQTGGFSKESILPKRNSDKLIARKKDWDPKKYGGFDSPTVAYSVLVVAKVEKGKSKKLKSVKELLGITIMERSSFEKNPIDFLEAKGYKEVKKDLIIKLPKYSLFELENGRKRMLASAGELQKGNELALPSKYVNFLYLASHYEKLKGSPEDNEQKQLFVEQHKHYLDEIIEQISEFSKRVILADANLDKVLSAYNKHRDKPIREQAENIIHLFTLTNLGAPAAFKYFDTTIDRKRYTSTKEVLDATLIHQSITGLYETRIDLSQLGGDGGGGGGSGGGGSGGGGSGGGGSGGGGSGGLDDEYRLYSPLVKPDQNIQFWLEQFPQAWAETAGMGLAKQVPPQVIQLKASATPVSVRQYPLSKEAQEGIRPHVQRLIQQGILVPVQSPWNTPLLPVRKPGTNDYRPVQDLREVNKRVQDIHPTVPNPYNLLCALPPQRSWYTVLDLKDAFFCLRLHPTSQPLFAFEWRDPGTGRTGQLTWTRLPQGFKNSPTIFNEALHRDLANFRIQHPQVTLLQYVDDLLLAGATKQDCLEGTKALLLELSDLGYRASAKKAQICRREVTYLGYSLRDGQRWLTEARKKTVVQIPAPTTAKQVREFLGKAGFCRLFIPGFATLAAPLYPLTKPKGEFSWAPEHQKAFDAIKKALLSAPALALPDVTKPFTLYVDERKGVARGVLTQTLGPWRRPVAYLSKKLDPVASGWPVCLKAIAAVAILVKDADKLTLGQNITVIAPHALENIVRQPPDRWMTNARMTHYQSLLLTERVTFAPPAALNPATLLPEETDEPVTHDCHQLLIEETGVRKDLTDIPLTGEVLTWFTDGSSYVVEGKRMAGAAVVDGTRTIWASSLPEGTSAQKAELMALTQALRLAEGKSINIYTDSRYAFATAHVHGAIYKQRGWLTSAGREIKNKEEILSLLEALHLPKRLAIIHCPGHQKAKDPISRGNQMADRVAKQAAQGVNLLPAGKRTADGSEFEKRTADGSEFESPKKKAKVE

SEQ ID NO: 6189 - protein, 2104 aa, synthetic construct
MPAAKRVKLDGGDKKYSIGLDIGTNSVGWAVITDEYKVPSKKFKVLGNTDRHSIKKNLIGALLFDSGETAEATRLKRTARRRYTRRKNRICYLQEIFSNEMAKVDDSFFHRLEESFLVEEDKKHERHPIFGNIVDEVAYHEKYPTIYHLRKKLVDSTDKADLRLIYLALAHMIKFRGHFLIEGDLNPDNSDVDKLFIQLVQTYNQLFEENPINASGVDAKAILSARLSKSRRLENLIAQLPGEKKNGLFGNLIALSLGLTPNFKSNFDLAEDAKLQLSKDTYDDDLDNLLAQIGDQYADLFLAAKNLSDAILLSDILRVNTEITKAPLSASMIKRYDEHHQDLTLLKALVRQQLPEKYKEIFFDQSKNGYAGYIDGGASQEEFYKFIKPILEKMDGTEELLVKLNREDLLRKQRTFDNGSIPHQIHLGELHAILRRQEDFYPFLKDNREKIEKILTFRIPYYVGPLARGNSRFAWMTRKSEETITPWNFEEVVDKGASAQSFIERMTNFDKNLPNEKVLPKHSLLYEYFTVYNELTKVKYVTEGMRKPAFLSGEQKKAIVDLLFKTNRKVTVKQLKEDYFKKIECFDSVEISGVEDRFNASLGTYHDLLKIIKDKDFLDNEENEDILEDIVLTLTLFEDREMIEERLKTYAHLFDDKVMKQLKRRRYTGWGRLSRKLINGIRDKQSGKTILDFLKSDGFANRNFMQLIHDDSLTFKEDIQKAQVSGQGDSLHEHIANLAGSPAIKKGILQTVKVVDELVKVMGRHKPENIVIEMARENQTTQKGQKNSRERMKRIEEGIKELGSQILKEHPVENTQLQNEKLYLYYLQNGRDMYVDQELDINRLSDYDVDHIVPQSFLKDDSIDNKVLTRSDKARGKSDNVPSEEVVKKMKNYWRQLLNAKLITQRKFDNLTKAERGGLSELDKAGFIKRQLVETRQITKHVAQILDSRMNTKYDENDKLIREVKVITLKSKLVSDFRKDFQFYKVREINNYHHAHDAYLNAVVGTALIKKYPKLESEFVYGDYKVYDVRKMIAKSEQEIGKATAKYFFYSNIMNFFKTEITLANGEIRKRPLIETNGETGEIVWDKGRDFATVRKVLSMPQVNIVKKTEVQTGGFSKESILPKRNSDKLIARKKDWDPKKYGGFDSPTVAYSVLVVAKVEKGKSKKLKSVKELLGITIMERSSFEKNPIDFLEAKGYKEVKKDLIIKLPKYSLFELENGRKRMLASAGELQKGNELALPSKYVNFLYLASHYEKLKGSPEDNEQKQLFVEQHKHYLDEIIEQISEFSKRVILADANLDKVLSAYNKHRDKPIREQAENIIHLFTLTNLGAPAAFKYFDTTIDRKRYTSTKEVLDATLIHQSITGLYETRIDLSQLGGDGGGGGGSGGGGSGGGGSGGGGSGGGGSGGTLQLDDEYRLYSPLVKPDQNIQFWLEQFPQAWAETAGMGLAKQVPPQVIQLKASATPVSVRQYPLSKEAQEGIRPHVQRLIQQGILVPVQSPWNTPLLPVRKPGTNDYRPVQDLREVNKRVQDIHPTVPNPYNLLCALPPQRSWYTVLDLKDAFFCLRLHPTSQPLFAFEWRDPGTGRTGQLTWTRLPQGFKNSPTIFDEALHRDLANFRIQHPQVTLLQYVDDLLLAGATKQDCLEGTKALLLELSDLGYRASAKKAQICRREVTYLGYSLRDGQRWLTEARKKTVVQIPAPTTAKQVREFLGTAGFCRLWIPGFATLAAPLYPLTKEKGEFSWAPEHQKAFDAIKKALLSAPALALPDVTKPFTLYVDERKGVARGVLTQTLGPWRRPVAYLSKKLDPVASGWPVCLKAIAAVAILVKDADKLTLGQNITVIAPHALENIVRQPPDRWMTNARMTHYQSLLLTERVTFAPPAALNPATLLPEETDEPVTHDCHQLLIEETGVRKDLTDIPLTGEVLTWFTDGSSYVVEGKRMAGAAVVDGTRTIWASSLPEGTSAQKAELMALTQALRLAEGKSINIYTDSRYAFATAHVHGAIYKQRGLLTSAGREIKNKEEILSLLEALHLPKRLAIIHCPGHQKAKDPISRGNQMADRVAKQAAQGVNLLAGKRTADGSEFEKRTADGSEFESPKKKAKVE

SEQ ID NO: 6190 - protein, 2104 aa, synthetic construct
MPAAKRVKLDGGDKKYSIGLDIGTNSVGWAVITDEYKVPSKKFKVLGNTDRHSIKKNLIGALLFDSGETAEATRLKRTARRRYTRRKNRICYLQEIFSNEMAKVDDSFFHRLEESFLVEEDKKHERHPIFGNIVDEVAYHEKYPTIYHLRKKLVDSTDKADLRLIYLALAHMIKFRGHFLIEGDLNPDNSDVDKLFIQLVQTYNQLFEENPINASGVDAKAILSARLSKSRRLENLIAQLPGEKKNGLFGNLIALSLGLTPNFKSNFDLAEDAKLQLSKDTYDDDLDNLLAQIGDQYADLFLAAKNLSDAILLSDILRVNTEITKAPLSASMIKRYDEHHQDLTLLKALVRQQLPEKYKEIFFDQSKNGYAGYIDGGASQEEFYKFIKPILEKMDGTEELLVKLNREDLLRKQRTFDNGSIPHQIHLGELHAILRRQEDFYPFLKDNREKIEKILTFRIPYYVGPLARGNSRFAWMTRKSEETITPWNFEEVVDKGASAQSFIERMTNFDKNLPNEKVLPKHSLLYEYFTVYNELTKVKYVTEGMRKPAFLSGEQKKAIVDLLFKTNRKVTVKQLKEDYFKKIECFDSVEISGVEDRFNASLGTYHDLLKIIKDKDFLDNEENEDILEDIVLTLTLFEDREMIEERLKTYAHLFDDKVMKQLKRRRYTGWGRLSRKLINGIRDKQSGKTILDFLKSDGFANRNFMQLIHDDSLTFKEDIQKAQVSGQGDSLHEHIANLAGSPAIKKGILQTVKVVDELVKVMGRHKPENIVIEMARENQTTQKGQKNSRERMKRIEEGIKELGSQILKEHPVENTQLQNEKLYLYYLQNGRDMYVDQELDINRLSDYDVDHIVPQSFLKDDSIDNKVLTRSDKARGKSDNVPSEEVVKKMKNYWRQLLNAKLITQRKFDNLTKAERGGLSELDKAGFIKRQLVETRQITKHVAQILDSRMNTKYDENDKLIREVKVITLKSKLVSDFRKDFQFYKVREINNYHHAHDAYLNAVVGTALIKKYPKLESEFVYGDYKVYDVRKMIAKSEQEIGKATAKYFFYSNIMNFFKTEITLANGEIRKRPLIETNGETGEIVWDKGRDFATVRKVLSMPQVNIVKKTEVQTGGFSKESILPKRNSDKLIARKKDWDPKKYGGFDSPTVAYSVLVVAKVEKGKSKKLKSVKELLGITIMERSSFEKNPIDFLEAKGYKEVKKDLIIKLPKYSLFELENGRKRMLASAGELQKGNELALPSKYVNFLYLASHYEKLKGSPEDNEQKQLFVEQHKHYLDEIIEQISEFSKRVILADANLDKVLSAYNKHRDKPIREQAENIIHLFTLTNLGAPAAFKYFDTTIDRKRYTSTKEVLDATLIHQSITGLYETRIDLSQLGGDGGGGGGSGGGGSGGGGSGGGGSGGGGSGGTLQLDDEYRLYSPLVKPDQNIQFWLEQFPQAWAETAGMGLAKQVPPQVIQLKASATPVSVRQYPLSKEAQEGIRPHVQRLIQQGILVPVQSPWNTPLLPVRKPGTNDYRPVQDLREVNKRVQDIHPTVPNPYNLLCALPPQRSWYTVLDLKDAFFCLRLHPTSQPLFAFEWRDPGTGRTGQLTWTRLPQGFKNSPTIFNEALHRDLANFRIQHPQVTLLQYVDDLLLAGATKQDCLEGTKALLLELSDLGYRASAKKAQICRREVTYLGYSLRDGQRWLTEARKKTVVQIPAPTTAKQVREFLGTAGFCRLWIPGFATLAAPLYPLTKPKGEFSWAPEHQKAFDAIKKALLSAPALALPDVTKPFTLYVDERKGVARGVLTQTLGPWRRPVAYLSKKLDPVASGWPVCLKAIAAVAILVKDADKLTLGQNITVIAPHALENIVRQPPDRWMTNARMTHYQSLLLTERVTFAPPAALNPATLLPEETDEPVTHDCHQLLIEETGVRKDLTDIPLTGEVLTWFTDGSSYVVEGKRMAGAAVVDGTRTIWASSLPEGTSAQKAELMALTQALRLAEGKSINIYTDSRYAFATAHVHGAIYKQRGWLTSAGREIKNKEEILSLLEALHLPKRLAIIHCPGHQKAKDPISRGNQMADRVAKQAAQGVNLLAGKRTADGSEFEKRTADGSEFESPKKKAKVE

SEQ ID NO: 6191 - protein, 2190 aa, synthetic construct
MPAAKRVKLDGGDKKYSIGLDIGTNSVGWAVITDEYKVPSKKFKVLGNTDRHSIKKNLIGALLFDSGETAEATRLKRTARRRYTRRKNRICYLQEIFSNEMAKVDDSFFHRLEESFLVEEDKKHERHPIFGNIVDEVAYHEKYPTIYHLRKKLVDSTDKADLRLIYLALAHMIKFRGHFLIEGDLNPDNSDVDKLFIQLVQTYNQLFEENPINASGVDAKAILSARLSKSRRLENLIAQLPGEKKNGLFGNLIALSLGLTPNFKSNFDLAEDAKLQLSKDTYDDDLDNLLAQIGDQYADLFLAAKNLSDAILLSDILRVNTEITKAPLSASMIKRYDEHHQDLTLLKALVRQQLPEKYKEIFFDQSKNGYAGYIDGGASQEEFYKFIKPILEKMDGTEELLVKLNREDLLRKQRTFDNGSIPHQIHLGELHAILRRQEDFYPFLKDNREKIEKILTFRIPYYVGPLARGNSRFAWMTRKSEETITPWNFEEVVDKGASAQSFIERMTNFDKNLPNEKVLPKHSLLYEYFTVYNELTKVKYVTEGMRKPAFLSGEQKKAIVDLLFKTNRKVTVKQLKEDYFKKIECFDSVEISGVEDRFNASLGTYHDLLKIIKDKDFLDNEENEDILEDIVLTLTLFEDREMIEERLKTYAHLFDDKVMKQLKRRRYTGWGRLSRKLINGIRDKQSGKTILDFLKSDGFANRNFMQLIHDDSLTFKEDIQKAQVSGQGDSLHEHIANLAGSPAIKKGILQTVKVVDELVKVMGRHKPENIVIEMARENQTTQKGQKNSRERMKRIEEGIKELGSQILKEHPVENTQLQNEKLYLYYLQNGRDMYVDQELDINRLSDYDVDHIVPQSFLKDDSIDNKVLTRSDKARGKSDNVPSEEVVKKMKNYWRQLLNAKLITQRKFDNLTKAERGGLSELDKAGFIKRQLVETRQITKHVAQILDSRMNTKYDENDKLIREVKVITLKSKLVSDFRKDFQFYKVREINNYHHAHDAYLNAVVGTALIKKYPKLESEFVYGDYKVYDVRKMIAKSEQEIGKATAKYFFYSNIMNFFKTEITLANGEIRKRPLIETNGETGEIVWDKGRDFATVRKVLSMPQVNIVKKTEVQTGGFSKESILPKRNSDKLIARKKDWDPKKYGGFDSPTVAYSVLVVAKVEKGKSKKLKSVKELLGITIMERSSFEKNPIDFLEAKGYKEVKKDLIIKLPKYSLFELENGRKRMLASAGELQKGNELALPSKYVNFLYLASHYEKLKGSPEDNEQKQLFVEQHKHYLDEIIEQISEFSKRVILADANLDKVLSAYNKHRDKPIREQAENIIHLFTLTNLGAPAAFKYFDTTIDRKRYTSTKEVLDATLIHQSITGLYETRIDLSQLGGDGGGGGGSGGGGSGGGGSGGGGSGGGGSGGMDPLQLLQPLEAEIKGTKLKAHWNSGATITCVPEAFLEDERPIQTMLIKTIHGEKQQDVYYLTFKVQGRKVEAEVLASPYDYILLNPSDVPWLMKKPLQLTVLVPLHEYQERLLQQTALPKEQKELLQKLFLKYDALWQHWENQVGHRRIKPHNIATGTLAPRPQKQYPINPKAKPSIQIVIDDLLKQGVLIQQNSTMNTPVYPVPKPDGKWRMVLDYREVNKTIPLIAAQNQHSAGILSSIYRGKYKTTLDLTNGFWAHPITPESYWLTAFTWQGKQYCWTRLPQGFLNSPALFTADVVDLLKEIPNVQAYVDDIYISHDDPQEHLEQLEKIFSILLNAGYVVSLKKSEIAQREVEFLGFNITKEGRGLTDTFKQKLLNITPPKDLKQLQSILGLLNFARNFIPNYSELVKPLYTIVANANGKFISWTEDNSNQLQHIISVLNQADNLEERNPETRLIIKVNSSPSAGYIRYYNEGSKRPIMYVNYIFSKAEAKFTQTEKLLTTMHKGLIKAMDLAMGQEILVYSPIVSMTKIQRTPLPERKALPVRWITWMTYLEDPRIQFHYDKSLPELQQIPNVTEDVIAKTKHPSEFAMVFYTDGSAIKHPDVNKSHSAGMGIAQVQFIPEYKIVHQWSIPLGDHTAQLAEIAAVEFACKKALKISGPVLIVTDSFYVAESANKELPYWKSNGFLNNKKKPLRHVSKWKSIAECLQLKPDIIIMHEKGHQQPMTTLHTEGNNLADKLATQGSYVVHAGKRTADGSEFEKRTADGSEFESPKKKAKVE

SEQ ID NO: 6192 - protein, 2101 aa, synthetic construct
MPAAKRVKLDGGDKKYSIGLDIGTNSVGWAVITDEYKVPSKKFKVLGNTDRHSIKKNLIGALLFDSGETAEATRLKRTARRRYTRRKNRICYLQEIFSNEMAKVDDSFFHRLEESFLVEEDKKHERHPIFGNIVDEVAYHEKYPTIYHLRKKLVDSTDKADLRLIYLALAHMIKFRGHFLIEGDLNPDNSDVDKLFIQLVQTYNQLFEENPINASGVDAKAILSARLSKSRRLENLIAQLPGEKKNGLFGNLIALSLGLTPNFKSNFDLAEDAKLQLSKDTYDDDLDNLLAQIGDQYADLFLAAKNLSDAILLSDILRVNTEITKAPLSASMIKRYDEHHQDLTLLKALVRQQLPEKYKEIFFDQSKNGYAGYIDGGASQEEFYKFIKPILEKMDGTEELLVKLNREDLLRKQRTFDNGSIPHQIHLGELHAILRRQEDFYPFLKDNREKIEKILTFRIPYYVGPLARGNSRFAWMTRKSEETITPWNFEEVVDKGASAQSFIERMTNFDKNLPNEKVLPKHSLLYEYFTVYNELTKVKYVTEGMRKPAFLSGEQKKAIVDLLFKTNRKVTVKQLKEDYFKKIECFDSVEISGVEDRFNASLGTYHDLLKIIKDKDFLDNEENEDILEDIVLTLTLFEDREMIEERLKTYAHLFDDKVMKQLKRRRYTGWGRLSRKLINGIRDKQSGKTILDFLKSDGFANRNFMQLIHDDSLTFKEDIQKAQVSGQGDSLHEHIANLAGSPAIKKGILQTVKVVDELVKVMGRHKPENIVIEMARENQTTQKGQKNSRERMKRIEEGIKELGSQILKEHPVENTQLQNEKLYLYYLQNGRDMYVDQELDINRLSDYDVDHIVPQSFLKDDSIDNKVLTRSDKARGKSDNVPSEEVVKKMKNYWRQLLNAKLITQRKFDNLTKAERGGLSELDKAGFIKRQLVETRQITKHVAQILDSRMNTKYDENDKLIREVKVITLKSKLVSDFRKDFQFYKVREINNYHHAHDAYLNAVVGTALIKKYPKLESEFVYGDYKVYDVRKMIAKSEQEIGKATAKYFFYSNIMNFFKTEITLANGEIRKRPLIETNGETGEIVWDKGRDFATVRKVLSMPQVNIVKKTEVQTGGFSKESILPKRNSDKLIARKKDWDPKKYGGFDSPTVAYSVLVVAKVEKGKSKKLKSVKELLGITIMERSSFEKNPIDFLEAKGYKEVKKDLIIKLPKYSLFELENGRKRMLASAGELQKGNELALPSKYVNFLYLASHYEKLKGSPEDNEQKQLFVEQHKHYLDEIIEQISEFSKRVILADANLDKVLSAYNKHRDKPIREQAENIIHLFTLTNLGAPAAFKYFDTTIDRKRYTSTKEVLDATLIHQSITGLYETRIDLSQLGGDGGGGGGSGGGGSGGGGSGGGGSGGGGSGGVPWLMKKPLQLTVLVPLHEYQERLLQQTALPKEQKELLQKLFLKYDALWQHWENQVGHRRIKPHNIATGTLAPRPQKQYPINPKAKPSIQIVIDDLLKQGVLIQQNSTMNTPVYPVPKPDGKWRMVLDYREVNKTIPLIAAQNQHSAGILSSIYRGKYKTTLDLTNGFWAHPITPESYWLTAFTWQGKQYCWTRLPQGFLNSPALFNADVVDLLKEIPNVQAYVDDIYISHDDPQEHLEQLEKIFSILLNAGYVVSLKKSEIAQREVEFLGFNITKEGRGLTDTFKQKLLNITPPKDLKQLQSILGKLNFARNFIPNYSELVKPLYTIVAPANGKFISWTEDNSNQLQHIISVLNQADNLEERNPETRLIIKVNSSPSAGYIRYYNEGSKRPIMYVNYIFSKAEAKFTQTEKLLTTMHKGLIKAMDLAMGQEILVYSPIVSMTKIQRTPLPERKALPVRWITWMTYLEDPRIQFHYDKSLPELQQIPNVTEDVIAKTKHPSEFAMVFYTDGSAIKHPDVNKSHSAGMGIAQVQFIPEYKIVHQWSIPLGDHTAQLAEIAAVEFACKKALKISGPVLIVTDSFYVAESANKELPYWKSNGFLNNKKKPLRHVSKWKSIAECLQLKPDIIIMHEKGHQQPMTTLHTEGNNLADKLATQGSYVVHAGKRTADGSEFEKRTADGSEFESPKKKAKVE

SEQ ID NO: 6193 - protein, 2190 aa, synthetic construct
MPAAKRVKLDGGDKKYSIGLDIGTNSVGWAVITDEYKVPSKKFKVLGNTDRHSIKKNLIGALLFDSGETAEATRLKRTARRRYTRRKNRICYLQEIFSNEMAKVDDSFFHRLEESFLVEEDKKHERHPIFGNIVDEVAYHEKYPTIYHLRKKLVDSTDKADLRLIYLALAHMIKFRGHFLIEGDLNPDNSDVDKLFIQLVQTYNQLFEENPINASGVDAKAILSARLSKSRRLENLIAQLPGEKKNGLFGNLIALSLGLTPNFKSNFDLAEDAKLQLSKDTYDDDLDNLLAQIGDQYADLFLAAKNLSDAILLSDILRVNTEITKAPLSASMIKRYDEHHQDLTLLKALVRQQLPEKYKEIFFDQSKNGYAGYIDGGASQEEFYKFIKPILEKMDGTEELLVKLNREDLLRKQRTFDNGSIPHQIHLGELHAILRRQEDFYPFLKDNREKIEKILTFRIPYYVGPLARGNSRFAWMTRKSEETITPWNFEEVVDKGASAQSFIERMTNFDKNLPNEKVLPKHSLLYEYFTVYNELTKVKYVTEGMRKPAFLSGEQKKAIVDLLFKTNRKVTVKQLKEDYFKKIECFDSVEISGVEDRFNASLGTYHDLLKIIKDKDFLDNEENEDILEDIVLTLTLFEDREMIEERLKTYAHLFDDKVMKQLKRRRYTGWGRLSRKLINGIRDKQSGKTILDFLKSDGFANRNFMQLIHDDSLTFKEDIQKAQVSGQGDSLHEHIANLAGSPAIKKGILQTVKVVDELVKVMGRHKPENIVIEMARENQTTQKGQKNSRERMKRIEEGIKELGSQILKEHPVENTQLQNEKLYLYYLQNGRDMYVDQELDINRLSDYDVDHIVPQSFLKDDSIDNKVLTRSDKARGKSDNVPSEEVVKKMKNYWRQLLNAKLITQRKFDNLTKAERGGLSELDKAGFIKRQLVETRQITKHVAQILDSRMNTKYDENDKLIREVKVITLKSKLVSDFRKDFQFYKVREINNYHHAHDAYLNAVVGTALIKKYPKLESEFVYGDYKVYDVRKMIAKSEQEIGKATAKYFFYSNIMNFFKTEITLANGEIRKRPLIETNGETGEIVWDKGRDFATVRKVLSMPQVNIVKKTEVQTGGFSKESILPKRNSDKLIARKKDWDPKKYGGFDSPTVAYSVLVVAKVEKGKSKKLKSVKELLGITIMERSSFEKNPIDFLEAKGYKEVKKDLIIKLPKYSLFELENGRKRMLASAGELQKGNELALPSKYVNFLYLASHYEKLKGSPEDNEQKQLFVEQHKHYLDEIIEQISEFSKRVILADANLDKVLSAYNKHRDKPIREQAENIIHLFTLTNLGAPAAFKYFDTTIDRKRYTSTKEVLDATLIHQSITGLYETRIDLSQLGGDGGGGGGSGGGGSGGGGSGGGGSGGGGSGGMDPLQLLQPLEAEIKGTKLKAHWNSGATITCVPEAFLEDERPIQTMLIKTIHGEKQQDVYYLTFKVQGRKVEAEVLASPYDYILLNPSDVPWLMKKPLQLTVLVPLHEYQERLLQQTALPKEQKELLQKLFLKYDALWQHWENQVGHRRIKPHNIATGTLAPRPQKQYPINPKAKPSIQIVIDDLLKQGVLIQQNSTMNTPVYPVPKPDGKWRMVLDYREVNKTIPLIAAQNQHSAGILSSIYRGKYKTTLDLTNGFWAHPITPESYWLTAFTWQGKQYCWTRLPQGFLNSPALFNADVVDLLKEIPNVQAYVDDIYISHDDPQEHLEQLEKIFSILLNAGYVVSLKKSEIAQREVEFLGFNITKEGRGLTDTFKQKLLNITPPKDLKQLQSILGLLNFARNFIPNYSELVKPLYTIVAPANGKFISWTEDNSNQLQHIISVLNQADNLEERNPETRLIIKVNSSPSAGYIRYYNEGSKRPIMYVNYIFSKAEAKFTQTEKLLTTMHKGLIKAMDLAMGQEILVYSPIVSMTKIQRTPLPERKALPVRWITWMTYLEDPRIQFHYDKSLPELQQIPNVTEDVIAKTKHPSEFAMVFYTDGSAIKHPDVNKSHSAGMGIAQVQFIPEYKIVHQWSIPLGDHTAQLAEIAAVEFACKKALKISGPVLIVTDSFYVAESANKELPYWKSNGFLNNKKKPLRHVSKWKSIAECLQLKPDIIIMHEKGHQQPMTTLHTEGNNLADKLATQGSYVVHAGKRTADGSEFEKRTADGSEFESPKKKAKVE

SEQ ID NO: 6194 - protein, 2190 aa, synthetic construct
MPAAKRVKLDGGDKKYSIGLDIGTNSVGWAVITDEYKVPSKKFKVLGNTDRHSIKKNLIGALLFDSGETAEATRLKRTARRRYTRRKNRICYLQEIFSNEMAKVDDSFFHRLEESFLVEEDKKHERHPIFGNIVDEVAYHEKYPTIYHLRKKLVDSTDKADLRLIYLALAHMIKFRGHFLIEGDLNPDNSDVDKLFIQLVQTYNQLFEENPINASGVDAKAILSARLSKSRRLENLIAQLPGEKKNGLFGNLIALSLGLTPNFKSNFDLAEDAKLQLSKDTYDDDLDNLLAQIGDQYADLFLAAKNLSDAILLSDILRVNTEITKAPLSASMIKRYDEHHQDLTLLKALVRQQLPEKYKEIFFDQSKNGYAGYIDGGASQEEFYKFIKPILEKMDGTEELLVKLNREDLLRKQRTFDNGSIPHQIHLGELHAILRRQEDFYPFLKDNREKIEKILTFRIPYYVGPLARGNSRFAWMTRKSEETITPWNFEEVVDKGASAQSFIERMTNFDKNLPNEKVLPKHSLLYEYFTVYNELTKVKYVTEGMRKPAFLSGEQKKAIVDLLFKTNRKVTVKQLKEDYFKKIECFDSVEISGVEDRFNASLGTYHDLLKIIKDKDFLDNEENEDILEDIVLTLTLFEDREMIEERLKTYAHLFDDKVMKQLKRRRYTGWGRLSRKLINGIRDKQSGKTILDFLKSDGFANRNFMQLIHDDSLTFKEDIQKAQVSGQGDSLHEHIANLAGSPAIKKGILQTVKVVDELVKVMGRHKPENIVIEMARENQTTQKGQKNSRERMKRIEEGIKELGSQILKEHPVENTQLQNEKLYLYYLQNGRDMYVDQELDINRLSDYDVDHIVPQSFLKDDSIDNKVLTRSDKARGKSDNVPSEEVVKKMKNYWRQLLNAKLITQRKFDNLTKAERGGLSELDKAGFIKRQLVETRQITKHVAQILDSRMNTKYDENDKLIREVKVITLKSKLVSDFRKDFQFYKVREINNYHHAHDAYLNAVVGTALIKKYPKLESEFVYGDYKVYDVRKMIAKSEQEIGKATAKYFFYSNIMNFFKTEITLANGEIRKRPLIETNGETGEIVWDKGRDFATVRKVLSMPQVNIVKKTEVQTGGFSKESILPKRNSDKLIARKKDWDPKKYGGFDSPTVAYSVLVVAKVEKGKSKKLKSVKELLGITIMERSSFEKNPIDFLEAKGYKEVKKDLIIKLPKYSLFELENGRKRMLASAGELQKGNELALPSKYVNFLYLASHYEKLKGSPEDNEQKQLFVEQHKHYLDEIIEQISEFSKRVILADANLDKVLSAYNKHRDKPIREQAENIIHLFTLTNLGAPAAFKYFDTTIDRKRYTSTKEVLDATLIHQSITGLYETRIDLSQLGGDGGGGGGSGGGGSGGGGSGGGGSGGGGSGGMDPLQLLQPLEAEIKGTKLKAHWNSGATITCVPEAFLEDERPIQTMLIKTIHGEKQQDVYYLTFKVQGRKVEAEVLASPYDYILLNPSDVPWLMKKPLQLTVLVPLHEYQERLLQQTALPKEQKELLQKLFLKYDALWQHWENQVGHRRIKPHNIATGTLAPRPQKQYPINPKAKPSIQIVIDDLLKQGVLIQQNSTMNTPVYPVPKPDGKWRMVLDYREVNKTIPLIAAQNQHSAGILSSIYRGKYKTTLDLTNGFWAHPITPESYWLTAFTWQGKQYCWTRLPQGFLNSPALFNADVVDLLKEIPNVQAYVDDIYISHDDPQEHLEQLEKIFSILLNAGYVVSLKKSEIAQREVEFLGFNITKEGRGLTDTFKQKLLNITPPKDLKQLQSILGKLNFARNFIPNYSELVKPLYTIVAPANGKFISWTEDNSNQLQHIISVLNQADNLEERNPETRLIIKVNSSPSAGYIRYYNEGSKRPIMYVNYIFSKAEAKFTQTEKLLTTMHKGLIKAMDLAMGQEILVYSPIVSMTKIQRTPLPERKALPVRWITWMTYLEDPRIQFHYDKSLPELQQIPNVTEDVIAKTKHPSEFAMVFYTDGSAIKHPDVNKSHSAGMGIAQVQFIPEYKIVHQWSIPLGDHTAQLAEIAAVEFACKKALKISGPVLIVTDSFYVAESANKELPYWKSNGFLNNKKKPLRHVSKWKSIAECLQLKPDIIIMHEKGHQQPMTTLHTEGNNLADKLATQGSYVVHAGKRTADGSEFEKRTADGSEFESPKKKAKVE

SEQ ID NO: 6195 - protein, 2101 aa, synthetic construct
MPAAKRVKLDGGDKKYSIGLDIGTNSVGWAVITDEYKVPSKKFKVLGNTDRHSIKKNLIGALLFDSGETAEATRLKRTARRRYTRRKNRICYLQEIFSNEMAKVDDSFFHRLEESFLVEEDKKHERHPIFGNIVDEVAYHEKYPTIYHLRKKLVDSTDKADLRLIYLALAHMIKFRGHFLIEGDLNPDNSDVDKLFIQLVQTYNQLFEENPINASGVDAKAILSARLSKSRRLENLIAQLPGEKKNGLFGNLIALSLGLTPNFKSNFDLAEDAKLQLSKDTYDDDLDNLLAQIGDQYADLFLAAKNLSDAILLSDILRVNTEITKAPLSASMIKRYDEHHQDLTLLKALVRQQLPEKYKEIFFDQSKNGYAGYIDGGASQEEFYKFIKPILEKMDGTEELLVKLNREDLLRKQRTFDNGSIPHQIHLGELHAILRRQEDFYPFLKDNREKIEKILTFRIPYYVGPLARGNSRFAWMTRKSEETITPWNFEEVVDKGASAQSFIERMTNFDKNLPNEKVLPKHSLLYEYFTVYNELTKVKYVTEGMRKPAFLSGEQKKAIVDLLFKTNRKVTVKQLKEDYFKKIECFDSVEISGVEDRFNASLGTYHDLLKIIKDKDFLDNEENEDILEDIVLTLTLFEDREMIEERLKTYAHLFDDKVMKQLKRRRYTGWGRLSRKLINGIRDKQSGKTILDFLKSDGFANRNFMQLIHDDSLTFKEDIQKAQVSGQGDSLHEHIANLAGSPAIKKGILQTVKVVDELVKVMGRHKPENIVIEMARENQTTQKGQKNSRERMKRIEEGIKELGSQILKEHPVENTQLQNEKLYLYYLQNGRDMYVDQELDINRLSDYDVDHIVPQSFLKDDSIDNKVLTRSDKARGKSDNVPSEEVVKKMKNYWRQLLNAKLITQRKFDNLTKAERGGLSELDKAGFIKRQLVETRQITKHVAQILDSRMNTKYDENDKLIREVKVITLKSKLVSDFRKDFQFYKVREINNYHHAHDAYLNAVVGTALIKKYPKLESEFVYGDYKVYDVRKMIAKSEQEIGKATAKYFFYSNIMNFFKTEITLANGEIRKRPLIETNGETGEIVWDKGRDFATVRKVLSMPQVNIVKKTEVQTGGFSKESILPKRNSDKLIARKKDWDPKKYGGFDSPTVAYSVLVVAKVEKGKSKKLKSVKELLGITIMERSSFEKNPIDFLEAKGYKEVKKDLIIKLPKYSLFELENGRKRMLASAGELQKGNELALPSKYVNFLYLASHYEKLKGSPEDNEQKQLFVEQHKHYLDEIIEQISEFSKRVILADANLDKVLSAYNKHRDKPIREQAENIIHLFTLTNLGAPAAFKYFDTTIDRKRYTSTKEVLDATLIHQSITGLYETRIDLSQLGGDGGGGGGSGGGGSGGGGSGGGGSGGGGSGGIPWLMKKPLQLTTLVPLQEYEERLLKQTMLTGSYKEKLQSLFLKYDALWQHWENQVGHRRIKPHHIATGTVNPRPQKQYPINPKAKASIQTVINDLLKQGVLIQQNSIMNTPVYPVPKPDGKWRMVLDYREVNKTIPLIAAQNQHSAGILSSIFRGKYKTTLDLSNGFWAHSITPESYWLTAFTWLGQQYCWTRLPQGFLNSPALFNADVVDLLKEVPNVQVYVDDIYISHDDPREHLEQLEKVFSLLLNAGYVVSLKKSEIAQHEVEFLGFNITKEGRGLTETFKQKLLNITPPRDLKQLQSILGKLNFARNFIPNFSELVKPLYNIIATAPGKYITWTTDNSQQLQNIISMLNSAENLEERNPEVRLIMKVNTSPSAGYIRFYNEFAKRPIMYLNYVYTKAEVKFTNTEKLLTTIHKGLIKALDLGMGQEILVYSPIVSMTKIQKTPLPERKALPIRWITWMSYLEDPRIQFHYDKTLPELQQVPTVTDDIIAKIKHPSEFSMVFYTDGSAIKHPNVNKSHNAGMGIAQVQFKPEFTVINTWSIPLGDHTAQLAEVAAVEFACKKALKIDGPVLIVTDSFYVAESVNKELPYWQSNGFFNNKKKPLKHVSKWKSIADCIQLKPDIIIIHEKGHQPTASTFHTEGNNLADKLATQGSYVVNAGKRTADGSEFEKRTADGSEFESPKKKAKVE

SEQ ID NO: 6196 - protein, 2190 aa, synthetic construct
MPAAKRVKLDGGDKKYSIGLDIGTNSVGWAVITDEYKVPSKKFKVLGNTDRHSIKKNLIGALLFDSGETAEATRLKRTARRRYTRRKNRICYLQEIFSNEMAKVDDSFFHRLEESFLVEEDKKHERHPIFGNIVDEVAYHEKYPTIYHLRKKLVDSTDKADLRLIYLALAHMIKFRGHFLIEGDLNPDNSDVDKLFIQLVQTYNQLFEENPINASGVDAKAILSARLSKSRRLENLIAQLPGEKKNGLFGNLIALSLGLTPNFKSNFDLAEDAKLQLSKDTYDDDLDNLLAQIGDQYADLFLAAKNLSDAILLSDILRVNTEITKAPLSASMIKRYDEHHQDLTLLKALVRQQLPEKYKEIFFDQSKNGYAGYIDGGASQEEFYKFIKPILEKMDGTEELLVKLNREDLLRKQRTFDNGSIPHQIHLGELHAILRRQEDFYPFLKDNREKIEKILTFRIPYYVGPLARGNSRFAWMTRKSEETITPWNFEEVVDKGASAQSFIERMTNFDKNLPNEKVLPKHSLLYEYFTVYNELTKVKYVTEGMRKPAFLSGEQKKAIVDLLFKTNRKVTVKQLKEDYFKKIECFDSVEISGVEDRFNASLGTYHDLLKIIKDKDFLDNEENEDILEDIVLTLTLFEDREMIEERLKTYAHLFDDKVMKQLKRRRYTGWGRLSRKLINGIRDKQSGKTILDFLKSDGFANRNFMQLIHDDSLTFKEDIQKAQVSGQGDSLHEHIANLAGSPAIKKGILQTVKVVDELVKVMGRHKPENIVIEMARENQTTQKGQKNSRERMKRIEEGIKELGSQILKEHPVENTQLQNEKLYLYYLQNGRDMYVDQELDINRLSDYDVDHIVPQSFLKDDSIDNKVLTRSDKARGKSDNVPSEEVVKKMKNYWRQLLNAKLITQRKFDNLTKAERGGLSELDKAGFIKRQLVETRQITKHVAQILDSRMNTKYDENDKLIREVKVITLKSKLVSDFRKDFQFYKVREINNYHHAHDAYLNAVVGTALIKKYPKLESEFVYGDYKVYDVRKMIAKSEQEIGKATAKYFFYSNIMNFFKTEITLANGEIRKRPLIETNGETGEIVWDKGRDFATVRKVLSMPQVNIVKKTEVQTGGFSKESILPKRNSDKLIARKKDWDPKKYGGFDSPTVAYSVLVVAKVEKGKSKKLKSVKELLGITIMERSSFEKNPIDFLEAKGYKEVKKDLIIKLPKYSLFELENGRKRMLASAGELQKGNELALPSKYVNFLYLASHYEKLKGSPEDNEQKQLFVEQHKHYLDEIIEQISEFSKRVILADANLDKVLSAYNKHRDKPIREQAENIIHLFTLTNLGAPAAFKYFDTTIDRKRYTSTKEVLDATLIHQSITGLYETRIDLSQLGGDGGGGGGSGGGGSGGGGSGGGGSGGGGSGGMDPLQLLQPLEAEIKGTKLKAHWNSGATITCVPQAFLEEEVPIKNIWIKTIHGEKEQPVYYLTFKIQGRKVEAEVISSPYDYILVSPSDIPWLMKKPLQLTTLVPLQEYEERLLKQTMLTGSYKEKLQSLFLKYDALWQHWENQVGHRRIKPHHIATGTVNPRPQKQYPINPKAKASIQTVINDLLKQGVLIQQNSIMNTPVYPVPKPDGKWRMVLDYREVNKTIPLIAAQNQHSAGILSSIFRGKYKTTLDLSNGFWAHSITPESYWLTAFTWLGQQYCWTRLPQGFLNSPALFNADVVDLLKEVPNVQVYVDDIYISHDDPREHLEQLEKVFSLLLNAGYVVSLKKSEIAQHEVEFLGFNITKEGRGLTETFKQKLLNITPPRDLKQLQSILGLLNFARNFIPNFSELVKPLYNIIATAPGKYITWTTDNSQQLQNIISMLNSAENLEERNPEVRLIMKVNTSPSAGYIRFYNEFAKRPIMYLNYVYTKAEVKFTNTEKLLTTIHKGLIKALDLGMGQEILVYSPIVSMTKIQKTPLPERKALPIRWITWMSYLEDPRIQFHYDKTLPELQQVPTVTDDIIAKIKHPSEFSMVFYTDGSAIKHPNVNKSHNAGMGIAQVQFKPEFTVINTWSIPLGDHTAQLAEVAAVEFACKKALKIDGPVLIVTDSFYVAESVNKELPYWQSNGFFNNKKKPLKHVSKWKSIADCIQLKPDIIIIHEKGHQPTASTFHTEGNNLADKLATQGSYVVNAGKRTADGSEFEKRTADGSEFESPKKKAKVE

SEQ ID NO: 6197 - protein, 2190 aa, synthetic construct
MPAAKRVKLDGGDKKYSIGLDIGTNSVGWAVITDEYKVPSKKFKVLGNTDRHSIKKNLIGALLFDSGETAEATRLKRTARRRYTRRKNRICYLQEIFSNEMAKVDDSFFHRLEESFLVEEDKKHERHPIFGNIVDEVAYHEKYPTIYHLRKKLVDSTDKADLRLIYLALAHMIKFRGHFLIEGDLNPDNSDVDKLFIQLVQTYNQLFEENPINASGVDAKAILSARLSKSRRLENLIAQLPGEKKNGLFGNLIALSLGLTPNFKSNFDLAEDAKLQLSKDTYDDDLDNLLAQIGDQYADLFLAAKNLSDAILLSDILRVNTEITKAPLSASMIKRYDEHHQDLTLLKALVRQQLPEKYKEIFFDQSKNGYAGYIDGGASQEEFYKFIKPILEKMDGTEELLVKLNREDLLRKQRTFDNGSIPHQIHLGELHAILRRQEDFYPFLKDNREKIEKILTFRIPYYVGPLARGNSRFAWMTRKSEETITPWNFEEVVDKGASAQSFIERMTNFDKNLPNEKVLPKHSLLYEYFTVYNELTKVKYVTEGMRKPAFLSGEQKKAIVDLLFKTNRKVTVKQLKEDYFKKIECFDSVEISGVEDRFNASLGTYHDLLKIIKDKDFLDNEENEDILEDIVLTLTLFEDREMIEERLKTYAHLFDDKVMKQLKRRRYTGWGRLSRKLINGIRDKQSGKTILDFLKSDGFANRNFMQLIHDDSLTFKEDIQKAQVSGQGDSLHEHIANLAGSPAIKKGILQTVKVVDELVKVMGRHKPENIVIEMARENQTTQKGQKNSRERMKRIEEGIKELGSQILKEHPVENTQLQNEKLYLYYLQNGRDMYVDQELDINRLSDYDVDHIVPQSFLKDDSIDNKVLTRSDKARGKSDNVPSEEVVKKMKNYWRQLLNAKLITQRKFDNLTKAERGGLSELDKAGFIKRQLVETRQITKHVAQILDSRMNTKYDENDKLIREVKVITLKSKLVSDFRKDFQFYKVREINNYHHAHDAYLNAVVGTALIKKYPKLESEFVYGDYKVYDVRKMIAKSEQEIGKATAKYFFYSNIMNFFKTEITLANGEIRKRPLIETNGETGEIVWDKGRDFATVRKVLSMPQVNIVKKTEVQTGGFSKESILPKRNSDKLIARKKDWDPKKYGGFDSPTVAYSVLVVAKVEKGKSKKLKSVKELLGITIMERSSFEKNPIDFLEAKGYKEVKKDLIIKLPKYSLFELENGRKRMLASAGELQKGNELALPSKYVNFLYLASHYEKLKGSPEDNEQKQLFVEQHKHYLDEIIEQISEFSKRVILADANLDKVLSAYNKHRDKPIREQAENIIHLFTLTNLGAPAAFKYFDTTIDRKRYTSTKEVLDATLIHQSITGLYETRIDLSQLGGDGGGGGGSGGGGSGGGGSGGGGSGGGGSGGMDPLQLLQPLEAEIKGTKLKAHWNSGATITCVPQAFLEEEVPIKNIWIKTIHGEKEQPVYYLTFKIQGRKVEAEVISSPYDYILVSPSDIPWLMKKPLQLTTLVPLQEYEERLLKQTMLTGSYKEKLQSLFLKYDALWQHWENQVGHRRIKPHHIATGTVNPRPQKQYPINPKAKASIQTVINDLLKQGVLIQQNSIMNTPVYPVPKPDGKWRMVLDYREVNKTIPLIAAQNQHSAGILSSIFRGKYKTTLDLSNGFWAHSITPESYWLTAFTWLGQQYCWTRLPQGFLNSPALFNADVVDLLKEVPNVQVYVDDIYISHDDPREHLEQLEKVFSLLLNAGYVVSLKKSEIAQHEVEFLGFNITKEGRGLTETFKQKLLNITPPRDLKQLQSILGKLNFARNFIPNFSELVKPLYNIIATAPGKYITWTTDNSQQLQNIISMLNSAENLEERNPEVRLIMKVNTSPSAGYIRFYNEFAKRPIMYLNYVYTKAEVKFTNTEKLLTTIHKGLIKALDLGMGQEILVYSPIVSMTKIQKTPLPERKALPIRWITWMSYLEDPRIQFHYDKTLPELQQVPTVTDDIIAKIKHPSEFSMVFYTDGSAIKHPNVNKSHNAGMGIAQVQFKPEFTVINTWSIPLGDHTAQLAEVAAVEFACKKALKIDGPVLIVTDSFYVAESVNKELPYWQSNGFFNNKKKPLKHVSKWKSIADCIQLKPDIIIIHEKGHQPTASTFHTEGNNLADKLATQGSYVVNAGKRTADGSEFEKRTADGSEFESPKKKAKVE

SEQ ID NO: 6198 - protein, 2108 aa, synthetic construct
MPAAKRVKLDGGDKKYSIGLDIGTNSVGWAVITDEYKVPSKKFKVLGNTDRHSIKKNLIGALLFDSGETAEATRLKRTARRRYTRRKNRICYLQEIFSNEMAKVDDSFFHRLEESFLVEEDKKHERHPIFGNIVDEVAYHEKYPTIYHLRKKLVDSTDKADLRLIYLALAHMIKFRGHFLIEGDLNPDNSDVDKLFIQLVQTYNQLFEENPINASGVDAKAILSARLSKSRRLENLIAQLPGEKKNGLFGNLIALSLGLTPNFKSNFDLAEDAKLQLSKDTYDDDLDNLLAQIGDQYADLFLAAKNLSDAILLSDILRVNTEITKAPLSASMIKRYDEHHQDLTLLKALVRQQLPEKYKEIFFDQSKNGYAGYIDGGASQEEFYKFIKPILEKMDGTEELLVKLNREDLLRKQRTFDNGSIPHQIHLGELHAILRRQEDFYPFLKDNREKIEKILTFRIPYYVGPLARGNSRFAWMTRKSEETITPWNFEEVVDKGASAQSFIERMTNFDKNLPNEKVLPKHSLLYEYFTVYNELTKVKYVTEGMRKPAFLSGEQKKAIVDLLFKTNRKVTVKQLKEDYFKKIECFDSVEISGVEDRFNASLGTYHDLLKIIKDKDFLDNEENEDILEDIVLTLTLFEDREMIEERLKTYAHLFDDKVMKQLKRRRYTGWGRLSRKLINGIRDKQSGKTILDFLKSDGFANRNFMQLIHDDSLTFKEDIQKAQVSGQGDSLHEHIANLAGSPAIKKGILQTVKVVDELVKVMGRHKPENIVIEMARENQTTQKGQKNSRERMKRIEEGIKELGSQILKEHPVENTQLQNEKLYLYYLQNGRDMYVDQELDINRLSDYDVDHIVPQSFLKDDSIDNKVLTRSDKARGKSDNVPSEEVVKKMKNYWRQLLNAKLITQRKFDNLTKAERGGLSELDKAGFIKRQLVETRQITKHVAQILDSRMNTKYDENDKLIREVKVITLKSKLVSDFRKDFQFYKVREINNYHHAHDAYLNAVVGTALIKKYPKLESEFVYGDYKVYDVRKMIAKSEQEIGKATAKYFFYSNIMNFFKTEITLANGEIRKRPLIETNGETGEIVWDKGRDFATVRKVLSMPQVNIVKKTEVQTGGFSKESILPKRNSDKLIARKKDWDPKKYGGFDSPTVAYSVLVVAKVEKGKSKKLKSVKELLGITIMERSSFEKNPIDFLEAKGYKEVKKDLIIKLPKYSLFELENGRKRMLASAGELQKGNELALPSKYVNFLYLASHYEKLKGSPEDNEQKQLFVEQHKHYLDEIIEQISEFSKRVILADANLDKVLSAYNKHRDKPIREQAENIIHLFTLTNLGAPAAFKYFDTTIDRKRYTSTKEVLDATLIHQSITGLYETRIDLSQLGGDGGGGGGSGGGGSGGGGSGGGGSGGGGSGGVLNLEEEYRLHEKPVPSSIDPSWLQLFPTVWAERAGMGLANQVPPVVVELRSGASPVAVRQYPMSKEAREGIRPHIQRFLDLGVLVPCQSPWNTPLLPVKKPGTNDYRPVQDLREINKRVQDIHPTVPNPYNLLSSLPPSHTWYSVLDLKDAFFCLKLHPNSQPLFAFEWRDPEKGNTGQLTWTRLPQGFKNSPTLFNEALHRDLAPFRALNPQVVLLQYVDDLLVAAPTYRDCKEGTQKLLQELSKLGYRVSAKKAQLCQKEVTYLGYLLKEGKRWLTPARKATVMKIPPPTTPRQVREFLGTAGFCRLWIPGFASLAAPLYPLTKPSIPFIWTEEHQKAFDRIKEALLSAPALALPDLTKPFTLYVDERAGVARGVLTQTLGPWRRPVAYLSKKLDPVASGWPTCLKAVAAVALLLKDADKLTLGQNVTVIASHSLESIVRQPPDRWMTNARMTHYQSLLLNERVSFAPPAVLNPATLLPVESEATPVHRCSEILAEETGTRRDLKDQPLPGVPAWYTDGSSFIAEGKRRAGAAIVDGKRTVWASSLPEGTSAQKAELVALTQALRLAEGKDINIYTDSRYAFATAHIHGAIYKQRGWLTSAGKDIKNKEEILALLEAIHLPKRVAIIHCPGHQKGNDPVATGNRRADEAAKQAALSTRVLAETTKPAGKRTADGSEFEKRTADGSEFESPKKKAKVE

SEQ ID NO: 6199 - protein, 2110 aa, synthetic construct
MPAAKRVKLDGGDKKYSIGLDIGTNSVGWAVITDEYKVPSKKFKVLGNTDRHSIKKNLIGALLFDSGETAEATRLKRTARRRYTRRKNRICYLQEIFSNEMAKVDDSFFHRLEESFLVEEDKKHERHPIFGNIVDEVAYHEKYPTIYHLRKKLVDSTDKADLRLIYLALAHMIKFRGHFLIEGDLNPDNSDVDKLFIQLVQTYNQLFEENPINASGVDAKAILSARLSKSRRLENLIAQLPGEKKNGLFGNLIALSLGLTPNFKSNFDLAEDAKLQLSKDTYDDDLDNLLAQIGDQYADLFLAAKNLSDAILLSDILRVNTEITKAPLSASMIKRYDEHHQDLTLLKALVRQQLPEKYKEIFFDQSKNGYAGYIDGGASQEEFYKFIKPILEKMDGTEELLVKLNREDLLRKQRTFDNGSIPHQIHLGELHAILRRQEDFYPFLKDNREKIEKILTFRIPYYVGPLARGNSRFAWMTRKSEETITPWNFEEVVDKGASAQSFIERMTNFDKNLPNEKVLPKHSLLYEYFTVYNELTKVKYVTEGMRKPAFLSGEQKKAIVDLLFKTNRKVTVKQLKEDYFKKIECFDSVEISGVEDRFNASLGTYHDLLKIIKDKDFLDNEENEDILEDIVLTLTLFEDREMIEERLKTYAHLFDDKVMKQLKRRRYTGWGRLSRKLINGIRDKQSGKTILDFLKSDGFANRNFMQLIHDDSLTFKEDIQKAQVSGQGDSLHEHIANLAGSPAIKKGILQTVKVVDELVKVMGRHKPENIVIEMARENQTTQKGQKNSRERMKRIEEGIKELGSQILKEHPVENTQLQNEKLYLYYLQNGRDMYVDQELDINRLSDYDVDHIVPQSFLKDDSIDNKVLTRSDKARGKSDNVPSEEVVKKMKNYWRQLLNAKLITQRKFDNLTKAERGGLSELDKAGFIKRQLVETRQITKHVAQILDSRMNTKYDENDKLIREVKVITLKSKLVSDFRKDFQFYKVREINNYHHAHDAYLNAVVGTALIKKYPKLESEFVYGDYKVYDVRKMIAKSEQEIGKATAKYFFYSNIMNFFKTEITLANGEIRKRPLIETNGETGEIVWDKGRDFATVRKVLSMPQVNIVKKTEVQTGGFSKESILPKRNSDKLIARKKDWDPKKYGGFDSPTVAYSVLVVAKVEKGKSKKLKSVKELLGITIMERSSFEKNPIDFLEAKGYKEVKKDLIIKLPKYSLFELENGRKRMLASAGELQKGNELALPSKYVNFLYLASHYEKLKGSPEDNEQKQLFVEQHKHYLDEIIEQISEFSKRVILADANLDKVLSAYNKHRDKPIREQAENIIHLFTLTNLGAPAAFKYFDTTIDRKRYTSTKEVLDATLIHQSITGLYETRIDLSQLGGDGGGGGGSGGGGSGGGGSGGGGSGGGGSGGTLNIEDEYRLHETSKEPDVPLGSTWLSDFPQAWAETGGMGLAVRQAPLIIPLKATSTPVSIKQYPMSQEARLGIKPHIQRLLDQGILVPCQSPWNTPLLPVKKPGTNDYRPVQDLREVNKRVEDIHPTVPNPYNLLSGLPPSHQWYTVLDLKDAFFCLRLHPTSQPLFAFEWRDPEMGISGQLTWTRLPQGFKNSPTLFNEALHRDLADFRIQHPDLILLQYVDDLLLAATSEQDCQRGTRALLQTLGNLGYRASAKKAQICQKQVKYLGYLLKEGQRWLTEARKETVMGQPTPKTPRQLREFLGTAGFCRLWIPGFAEMAAPLYPLTKPGTLFNWGPDQQKAYQEIKQALLTAPALGLPDLTKPFELFVDEKQGYAKGVLTQKLGPWRRPVAYLSKKLDPVAAGWPPCLRMVAAIAVLTKDAGKLTMGQPLVILAPHAVEALVKQPPDRWLSNARMTHYQAMLLDTDRVQFGPVVALNPATLLPLPEKEAPHDCLEILAETHGTRPDLTDQPIPDADYTWYTDGSSFLQEGQRRAGAAVTTETEVIWARALPAGTSAQRAELIALTQALKMAEGKKLNVYTDSRYAFATAHVHGEIYRRRGWLTSEGREIKNKNEILALLKALFLPKRLSIIHCPGHQKGNSAEARGNRMADQAAREAAMKAVLETSTLLAGKRTADGSEFEKRTADGSEFESPKKKAKVE

SEQ ID NO: 6200 - protein, 2117 aa, synthetic construct
MPAAKRVKLDGGDKKYSIGLDIGTNSVGWAVITDEYKVPSKKFKVLGNTDRHSIKKNLIGALLFDSGETAEATRLKRTARRRYTRRKNRICYLQEIFSNEMAKVDDSFFHRLEESFLVEEDKKHERHPIFGNIVDEVAYHEKYPTIYHLRKKLVDSTDKADLRLIYLALAHMIKFRGHFLIEGDLNPDNSDVDKLFIQLVQTYNQLFEENPINASGVDAKAILSARLSKSRRLENLIAQLPGEKKNGLFGNLIALSLGLTPNFKSNFDLAEDAKLQLSKDTYDDDLDNLLAQIGDQYADLFLAAKNLSDAILLSDILRVNTEITKAPLSASMIKRYDEHHQDLTLLKALVRQQLPEKYKEIFFDQSKNGYAGYIDGGASQEEFYKFIKPILEKMDGTEELLVKLNREDLLRKQRTFDNGSIPHQIHLGELHAILRRQEDFYPFLKDNREKIEKILTFRIPYYVGPLARGNSRFAWMTRKSEETITPWNFEEVVDKGASAQSFIERMTNFDKNLPNEKVLPKHSLLYEYFTVYNELTKVKYVTEGMRKPAFLSGEQKKAIVDLLFKTNRKVTVKQLKEDYFKKIECFDSVEISGVEDRFNASLGTYHDLLKIIKDKDFLDNEENEDILEDIVLTLTLFEDREMIEERLKTYAHLFDDKVMKQLKRRRYTGWGRLSRKLINGIRDKQSGKTILDFLKSDGFANRNFMQLIHDDSLTFKEDIQKAQVSGQGDSLHEHIANLAGSPAIKKGILQTVKVVDELVKVMGRHKPENIVIEMARENQTTQKGQKNSRERMKRIEEGIKELGSQILKEHPVENTQLQNEKLYLYYLQNGRDMYVDQELDINRLSDYDVDHIVPQSFLKDDSIDNKVLTRSDKARGKSDNVPSEEVVKKMKNYWRQLLNAKLITQRKFDNLTKAERGGLSELDKAGFIKRQLVETRQITKHVAQILDSRMNTKYDENDKLIREVKVITLKSKLVSDFRKDFQFYKVREINNYHHAHDAYLNAVVGTALIKKYPKLESEFVYGDYKVYDVRKMIAKSEQEIGKATAKYFFYSNIMNFFKTEITLANGEIRKRPLIETNGETGEIVWDKGRDFATVRKVLSMPQVNIVKKTEVQTGGFSKESILPKRNSDKLIARKKDWDPKKYGGFDSPTVAYSVLVVAKVEKGKSKKLKSVKELLGITIMERSSFEKNPIDFLEAKGYKEVKKDLIIKLPKYSLFELENGRKRMLASAGELQKGNELALPSKYVNFLYLASHYEKLKGSPEDNEQKQLFVEQHKHYLDEIIEQISEFSKRVILADANLDKVLSAYNKHRDKPIREQAENIIHLFTLTNLGAPAAFKYFDTTIDRKRYTSTKEVLDATLIHQSITGLYETRIDLSQLGGDGGGGGGSGGGGSGGGGSGGGGSGGGGSGGGGSGGTAPLEEEYRLFLEAPIQNVTLLEQWKREIPKVWAEINPPGLASTQAPIHVQLLSTALPVRVRQYPITLEAKRSLRETIRKFRAAGILRPVHSPWNTPLLPVRKSGTSEYRMVQDLREVNKRVETIHPTVPNPYTLLSLLPPDRIWYSVLDLKDAFFCIPLAPESQLIFAFEWADAEEGESGQLTWTRLPQGFKNSPTLFDEALNRDLQGFRLDHPSVSLLQYVDDLLIAADTQAACLSATRDLLMTLAELGYRVSGKKAQLCQEEVTYLGFKIHKGSRSLSNSRTQAILQIPVPKTKRQVREFLGTIGYCRLWIPGFAELAQPLYAATRGGNDPLVWGEKEEEAFQSLKLALTQPPALALPSLDKPFQLFVEETSGAAKGVLTQALGPWKRPVAYLSKRLDPVAAGWPRCLRAIAAAALLTREASKLTFGQDIEITSSHNLESLLRSPPDKWLTNARITQYQVLLLDPPRVRFKQTAALNPATLLPETDDTLPIHHCLDTLDSLTSTRPDLTDQPLAQAEATLFTDGSSYIRDGKRYAGAAVVTLDSVIWAEPLPIGTSAQKAELIALTKALEWSKDKSVNIYTDSRYAFATLHVHGMIYRERGLLTAGGKAIKNAPEILALLTAVWLPKRVAVMHCKGHQKDDAPTSTGNRRADEVAREVAIRPLSTQATISAGKRTADGSEFEKRTADGSEFESPKKKAKVE

SEQ ID NO: 6201 - protein, 2117 aa, synthetic construct
MPAAKRVKLDGGDKKYSIGLDIGTNSVGWAVITDEYKVPSKKFKVLGNTDRHSIKKNLIGALLFDSGETAEATRLKRTARRRYTRRKNRICYLQEIFSNEMAKVDDSFFHRLEESFLVEEDKKHERHPIFGNIVDEVAYHEKYPTIYHLRKKLVDSTDKADLRLIYLALAHMIKFRGHFLIEGDLNPDNSDVDKLFIQLVQTYNQLFEENPINASGVDAKAILSARLSKSRRLENLIAQLPGEKKNGLFGNLIALSLGLTPNFKSNFDLAEDAKLQLSKDTYDDDLDNLLAQIGDQYADLFLAAKNLSDAILLSDILRVNTEITKAPLSASMIKRYDEHHQDLTLLKALVRQQLPEKYKEIFFDQSKNGYAGYIDGGASQEEFYKFIKPILEKMDGTEELLVKLNREDLLRKQRTFDNGSIPHQIHLGELHAILRRQEDFYPFLKDNREKIEKILTFRIPYYVGPLARGNSRFAWMTRKSEETITPWNFEEVVDKGASAQSFIERMTNFDKNLPNEKVLPKHSLLYEYFTVYNELTKVKYVTEGMRKPAFLSGEQKKAIVDLLFKTNRKVTVKQLKEDYFKKIECFDSVEISGVEDRFNASLGTYHDLLKIIKDKDFLDNEENEDILEDIVLTLTLFEDREMIEERLKTYAHLFDDKVMKQLKRRRYTGWGRLSRKLINGIRDKQSGKTILDFLKSDGFANRNFMQLIHDDSLTFKEDIQKAQVSGQGDSLHEHIANLAGSPAIKKGILQTVKVVDELVKVMGRHKPENIVIEMARENQTTQKGQKNSRERMKRIEEGIKELGSQILKEHPVENTQLQNEKLYLYYLQNGRDMYVDQELDINRLSDYDVDHIVPQSFLKDDSIDNKVLTRSDKARGKSDNVPSEEVVKKMKNYWRQLLNAKLITQRKFDNLTKAERGGLSELDKAGFIKRQLVETRQITKHVAQILDSRMNTKYDENDKLIREVKVITLKSKLVSDFRKDFQFYKVREINNYHHAHDAYLNAVVGTALIKKYPKLESEFVYGDYKVYDVRKMIAKSEQEIGKATAKYFFYSNIMNFFKTEITLANGEIRKRPLIETNGETGEIVWDKGRDFATVRKVLSMPQVNIVKKTEVQTGGFSKESILPKRNSDKLIARKKDWDPKKYGGFDSPTVAYSVLVVAKVEKGKSKKLKSVKELLGITIMERSSFEKNPIDFLEAKGYKEVKKDLIIKLPKYSLFELENGRKRMLASAGELQKGNELALPSKYVNFLYLASHYEKLKGSPEDNEQKQLFVEQHKHYLDEIIEQISEFSKRVILADANLDKVLSAYNKHRDKPIREQAENIIHLFTLTNLGAPAAFKYFDTTIDRKRYTSTKEVLDATLIHQSITGLYETRIDLSQLGGDGGGGGGSGGGGSGGGGSGGGGSGGGGSGGGGSGGTAPLEEEYRLFLEAPIQNVTLLEQWKREIPKVWAEINPPGLASTQAPIHVQLLSTALPVRVRQYPITLEAKRSLRETIRKFRAAGILRPVHSPWNTPLLPVRKSGTSEYRMVQDLREVNKRVETIHPTVPNPYTLLSLLPPDRIWYSVLDLKDAFFCIPLAPESQLIFAFEWADAEEGESGQLTWTRLPQGFKNSPTLFNEALNRDLQGFRLDHPSVSLLQYVDDLLIAADTQAACLSATRDLLMTLAELGYRVSGKKAQLCQEEVTYLGFKIHKGSRSLSNSRTQAILQIPVPKTKRQVREFLGTIGYCRLWIPGFAELAQPLYAATRPGNDPLVWGEKEEEAFQSLKLALTQPPALALPSLDKPFQLFVEETSGAAKGVLTQALGPWKRPVAYLSKRLDPVAAGWPRCLRAIAAAALLTREASKLTFGQDIEITSSHNLESLLRSPPDKWLTNARITQYQVLLLDPPRVRFKQTAALNPATLLPETDDTLPIHHCLDTLDSLTSTRPDLTDQPLAQAEATLFTDGSSYIRDGKRYAGAAVVTLDSVIWAEPLPIGTSAQKAELIALTKALEWSKDKSVNIYTDSRYAFATLHVHGMIYRERGWLTAGGKAIKNAPEILALLTAVWLPKRVAVMHCKGHQKDDAPTSTGNRRADEVAREVAIRPLSTQATISAGKRTADGSEFEKRTADGSEFESPKKKAKVE

SEQ ID NO: 6202 - protein, 2121 aa, synthetic construct
MPAAKRVKLDGGDKKYSIGLDIGTNSVGWAVITDEYKVPSKKFKVLGNTDRHSIKKNLIGALLFDSGETAEATRLKRTARRRYTRRKNRICYLQEIFSNEMAKVDDSFFHRLEESFLVEEDKKHERHPIFGNIVDEVAYHEKYPTIYHLRKKLVDSTDKADLRLIYLALAHMIKFRGHFLIEGDLNPDNSDVDKLFIQLVQTYNQLFEENPINASGVDAKAILSARLSKSRRLENLIAQLPGEKKNGLFGNLIALSLGLTPNFKSNFDLAEDAKLQLSKDTYDDDLDNLLAQIGDQYADLFLAAKNLSDAILLSDILRVNTEITKAPLSASMIKRYDEHHQDLTLLKALVRQQLPEKYKEIFFDQSKNGYAGYIDGGASQEEFYKFIKPILEKMDGTEELLVKLNREDLLRKQRTFDNGSIPHQIHLGELHAILRRQEDFYPFLKDNREKIEKILTFRIPYYVGPLARGNSRFAWMTRKSEETITPWNFEEVVDKGASAQSFIERMTNFDKNLPNEKVLPKHSLLYEYFTVYNELTKVKYVTEGMRKPAFLSGEQKKAIVDLLFKTNRKVTVKQLKEDYFKKIECFDSVEISGVEDRFNASLGTYHDLLKIIKDKDFLDNEENEDILEDIVLTLTLFEDREMIEERLKTYAHLFDDKVMKQLKRRRYTGWGRLSRKLINGIRDKQSGKTILDFLKSDGFANRNFMQLIHDDSLTFKEDIQKAQVSGQGDSLHEHIANLAGSPAIKKGILQTVKVVDELVKVMGRHKPENIVIEMARENQTTQKGQKNSRERMKRIEEGIKELGSQILKEHPVENTQLQNEKLYLYYLQNGRDMYVDQELDINRLSDYDVDHIVPQSFLKDDSIDNKVLTRSDKARGKSDNVPSEEVVKKMKNYWRQLLNAKLITQRKFDNLTKAERGGLSELDKAGFIKRQLVETRQITKHVAQILDSRMNTKYDENDKLIREVKVITLKSKLVSDFRKDFQFYKVREINNYHHAHDAYLNAVVGTALIKKYPKLESEFVYGDYKVYDVRKMIAKSEQEIGKATAKYFFYSNIMNFFKTEITLANGEIRKRPLIETNGETGEIVWDKGRDFATVRKVLSMPQVNIVKKTEVQTGGFSKESILPKRNSDKLIARKKDWDPKKYGGFDSPTVAYSVLVVAKVEKGKSKKLKSVKELLGITIMERSSFEKNPIDFLEAKGYKEVKKDLIIKLPKYSLFELENGRKRMLASAGELQKGNELALPSKYVNFLYLASHYEKLKGSPEDNEQKQLFVEQHKHYLDEIIEQISEFSKRVILADANLDKVLSAYNKHRDKPIREQAENIIHLFTLTNLGAPAAFKYFDTTIDRKRYTSTKEVLDATLIHQSITGLYETRIDLSQLGGDGGGGGGSGGGGSGGGGSGGGGSGGGGSGGGGSGGTVSLQDEHRLFDIPVTTSLPDVWLQDFPQAWAETGGLGRAKCQAPIIIDLKPTAVPVSIKQYPMSLEAHMGIRQHIIKFLELGVLRPCRSPWNTPLLPVKKPGTQDYRPVQDLREINKRTVDIHPTVPNPYNLLSTLKPDYSWYTVLDLKDAFFCLPLAPQSQELFAFEWKDPERGISGQLTWTRLPQGFKNSPTLFDEALHRDLTDFRTQHPEVTLLQYVDDLLLAAPTKKACTQGTRHLLQELGEKGYRASAKKAQICQTKVTYLGYILSEGKRWLTPGRIETVARIPPPRNPREVREFLGTAGFCRLWIPGFAELAAPLYALTKESTPFTWQTEHQLAFEALKKALLSAPALGLPDTSKPFTLFLDERQGIAKGVLTQKLGPWKRPVAYLSKKLDPVAAGWPPCLRIMAATAMLVKDSAKLTLGQPLTVITPHTLEAIVRQPPDRWITNARLTHYQALLLDTDRVQFGPPVTLNPATLLPVPENQPSPHDCRQVLAETHGTREDLKDQELPDADHTWYTDGSSYLDSGTRRAGAAVVDGHNTIWAQSLPPGTSAQKAELIALTKALELSKGKKANIYTDSRYAFATAHTHGSIYERRGLLTSEGKEIKNKAEIIALLKALFLPQEVAIIHCPGHQKGQDPVAVGNRQADRVARQAAMAEVLTLATEPDNTSHITAGKRTADGSEFEKRTADGSEFESPKKKAKVE

SEQ ID NO: 6203 - protein, 2121 aa, synthetic construct
MPAAKRVKLDGGDKKYSIGLDIGTNSVGWAVITDEYKVPSKKFKVLGNTDRHSIKKNLIGALLFDSGETAEATRLKRTARRRYTRRKNRICYLQEIFSNEMAKVDDSFFHRLEESFLVEEDKKHERHPIFGNIVDEVAYHEKYPTIYHLRKKLVDSTDKADLRLIYLALAHMIKFRGHFLIEGDLNPDNSDVDKLFIQLVQTYNQLFEENPINASGVDAKAILSARLSKSRRLENLIAQLPGEKKNGLFGNLIALSLGLTPNFKSNFDLAEDAKLQLSKDTYDDDLDNLLAQIGDQYADLFLAAKNLSDAILLSDILRVNTEITKAPLSASMIKRYDEHHQDLTLLKALVRQQLPEKYKEIFFDQSKNGYAGYIDGGASQEEFYKFIKPILEKMDGTEELLVKLNREDLLRKQRTFDNGSIPHQIHLGELHAILRRQEDFYPFLKDNREKIEKILTFRIPYYVGPLARGNSRFAWMTRKSEETITPWNFEEVVDKGASAQSFIERMTNFDKNLPNEKVLPKHSLLYEYFTVYNELTKVKYVTEGMRKPAFLSGEQKKAIVDLLFKTNRKVTVKQLKEDYFKKIECFDSVEISGVEDRFNASLGTYHDLLKIIKDKDFLDNEENEDILEDIVLTLTLFEDREMIEERLKTYAHLFDDKVMKQLKRRRYTGWGRLSRKLINGIRDKQSGKTILDFLKSDGFANRNFMQLIHDDSLTFKEDIQKAQVSGQGDSLHEHIANLAGSPAIKKGILQTVKVVDELVKVMGRHKPENIVIEMARENQTTQKGQKNSRERMKRIEEGIKELGSQILKEHPVENTQLQNEKLYLYYLQNGRDMYVDQELDINRLSDYDVDHIVPQSFLKDDSIDNKVLTRSDKARGKSDNVPSEEVVKKMKNYWRQLLNAKLITQRKFDNLTKAERGGLSELDKAGFIKRQLVETRQITKHVAQILDSRMNTKYDENDKLIREVKVITLKSKLVSDFRKDFQFYKVREINNYHHAHDAYLNAVVGTALIKKYPKLESEFVYGDYKVYDVRKMIAKSEQEIGKATAKYFFYSNIMNFFKTEITLANGEIRKRPLIETNGETGEIVWDKGRDFATVRKVLSMPQVNIVKKTEVQTGGFSKESILPKRNSDKLIARKKDWDPKKYGGFDSPTVAYSVLVVAKVEKGKSKKLKSVKELLGITIMERSSFEKNPIDFLEAKGYKEVKKDLIIKLPKYSLFELENGRKRMLASAGELQKGNELALPSKYVNFLYLASHYEKLKGSPEDNEQKQLFVEQHKHYLDEIIEQISEFSKRVILADANLDKVLSAYNKHRDKPIREQAENIIHLFTLTNLGAPAAFKYFDTTIDRKRYTSTKEVLDATLIHQSITGLYETRIDLSQLGGDGGGGGGSGGGGSGGGGSGGGGSGGGGSGGGGSGGTVSLQDEHRLFDIPVTTSLPDVWLQDFPQAWAETGGLGRAKCQAPIIIDLKPTAVPVSIKQYPMSLEAHMGIRQHIIKFLELGVLRPCRSPWNTPLLPVKKPGTQDYRPVQDLREINKRTVDIHPTVPNPYNLLSTLKPDYSWYTVLDLKDAFFCLPLAPQSQELFAFEWKDPERGISGQLTWTRLPQGFKNSPTLFNEALHRDLTDFRTQHPEVTLLQYVDDLLLAAPTKKACTQGTRHLLQELGEKGYRASAKKAQICQTKVTYLGYILSEGKRWLTPGRIETVARIPPPRNPREVREFLGTAGFCRLWIPGFAELAAPLYALTKPSTPFTWQTEHQLAFEALKKALLSAPALGLPDTSKPFTLFLDERQGIAKGVLTQKLGPWKRPVAYLSKKLDPVAAGWPPCLRIMAATAMLVKDSAKLTLGQPLTVITPHTLEAIVRQPPDRWITNARLTHYQALLLDTDRVQFGPPVTLNPATLLPVPENQPSPHDCRQVLAETHGTREDLKDQELPDADHTWYTDGSSYLDSGTRRAGAAVVDGHNTIWAQSLPPGTSAQKAELIALTKALELSKGKKANIYTDSRYAFATAHTHGSIYERRGWLTSEGKEIKNKAEIIALLKALFLPQEVAIIHCPGHQKGQDPVAVGNRQADRVARQAAMAEVLTLATEPDNTSHITAGKRTADGSEFEKRTADGSEFESPKKKAKVE

SEQ ID NO: 6204 - protein, 2106 aa, synthetic construct
MPAAKRVKLDGGDKKYSIGLDIGTNSVGWAVITDEYKVPSKKFKVLGNTDRHSIKKNLIGALLFDSGETAEATRLKRTARRRYTRRKNRICYLQEIFSNEMAKVDDSFFHRLEESFLVEEDKKHERHPIFGNIVDEVAYHEKYPTIYHLRKKLVDSTDKADLRLIYLALAHMIKFRGHFLIEGDLNPDNSDVDKLFIQLVQTYNQLFEENPINASGVDAKAILSARLSKSRRLENLIAQLPGEKKNGLFGNLIALSLGLTPNFKSNFDLAEDAKLQLSKDTYDDDLDNLLAQIGDQYADLFLAAKNLSDAILLSDILRVNTEITKAPLSASMIKRYDEHHQDLTLLKALVRQQLPEKYKEIFFDQSKNGYAGYIDGGASQEEFYKFIKPILEKMDGTEELLVKLNREDLLRKQRTFDNGSIPHQIHLGELHAILRRQEDFYPFLKDNREKIEKILTFRIPYYVGPLARGNSRFAWMTRKSEETITPWNFEEVVDKGASAQSFIERMTNFDKNLPNEKVLPKHSLLYEYFTVYNELTKVKYVTEGMRKPAFLSGEQKKAIVDLLFKTNRKVTVKQLKEDYFKKIECFDSVEISGVEDRFNASLGTYHDLLKIIKDKDFLDNEENEDILEDIVLTLTLFEDREMIEERLKTYAHLFDDKVMKQLKRRRYTGWGRLSRKLINGIRDKQSGKTILDFLKSDGFANRNFMQLIHDDSLTFKEDIQKAQVSGQGDSLHEHIANLAGSPAIKKGILQTVKVVDELVKVMGRHKPENIVIEMARENQTTQKGQKNSRERMKRIEEGIKELGSQILKEHPVENTQLQNEKLYLYYLQNGRDMYVDQELDINRLSDYDVDHIVPQSFLKDDSIDNKVLTRSDKARGKSDNVPSEEVVKKMKNYWRQLLNAKLITQRKFDNLTKAERGGLSELDKAGFIKRQLVETRQITKHVAQILDSRMNTKYDENDKLIREVKVITLKSKLVSDFRKDFQFYKVREINNYHHAHDAYLNAVVGTALIKKYPKLESEFVYGDYKVYDVRKMIAKSEQEIGKATAKYFFYSNIMNFFKTEITLANGEIRKRPLIETNGETGEIVWDKGRDFATVRKVLSMPQVNIVKKTEVQTGGFSKESILPKRNSDKLIARKKDWDPKKYGGFDSPTVAYSVLVVAKVEKGKSKKLKSVKELLGITIMERSSFEKNPIDFLEAKGYKEVKKDLIIKLPKYSLFELENGRKRMLASAGELQKGNELALPSKYVNFLYLASHYEKLKGSPEDNEQKQLFVEQHKHYLDEIIEQISEFSKRVILADANLDKVLSAYNKHRDKPIREQAENIIHLFTLTNLGAPAAFKYFDTTIDRKRYTSTKEVLDATLIHQSITGLYETRIDLSQLGGDGGGGGGSGGGGSGGGGSGGGGSGGGGSGGGGSGGVPWILKKPLELTIKLDLEEQQGTLLNNSILSKKGKEELKQLFEKYSALWQSWENQVGHRRIRPHKIATGTVKPTPQKQYHINPKAKPDIQIVINDLLKQGVLIQKESTMNTPVYPVPKPNGRWRMVLDYRAVNKVTPLIAVQNQHSYGILGSLFKGRYKTTIDLSNGFWAHPIVPEDYWITAFTWQGKQYCWTVLPQGFLNSPGLFNGDVVDLLQGIPNVEVYVDDVYISHDSEKEHLEYLDILFNRLKEAGYIISLKKSNIANSIVDFLGFQITNEGRGLTDTFKEKLENITAPTTLKQLQSILGLLNFARNFIPDFTELIAPLYALIPKSPKNYVPWQIEHSTTLETLITKLNGAEYLQGRKGDKTLIMKVNASYTTGYIRYYNEGEKKPISYVSIVFSKTELKFTELEKLLTTVHKGLLKALDLSMGQNIHVYSPIVSMQNIQKTPQTAKKALASRWLSWLSYLEDPRIRFFYDPQMPALKDLPAVDTGKDNKKHPSNFQHIFYTDGSAITSPTKEGHLNAGMGIVYFINKDGNLQKQQEWSISLGNHTAQFAEIAAFEFALKKCLPLGGNILVVTDSNYVAKAYNEELDVWASNGFVNNRKKPLKHISKWKSVADLKRLRPDVVVTHEPGHQKLDSSPHAYGNNLADQLATQASFKVHAGKRTADGSEFEKRTADGSEFESPKKKAKVE

SEQ ID NO: 6205 - protein, 2114 aa, synthetic construct
MPAAKRVKLDGGDKKYSIGLDIGTNSVGWAVITDEYKVPSKKFKVLGNTDRHSIKKNLIGALLFDSGETAEATRLKRTARRRYTRRKNRICYLQEIFSNEMAKVDDSFFHRLEESFLVEEDKKHERHPIFGNIVDEVAYHEKYPTIYHLRKKLVDSTDKADLRLIYLALAHMIKFRGHFLIEGDLNPDNSDVDKLFIQLVQTYNQLFEENPINASGVDAKAILSARLSKSRRLENLIAQLPGEKKNGLFGNLIALSLGLTPNFKSNFDLAEDAKLQLSKDTYDDDLDNLLAQIGDQYADLFLAAKNLSDAILLSDILRVNTEITKAPLSASMIKRYDEHHQDLTLLKALVRQQLPEKYKEIFFDQSKNGYAGYIDGGASQEEFYKFIKPILEKMDGTEELLVKLNREDLLRKQRTFDNGSIPHQIHLGELHAILRRQEDFYPFLKDNREKIEKILTFRIPYYVGPLARGNSRFAWMTRKSEETITPWNFEEVVDKGASAQSFIERMTNFDKNLPNEKVLPKHSLLYEYFTVYNELTKVKYVTEGMRKPAFLSGEQKKAIVDLLFKTNRKVTVKQLKEDYFKKIECFDSVEISGVEDRFNASLGTYHDLLKIIKDKDFLDNEENEDILEDIVLTLTLFEDREMIEERLKTYAHLFDDKVMKQLKRRRYTGWGRLSRKLINGIRDKQSGKTILDFLKSDGFANRNFMQLIHDDSLTFKEDIQKAQVSGQGDSLHEHIANLAGSPAIKKGILQTVKVVDELVKVMGRHKPENIVIEMARENQTTQKGQKNSRERMKRIEEGIKELGSQILKEHPVENTQLQNEKLYLYYLQNGRDMYVDQELDINRLSDYDVDHIVPQSFLKDDSIDNKVLTRSDKARGKSDNVPSEEVVKKMKNYWRQLLNAKLITQRKFDNLTKAERGGLSELDKAGFIKRQLVETRQITKHVAQILDSRMNTKYDENDKLIREVKVITLKSKLVSDFRKDFQFYKVREINNYHHAHDAYLNAVVGTALIKKYPKLESEFVYGDYKVYDVRKMIAKSEQEIGKATAKYFFYSNIMNFFKTEITLANGEIRKRPLIETNGETGEIVWDKGRDFATVRKVLSMPQVNIVKKTEVQTGGFSKESILPKRNSDKLIARKKDWDPKKYGGFDSPTVAYSVLVVAKVEKGKSKKLKSVKELLGITIMERSSFEKNPIDFLEAKGYKEVKKDLIIKLPKYSLFELENGRKRMLASAGELQKGNELALPSKYVNFLYLASHYEKLKGSPEDNEQKQLFVEQHKHYLDEIIEQISEFSKRVILADANLDKVLSAYNKHRDKPIREQAENIIHLFTLTNLGAPAAFKYFDTTIDRKRYTSTKEVLDATLIHQSITGLYETRIDLSQLGGDGGGGGGSGGGGSGGGGSGGGGSGGGGSGGGGSGGTLQLEEEYRLFEPESTQKQEMDIWLKNFPQAWAETGGMGTAHCQAPVLIQLKATATPISIRQYPMPHEAYQGIKPHIRRMLDQGILKPCQSPWNTPLLPVKKPGTEDYRPVQDLREVNKRVEDIHPTVPNPYNLLSTLPPSHPWYTVLDLKDAFFCLRLHSESQLLFAFEWRDPEIGLSGQLTWTRLPQGFKNSPTLFNEALHSDLADFRVRYPALVLLQYVDDLLLAAATRTECLEGTKALLETLGNKGYRASAKKAQICLQEVTYLGYSLKDGQRWLTKARKEAILSIPVPKNSRQVREFLGTAGYCRLWIPGFAELAAPLYPLTRPGTLFQWGTEQQLAFEDIKKALLSSPALGLPDITKPFELFIDENSGFAKGVLVQKLGPWKRPVAYLSKKLDTVASGWPPCLRMVAAIAILVKDAGKLTLGQPLTILTSHPVEALVRQPPNKWLSNARMTHYQAMLLDAERVHFGPTVSLNPATLLPLPSGGNHHDCLQILAETHGTRPDLTDQPLPDADLTWYTDGSSFIRNGEREAGAAVTTESEVIWAAPLPPGTSAQRAELIALTQALKMAEGKKLTVYTDSRYAFATTHVHGEIYRRRGWLTSEGKEIKNKNEILALLEALFLPKRLSIIHCPGHQKGDSPQAKGNRLADDTAKKAATETHSSLTVLPAGKRTADGSEFEKRTADGSEFESPKKKAKVE

SEQ ID NO: 6206 - protein, 2106 aa, synthetic construct
MPAAKRVKLDGGDKKYSIGLDIGTNSVGWAVITDEYKVPSKKFKVLGNTDRHSIKKNLIGALLFDSGETAEATRLKRTARRRYTRRKNRICYLQEIFSNEMAKVDDSFFHRLEESFLVEEDKKHERHPIFGNIVDEVAYHEKYPTIYHLRKKLVDSTDKADLRLIYLALAHMIKFRGHFLIEGDLNPDNSDVDKLFIQLVQTYNQLFEENPINASGVDAKAILSARLSKSRRLENLIAQLPGEKKNGLFGNLIALSLGLTPNFKSNFDLAEDAKLQLSKDTYDDDLDNLLAQIGDQYADLFLAAKNLSDAILLSDILRVNTEITKAPLSASMIKRYDEHHQDLTLLKALVRQQLPEKYKEIFFDQSKNGYAGYIDGGASQEEFYKFIKPILEKMDGTEELLVKLNREDLLRKQRTFDNGSIPHQIHLGELHAILRRQEDFYPFLKDNREKIEKILTFRIPYYVGPLARGNSRFAWMTRKSEETITPWNFEEVVDKGASAQSFIERMTNFDKNLPNEKVLPKHSLLYEYFTVYNELTKVKYVTEGMRKPAFLSGEQKKAIVDLLFKTNRKVTVKQLKEDYFKKIECFDSVEISGVEDRFNASLGTYHDLLKIIKDKDFLDNEENEDILEDIVLTLTLFEDREMIEERLKTYAHLFDDKVMKQLKRRRYTGWGRLSRKLINGIRDKQSGKTILDFLKSDGFANRNFMQLIHDDSLTFKEDIQKAQVSGQGDSLHEHIANLAGSPAIKKGILQTVKVVDELVKVMGRHKPENIVIEMARENQTTQKGQKNSRERMKRIEEGIKELGSQILKEHPVENTQLQNEKLYLYYLQNGRDMYVDQELDINRLSDYDVDHIVPQSFLKDDSIDNKVLTRSDKARGKSDNVPSEEVVKKMKNYWRQLLNAKLITQRKFDNLTKAERGGLSELDKAGFIKRQLVETRQITKHVAQILDSRMNTKYDENDKLIREVKVITLKSKLVSDFRKDFQFYKVREINNYHHAHDAYLNAVVGTALIKKYPKLESEFVYGDYKVYDVRKMIAKSEQEIGKATAKYFFYSNIMNFFKTEITLANGEIRKRPLIETNGETGEIVWDKGRDFATVRKVLSMPQVNIVKKTEVQTGGFSKESILPKRNSDKLIARKKDWDPKKYGGFDSPTVAYSVLVVAKVEKGKSKKLKSVKELLGITIMERSSFEKNPIDFLEAKGYKEVKKDLIIKLPKYSLFELENGRKRMLASAGELQKGNELALPSKYVNFLYLASHYEKLKGSPEDNEQKQLFVEQHKHYLDEIIEQISEFSKRVILADANLDKVLSAYNKHRDKPIREQAENIIHLFTLTNLGAPAAFKYFDTTIDRKRYTSTKEVLDATLIHQSITGLYETRIDLSQLGGDGGGGGGSGGGGSGGGGSGGGGSGGGGSGGGGSGGVPWLTQQPLQLTILVPLQEYQEKILSKTALPEDQKQQLKTLFVKYDNLWQHWENQVGHRKIRPHNIATGDYPPRPQKQYPINPKAKPSIQIVIDDLLKQGVLTPQNSTMNTPVYPVPKPDGRWRMVLDYREVNKTIPLTAAQNQHSAGILATIVRQKYKTTLDLANGFWAHPITPESYWLTAFTWQGKQYCWTRLPQGFLNSPALFNADVVDLLKEIPNVQVYVDDIYLSHDDPKEHVQQLEKVFQILLQAGYVVSLKKSEIGQKTVEFLGFNITKEGRGLTDTFKTKLLNITPPKDLKQLQSILGLLNFARNFIPNFAELVQPLYNLIAPAKGKYIEWSEENTKQLNMVIEALNTASNLEERLPEQRLVIKVNTSPSAGYVRYYNETGKKPIMYLNYVFSKAELKFSMLEKLLTTMHKALIKAMDLAMGQEILVYSPIVSMTKIQKTPLPERKALPIRWITWMTYLEDPRIQFHYDKTLPELKHIPDVYTSSQSPVKHPSQYEGVFYTDGSAIKSPDPTKSNNAGMGIVHATYKPEYQVLNQWSIPLGNHTAQMAEIAAVEFACKKALKIPGPVLVITDSFYVAESANKELPYWKSNGFVNNKKKPLKHISKWKSIAECLSMKPDITIQHEKGISLQIPVFILKGNALADKLATQGSYVVNAGKRTADGSEFEKRTADGSEFESPKKKAKVE

SEQ ID NO: 6207 - protein, 2106 aa, synthetic construct
MPAAKRVKLDGGDKKYSIGLDIGTNSVGWAVITDEYKVPSKKFKVLGNTDRHSIKKNLIGALLFDSGETAEATRLKRTARRRYTRRKNRICYLQEIFSNEMAKVDDSFFHRLEESFLVEEDKKHERHPIFGNIVDEVAYHEKYPTIYHLRKKLVDSTDKADLRLIYLALAHMIKFRGHFLIEGDLNPDNSDVDKLFIQLVQTYNQLFEENPINASGVDAKAILSARLSKSRRLENLIAQLPGEKKNGLFGNLIALSLGLTPNFKSNFDLAEDAKLQLSKDTYDDDLDNLLAQIGDQYADLFLAAKNLSDAILLSDILRVNTEITKAPLSASMIKRYDEHHQDLTLLKALVRQQLPEKYKEIFFDQSKNGYAGYIDGGASQEEFYKFIKPILEKMDGTEELLVKLNREDLLRKQRTFDNGSIPHQIHLGELHAILRRQEDFYPFLKDNREKIEKILTFRIPYYVGPLARGNSRFAWMTRKSEETITPWNFEEVVDKGASAQSFIERMTNFDKNLPNEKVLPKHSLLYEYFTVYNELTKVKYVTEGMRKPAFLSGEQKKAIVDLLFKTNRKVTVKQLKEDYFKKIECFDSVEISGVEDRFNASLGTYHDLLKIIKDKDFLDNEENEDILEDIVLTLTLFEDREMIEERLKTYAHLFDDKVMKQLKRRRYTGWGRLSRKLINGIRDKQSGKTILDFLKSDGFANRNFMQLIHDDSLTFKEDIQKAQVSGQGDSLHEHIANLAGSPAIKKGILQTVKVVDELVKVMGRHKPENIVIEMARENQTTQKGQKNSRERMKRIEEGIKELGSQILKEHPVENTQLQNEKLYLYYLQNGRDMYVDQELDINRLSDYDVDHIVPQSFLKDDSIDNKVLTRSDKARGKSDNVPSEEVVKKMKNYWRQLLNAKLITQRKFDNLTKAERGGLSELDKAGFIKRQLVETRQITKHVAQILDSRMNTKYDENDKLIREVKVITLKSKLVSDFRKDFQFYKVREINNYHHAHDAYLNAVVGTALIKKYPKLESEFVYGDYKVYDVRKMIAKSEQEIGKATAKYFFYSNIMNFFKTEITLANGEIRKRPLIETNGETGEIVWDKGRDFATVRKVLSMPQVNIVKKTEVQTGGFSKESILPKRNSDKLIARKKDWDPKKYGGFDSPTVAYSVLVVAKVEKGKSKKLKSVKELLGITIMERSSFEKNPIDFLEAKGYKEVKKDLIIKLPKYSLFELENGRKRMLASAGELQKGNELALPSKYVNFLYLASHYEKLKGSPEDNEQKQLFVEQHKHYLDEIIEQISEFSKRVILADANLDKVLSAYNKHRDKPIREQAENIIHLFTLTNLGAPAAFKYFDTTIDRKRYTSTKEVLDATLIHQSITGLYETRIDLSQLGGDGGGGGGSGGGGSGGGGSGGGGSGGGGSGGGGSGGVPWLTQQPLQLTILVPLQEYQEKILSKTALPEDQKQQLKTLFVKYDNLWQHWENQVGHRKIRPHNIATGDYPPRPQKQYPINPKAKPSIQIVIDDLLKQGVLTPQNSTMNTPVYPVPKPDGRWRMVLDYREVNKTIPLTAAQNQHSAGILATIVRQKYKTTLDLANGFWAHPITPESYWLTAFTWQGKQYCWTRLPQGFLNSPALFNADVVDLLKEIPNVQVYVDDIYLSHDDPKEHVQQLEKVFQILLQAGYVVSLKKSEIGQKTVEFLGFNITKEGRGLTDTFKTKLLNITPPKDLKQLQSILGKLNFARNFIPNFAELVQPLYNLIAPAKGKYIEWSEENTKQLNMVIEALNTASNLEERLPEQRLVIKVNTSPSAGYVRYYNETGKKPIMYLNYVFSKAELKFSMLEKLLTTMHKALIKAMDLAMGQEILVYSPIVSMTKIQKTPLPERKALPIRWITWMTYLEDPRIQFHYDKTLPELKHIPDVYTSSQSPVKHPSQYEGVFYTDGSAIKSPDPTKSNNAGMGIVHATYKPEYQVLNQWSIPLGNHTAQMAEIAAVEFACKKALKIPGPVLVITDSFYVAESANKELPYWKSNGFVNNKKKPLKHISKWKSIAECLSMKPDITIQHEKGISLQIPVFILKGNALADKLATQGSYVVNAGKRTADGSEFEKRTADGSEFESPKKKAKVE

SEQ ID NO: 6208 - protein, 2195 aa, synthetic construct
MPAAKRVKLDGGDKKYSIGLDIGTNSVGWAVITDEYKVPSKKFKVLGNTDRHSIKKNLIGALLFDSGETAEATRLKRTARRRYTRRKNRICYLQEIFSNEMAKVDDSFFHRLEESFLVEEDKKHERHPIFGNIVDEVAYHEKYPTIYHLRKKLVDSTDKADLRLIYLALAHMIKFRGHFLIEGDLNPDNSDVDKLFIQLVQTYNQLFEENPINASGVDAKAILSARLSKSRRLENLIAQLPGEKKNGLFGNLIALSLGLTPNFKSNFDLAEDAKLQLSKDTYDDDLDNLLAQIGDQYADLFLAAKNLSDAILLSDILRVNTEITKAPLSASMIKRYDEHHQDLTLLKALVRQQLPEKYKEIFFDQSKNGYAGYIDGGASQEEFYKFIKPILEKMDGTEELLVKLNREDLLRKQRTFDNGSIPHQIHLGELHAILRRQEDFYPFLKDNREKIEKILTFRIPYYVGPLARGNSRFAWMTRKSEETITPWNFEEVVDKGASAQSFIERMTNFDKNLPNEKVLPKHSLLYEYFTVYNELTKVKYVTEGMRKPAFLSGEQKKAIVDLLFKTNRKVTVKQLKEDYFKKIECFDSVEISGVEDRFNASLGTYHDLLKIIKDKDFLDNEENEDILEDIVLTLTLFEDREMIEERLKTYAHLFDDKVMKQLKRRRYTGWGRLSRKLINGIRDKQSGKTILDFLKSDGFANRNFMQLIHDDSLTFKEDIQKAQVSGQGDSLHEHIANLAGSPAIKKGILQTVKVVDELVKVMGRHKPENIVIEMARENQTTQKGQKNSRERMKRIEEGIKELGSQILKEHPVENTQLQNEKLYLYYLQNGRDMYVDQELDINRLSDYDVDHIVPQSFLKDDSIDNKVLTRSDKARGKSDNVPSEEVVKKMKNYWRQLLNAKLITQRKFDNLTKAERGGLSELDKAGFIKRQLVETRQITKHVAQILDSRMNTKYDENDKLIREVKVITLKSKLVSDFRKDFQFYKVREINNYHHAHDAYLNAVVGTALIKKYPKLESEFVYGDYKVYDVRKMIAKSEQEIGKATAKYFFYSNIMNFFKTEITLANGEIRKRPLIETNGETGEIVWDKGRDFATVRKVLSMPQVNIVKKTEVQTGGFSKESILPKRNSDKLIARKKDWDPKKYGGFDSPTVAYSVLVVAKVEKGKSKKLKSVKELLGITIMERSSFEKNPIDFLEAKGYKEVKKDLIIKLPKYSLFELENGRKRMLASAGELQKGNELALPSKYVNFLYLASHYEKLKGSPEDNEQKQLFVEQHKHYLDEIIEQISEFSKRVILADANLDKVLSAYNKHRDKPIREQAENIIHLFTLTNLGAPAAFKYFDTTIDRKRYTSTKEVLDATLIHQSITGLYETRIDLSQLGGDGGGGGGSGGGGSGGGGSGGGGSGGGGSGGGGSGGMNPLQLLQPLPAEIKGTKLLAHWNSGATITCIPESFLEDEQPIKKTLIKTIHGEKQQNVYYVTFKVKGRKVEAEVIASPYEYILLSPTDVPWLTQQPLQLTILVPLQEYQEKILSKTALPEDQKQQLKTLFVKYDNLWQHWENQVGHRKIRPHNIATGDYPPRPQKQYPINPKAKPSIQIVIDDLLKQGVLTPQNSTMNTPVYPVPKPDGRWRMVLDYREVNKTIPLTAAQNQHSAGILATIVRQKYKTTLDLANGFWAHPITPESYWLTAFTWQGKQYCWTRLPQGFLNSPALFNADVVDLLKEIPNVQVYVDDIYLSHDDPKEHVQQLEKVFQILLQAGYVVSLKKSEIGQKTVEFLGFNITKEGRGLTDTFKTKLLNITPPKDLKQLQSILGLLNFARNFIPNFAELVQPLYNLIAPAKGKYIEWSEENTKQLNMVIEALNTASNLEERLPEQRLVIKVNTSPSAGYVRYYNETGKKPIMYLNYVFSKAELKFSMLEKLLTTMHKALIKAMDLAMGQEILVYSPIVSMTKIQKTPLPERKALPIRWITWMTYLEDPRIQFHYDKTLPELKHIPDVYTSSQSPVKHPSQYEGVFYTDGSAIKSPDPTKSNNAGMGIVHATYKPEYQVLNQWSIPLGNHTAQMAEIAAVEFACKKALKIPGPVLVITDSFYVAESANKELPYWKSNGFVNNKKKPLKHISKWKSIAECLSMKPDITIQHEKGISLQIPVFILKGNALADKLATQGSYVVNAGKRTADGSEFEKRTADGSEFESPKKKAKVE

SEQ ID NO: 6209 - protein, 2195 aa, synthetic construct
MPAAKRVKLDGGDKKYSIGLDIGTNSVGWAVITDEYKVPSKKFKVLGNTDRHSIKKNLIGALLFDSGETAEATRLKRTARRRYTRRKNRICYLQEIFSNEMAKVDDSFFHRLEESFLVEEDKKHERHPIFGNIVDEVAYHEKYPTIYHLRKKLVDSTDKADLRLIYLALAHMIKFRGHFLIEGDLNPDNSDVDKLFIQLVQTYNQLFEENPINASGVDAKAILSARLSKSRRLENLIAQLPGEKKNGLFGNLIALSLGLTPNFKSNFDLAEDAKLQLSKDTYDDDLDNLLAQIGDQYADLFLAAKNLSDAILLSDILRVNTEITKAPLSASMIKRYDEHHQDLTLLKALVRQQLPEKYKEIFFDQSKNGYAGYIDGGASQEEFYKFIKPILEKMDGTEELLVKLNREDLLRKQRTFDNGSIPHQIHLGELHAILRRQEDFYPFLKDNREKIEKILTFRIPYYVGPLARGNSRFAWMTRKSEETITPWNFEEVVDKGASAQSFIERMTNFDKNLPNEKVLPKHSLLYEYFTVYNELTKVKYVTEGMRKPAFLSGEQKKAIVDLLFKTNRKVTVKQLKEDYFKKIECFDSVEISGVEDRFNASLGTYHDLLKIIKDKDFLDNEENEDILEDIVLTLTLFEDREMIEERLKTYAHLFDDKVMKQLKRRRYTGWGRLSRKLINGIRDKQSGKTILDFLKSDGFANRNFMQLIHDDSLTFKEDIQKAQVSGQGDSLHEHIANLAGSPAIKKGILQTVKVVDELVKVMGRHKPENIVIEMARENQTTQKGQKNSRERMKRIEEGIKELGSQILKEHPVENTQLQNEKLYLYYLQNGRDMYVDQELDINRLSDYDVDHIVPQSFLKDDSIDNKVLTRSDKARGKSDNVPSEEVVKKMKNYWRQLLNAKLITQRKFDNLTKAERGGLSELDKAGFIKRQLVETRQITKHVAQILDSRMNTKYDENDKLIREVKVITLKSKLVSDFRKDFQFYKVREINNYHHAHDAYLNAVVGTALIKKYPKLESEFVYGDYKVYDVRKMIAKSEQEIGKATAKYFFYSNIMNFFKTEITLANGEIRKRPLIETNGETGEIVWDKGRDFATVRKVLSMPQVNIVKKTEVQTGGFSKESILPKRNSDKLIARKKDWDPKKYGGFDSPTVAYSVLVVAKVEKGKSKKLKSVKELLGITIMERSSFEKNPIDFLEAKGYKEVKKDLIIKLPKYSLFELENGRKRMLASAGELQKGNELALPSKYVNFLYLASHYEKLKGSPEDNEQKQLFVEQHKHYLDEIIEQISEFSKRVILADANLDKVLSAYNKHRDKPIREQAENIIHLFTLTNLGAPAAFKYFDTTIDRKRYTSTKEVLDATLIHQSITGLYETRIDLSQLGGDGGGGGGSGGGGSGGGGSGGGGSGGGGSGGGGSGGMNPLQLLQPLPAEIKGTKLLAHWNSGATITCIPESFLEDEQPIKKTLIKTIHGEKQQNVYYVTFKVKGRKVEAEVIASPYEYILLSPTDVPWLTQQPLQLTILVPLQEYQEKILSKTALPEDQKQQLKTLFVKYDNLWQHWENQVGHRKIRPHNIATGDYPPRPQKQYPINPKAKPSIQIVIDDLLKQGVLTPQNSTMNTPVYPVPKPDGRWRMVLDYREVNKTIPLTAAQNQHSAGILATIVRQKYKTTLDLANGFWAHPITPESYWLTAFTWQGKQYCWTRLPQGFLNSPALFNADVVDLLKEIPNVQVYVDDIYLSHDDPKEHVQQLEKVFQILLQAGYVVSLKKSEIGQKTVEFLGFNITKEGRGLTDTFKTKLLNITPPKDLKQLQSILGKLNFARNFIPNFAELVQPLYNLIAPAKGKYIEWSEENTKQLNMVIEALNTASNLEERLPEQRLVIKVNTSPSAGYVRYYNETGKKPIMYLNYVFSKAELKFSMLEKLLTTMHKALIKAMDLAMGQEILVYSPIVSMTKIQKTPLPERKALPIRWITWMTYLEDPRIQFHYDKTLPELKHIPDVYTSSQSPVKHPSQYEGVFYTDGSAIKSPDPTKSNNAGMGIVHATYKPEYQVLNQWSIPLGNHTAQMAEIAAVEFACKKALKIPGPVLVITDSFYVAESANKELPYWKSNGFVNNKKKPLKHISKWKSIAECLSMKPDITIQHEKGISLQIPVFILKGNALADKLATQGSYVVNAGKRTADGSEFEKRTADGSEFESPKKKAKVE

SEQ ID NO: 6210 - protein, 2113 aa, synthetic construct
MPAAKRVKLDGGDKKYSIGLDIGTNSVGWAVITDEYKVPSKKFKVLGNTDRHSIKKNLIGALLFDSGETAEATRLKRTARRRYTRRKNRICYLQEIFSNEMAKVDDSFFHRLEESFLVEEDKKHERHPIFGNIVDEVAYHEKYPTIYHLRKKLVDSTDKADLRLIYLALAHMIKFRGHFLIEGDLNPDNSDVDKLFIQLVQTYNQLFEENPINASGVDAKAILSARLSKSRRLENLIAQLPGEKKNGLFGNLIALSLGLTPNFKSNFDLAEDAKLQLSKDTYDDDLDNLLAQIGDQYADLFLAAKNLSDAILLSDILRVNTEITKAPLSASMIKRYDEHHQDLTLLKALVRQQLPEKYKEIFFDQSKNGYAGYIDGGASQEEFYKFIKPILEKMDGTEELLVKLNREDLLRKQRTFDNGSIPHQIHLGELHAILRRQEDFYPFLKDNREKIEKILTFRIPYYVGPLARGNSRFAWMTRKSEETITPWNFEEVVDKGASAQSFIERMTNFDKNLPNEKVLPKHSLLYEYFTVYNELTKVKYVTEGMRKPAFLSGEQKKAIVDLLFKTNRKVTVKQLKEDYFKKIECFDSVEISGVEDRFNASLGTYHDLLKIIKDKDFLDNEENEDILEDIVLTLTLFEDREMIEERLKTYAHLFDDKVMKQLKRRRYTGWGRLSRKLINGIRDKQSGKTILDFLKSDGFANRNFMQLIHDDSLTFKEDIQKAQVSGQGDSLHEHIANLAGSPAIKKGILQTVKVVDELVKVMGRHKPENIVIEMARENQTTQKGQKNSRERMKRIEEGIKELGSQILKEHPVENTQLQNEKLYLYYLQNGRDMYVDQELDINRLSDYDVDHIVPQSFLKDDSIDNKVLTRSDKARGKSDNVPSEEVVKKMKNYWRQLLNAKLITQRKFDNLTKAERGGLSELDKAGFIKRQLVETRQITKHVAQILDSRMNTKYDENDKLIREVKVITLKSKLVSDFRKDFQFYKVREINNYHHAHDAYLNAVVGTALIKKYPKLESEFVYGDYKVYDVRKMIAKSEQEIGKATAKYFFYSNIMNFFKTEITLANGEIRKRPLIETNGETGEIVWDKGRDFATVRKVLSMPQVNIVKKTEVQTGGFSKESILPKRNSDKLIARKKDWDPKKYGGFDSPTVAYSVLVVAKVEKGKSKKLKSVKELLGITIMERSSFEKNPIDFLEAKGYKEVKKDLIIKLPKYSLFELENGRKRMLASAGELQKGNELALPSKYVNFLYLASHYEKLKGSPEDNEQKQLFVEQHKHYLDEIIEQISEFSKRVILADANLDKVLSAYNKHRDKPIREQAENIIHLFTLTNLGAPAAFKYFDTTIDRKRYTSTKEVLDATLIHQSITGLYETRIDLSQLGGDGGGGGGSGGGGSGGGGSGGGGSGGGGSGGGGSGGVLNLEEEYRLHEKPVPSSIDPSWLQLFPTVWAERAGMGLANQVPPVVVELRSGASPVAVRQYPMSKEAREGIRPHIQKFLDLGVLVPCRSPWNTPLLPVKKPGTNDYRPVQDLREINKRVQDIHPTVPNPYNLLSSLPPSYTWYSVLDLKDAFFCLRLHPNSQPLFAFEWKDPEKGNTGQLTWTRLPQGFKNSPTLFDEALHRDLAPFRALNPQVVLLQYVDDLLVAAPTYEDCKKGTQKLLQELSKLGYRVSAKKAQLCQREVTYLGYLLKEGKRWLTPARKATVMKIPVPTTPRQVREFLGTAGFCRLWIPGFASLAAPLYPLTKESIPFIWTEEHQQAFDHIKKALLSAPALALPDLTKPFTLYIDERAGVARGVLTQTLGPWRRPVAYLSKKLDPVASGWPTCLKAVAAVALLLKDADKLTLGQNVTVIASHSLESIVRQPPDRWMTNARMTHYQSLLLNERVSFAPPAVLNPATLLPVESEATPVHRCSEILAEETGTRRDLEDQPLPGVPTWYTDGSSFITEGKRRAGAPIVDGKRTVWASSLPEGTSAQKAELVALTQALRLAEGKNINIYTDSRYAFATAHIHGAIYKQRGLLTSAGKDIKNKEEILALLEAIHLPRRVAIIHCPGHQRGSNPVATGNRRADEAAKQAALSTRVLAGTTKPAGKRTADGSEFEKRTADGSEFESPKKKAKVE

SEQ ID NO: 6211 - protein, 2113 aa, synthetic construct
MPAAKRVKLDGGDKKYSIGLDIGTNSVGWAVITDEYKVPSKKFKVLGNTDRHSIKKNLIGALLFDSGETAEATRLKRTARRRYTRRKNRICYLQEIFSNEMAKVDDSFFHRLEESFLVEEDKKHERHPIFGNIVDEVAYHEKYPTIYHLRKKLVDSTDKADLRLIYLALAHMIKFRGHFLIEGDLNPDNSDVDKLFIQLVQTYNQLFEENPINASGVDAKAILSARLSKSRRLENLIAQLPGEKKNGLFGNLIALSLGLTPNFKSNFDLAEDAKLQLSKDTYDDDLDNLLAQIGDQYADLFLAAKNLSDAILLSDILRVNTEITKAPLSASMIKRYDEHHQDLTLLKALVRQQLPEKYKEIFFDQSKNGYAGYIDGGASQEEFYKFIKPILEKMDGTEELLVKLNREDLLRKQRTFDNGSIPHQIHLGELHAILRRQEDFYPFLKDNREKIEKILTFRIPYYVGPLARGNSRFAWMTRKSEETITPWNFEEVVDKGASAQSFIERMTNFDKNLPNEKVLPKHSLLYEYFTVYNELTKVKYVTEGMRKPAFLSGEQKKAIVDLLFKTNRKVTVKQLKEDYFKKIECFDSVEISGVEDRFNASLGTYHDLLKIIKDKDFLDNEENEDILEDIVLTLTLFEDREMIEERLKTYAHLFDDKVMKQLKRRRYTGWGRLSRKLINGIRDKQSGKTILDFLKSDGFANRNFMQLIHDDSLTFKEDIQKAQVSGQGDSLHEHIANLAGSPAIKKGILQTVKVVDELVKVMGRHKPENIVIEMARENQTTQKGQKNSRERMKRIEEGIKELGSQILKEHPVENTQLQNEKLYLYYLQNGRDMYVDQELDINRLSDYDVDHIVPQSFLKDDSIDNKVLTRSDKARGKSDNVPSEEVVKKMKNYWRQLLNAKLITQRKFDNLTKAERGGLSELDKAGFIKRQLVETRQITKHVAQILDSRMNTKYDENDKLIREVKVITLKSKLVSDFRKDFQFYKVREINNYHHAHDAYLNAVVGTALIKKYPKLESEFVYGDYKVYDVRKMIAKSEQEIGKATAKYFFYSNIMNFFKTEITLANGEIRKRPLIETNGETGEIVWDKGRDFATVRKVLSMPQVNIVKKTEVQTGGFSKESILPKRNSDKLIARKKDWDPKKYGGFDSPTVAYSVLVVAKVEKGKSKKLKSVKELLGITIMERSSFEKNPIDFLEAKGYKEVKKDLIIKLPKYSLFELENGRKRMLASAGELQKGNELALPSKYVNFLYLASHYEKLKGSPEDNEQKQLFVEQHKHYLDEIIEQISEFSKRVILADANLDKVLSAYNKHRDKPIREQAENIIHLFTLTNLGAPAAFKYFDTTIDRKRYTSTKEVLDATLIHQSITGLYETRIDLSQLGGDGGGGGGSGGGGSGGGGSGGGGSGGGGSGGGGSGGVLNLEEEYRLHEKPVPSSIDPSWLQLFPTVWAERAGMGLANQVPPVVVELRSGASPVAVRQYPMSKEAREGIRPHIQKFLDLGVLVPCRSPWNTPLLPVKKPGTNDYRPVQDLREINKRVQDIHPTVPNPYNLLSSLPPSYTWYSVLDLKDAFFCLRLHPNSQPLFAFEWKDPEKGNTGQLTWTRLPQGFKNSPTLFNEALHRDLAPFRALNPQVVLLQYVDDLLVAAPTYEDCKKGTQKLLQELSKLGYRVSAKKAQLCQREVTYLGYLLKEGKRWLTPARKATVMKIPVPTTPRQVREFLGKAGFCRLFIPGFASLAAPLYPLTKPSIPFIWTEEHQQAFDHIKKALLSAPALALPDLTKPFTLYIDERAGVARGVLTQTLGPWRRPVAYLSKKLDPVASGWPTCLKAVAAVALLLKDADKLTLGQNVTVIASHSLESIVRQPPDRWMTNARMTHYQSLLLNERVSFAPPAVLNPATLLPVESEATPVHRCSEILAEETGTRRDLEDQPLPGVPTWYTDGSSFITEGKRRAGAPIVDGKRTVWASSLPEGTSAQKAELVALTQALRLAEGKNINIYTDSRYAFATAHIHGAIYKQRGWLTSAGKDIKNKEEILALLEAIHLPRRVAIIHCPGHQRGSNPVATGNRRADEAAKQAALSTRVLAGTTKPAGKRTADGSEFEKRTADGSEFESPKKKAKVE

SEQ ID NO: 6212 - protein, 2146 aa, synthetic construct
MPAAKRVKLDGGDKKYSIGLDIGTNSVGWAVITDEYKVPSKKFKVLGNTDRHSIKKNLIGALLFDSGETAEATRLKRTARRRYTRRKNRICYLQEIFSNEMAKVDDSFFHRLEESFLVEEDKKHERHPIFGNIVDEVAYHEKYPTIYHLRKKLVDSTDKADLRLIYLALAHMIKFRGHFLIEGDLNPDNSDVDKLFIQLVQTYNQLFEENPINASGVDAKAILSARLSKSRRLENLIAQLPGEKKNGLFGNLIALSLGLTPNFKSNFDLAEDAKLQLSKDTYDDDLDNLLAQIGDQYADLFLAAKNLSDAILLSDILRVNTEITKAPLSASMIKRYDEHHQDLTLLKALVRQQLPEKYKEIFFDQSKNGYAGYIDGGASQEEFYKFIKPILEKMDGTEELLVKLNREDLLRKQRTFDNGSIPHQIHLGELHAILRRQEDFYPFLKDNREKIEKILTFRIPYYVGPLARGNSRFAWMTRKSEETITPWNFEEVVDKGASAQSFIERMTNFDKNLPNEKVLPKHSLLYEYFTVYNELTKVKYVTEGMRKPAFLSGEQKKAIVDLLFKTNRKVTVKQLKEDYFKKIECFDSVEISGVEDRFNASLGTYHDLLKIIKDKDFLDNEENEDILEDIVLTLTLFEDREMIEERLKTYAHLFDDKVMKQLKRRRYTGWGRLSRKLINGIRDKQSGKTILDFLKSDGFANRNFMQLIHDDSLTFKEDIQKAQVSGQGDSLHEHIANLAGSPAIKKGILQTVKVVDELVKVMGRHKPENIVIEMARENQTTQKGQKNSRERMKRIEEGIKELGSQILKEHPVENTQLQNEKLYLYYLQNGRDMYVDQELDINRLSDYDVDHIVPQSFLKDDSIDNKVLTRSDKARGKSDNVPSEEVVKKMKNYWRQLLNAKLITQRKFDNLTKAERGGLSELDKAGFIKRQLVETRQITKHVAQILDSRMNTKYDENDKLIREVKVITLKSKLVSDFRKDFQFYKVREINNYHHAHDAYLNAVVGTALIKKYPKLESEFVYGDYKVYDVRKMIAKSEQEIGKATAKYFFYSNIMNFFKTEITLANGEIRKRPLIETNGETGEIVWDKGRDFATVRKVLSMPQVNIVKKTEVQTGGFSKESILPKRNSDKLIARKKDWDPKKYGGFDSPTVAYSVLVVAKVEKGKSKKLKSVKELLGITIMERSSFEKNPIDFLEAKGYKEVKKDLIIKLPKYSLFELENGRKRMLASAGELQKGNELALPSKYVNFLYLASHYEKLKGSPEDNEQKQLFVEQHKHYLDEIIEQISEFSKRVILADANLDKVLSAYNKHRDKPIREQAENIIHLFTLTNLGAPAAFKYFDTTIDRKRYTSTKEVLDATLIHQSITGLYETRIDLSQLGGDGGGGGGSGGGGSGGGGSGGGGSGGGGSGGGGSGGLLGRDLLTKLKAQIQFSTEGPQVTWEDRPAMCLVLNLEEEYRLHEKPVPPSIDPSWLQLFPMVWAEKAGMGLANQVPPVVVELKSDASPVAVRQYPMSKEAREGIRPHIQRFLDLGILVPCQSPWNTPLLPVKKPGTNDYRPVQDLREVNKRVQDIHPTVPNPYNLLSSLPPSHTWYSVLDLKDAFFCLKLHPNSQPLFAFEWRDPEKGNTGQLTWTRLPQGFKNSPTLFNEALHRDLASFRALNPQVVMLQYVDDLLVAAPTYRDCKEGTRRLLQELSKLGYRVSAKKAQLCREEVTYLGYLLKGGKRWLTPARKATVMKIPTPTTPRQVREFLGTAGFCRLWIPGFASLAAPLYPLTRPKVPFTWTEAHQEAFGRIKEALLSAPALALPDLTKPFALYVDEKEGVARGVLTQTLGPWRRPVAYLSKKLDPVASGWPTCLKAIAAVALLLKDADKLTLGQNVLVIAPHNLESIVRQPPDRWMTNARMTHYQSLLLNERVSFAPPAILNPATLLPVESDDTPIHICSEILAEETGTRPDLRDQPLPGVPAWYTDGSSFIMDGRRQAGAAIVDNKRTVWASNLPEGTSAQKAELIALTQALRLAEGKSINIYTDSRYAFATAHVHGAIYKQRGWLTSAGKDIKNKEEILALLEAIHLPKRVAIIHCPGHQRGTDPVATGNRKADEAAKQAAQSTRILTETTKNAGKRTADGSEFEKRTADGSEFESPKKKAKVE

SEQ ID NO: 6213 - protein, 2115 aa, synthetic construct
MPAAKRVKLDGGDKKYSIGLDIGTNSVGWAVITDEYKVPSKKFKVLGNTDRHSIKKNLIGALLFDSGETAEATRLKRTARRRYTRRKNRICYLQEIFSNEMAKVDDSFFHRLEESFLVEEDKKHERHPIFGNIVDEVAYHEKYPTIYHLRKKLVDSTDKADLRLIYLALAHMIKFRGHFLIEGDLNPDNSDVDKLFIQLVQTYNQLFEENPINASGVDAKAILSARLSKSRRLENLIAQLPGEKKNGLFGNLIALSLGLTPNFKSNFDLAEDAKLQLSKDTYDDDLDNLLAQIGDQYADLFLAAKNLSDAILLSDILRVNTEITKAPLSASMIKRYDEHHQDLTLLKALVRQQLPEKYKEIFFDQSKNGYAGYIDGGASQEEFYKFIKPILEKMDGTEELLVKLNREDLLRKQRTFDNGSIPHQIHLGELHAILRRQEDFYPFLKDNREKIEKILTFRIPYYVGPLARGNSRFAWMTRKSEETITPWNFEEVVDKGASAQSFIERMTNFDKNLPNEKVLPKHSLLYEYFTVYNELTKVKYVTEGMRKPAFLSGEQKKAIVDLLFKTNRKVTVKQLKEDYFKKIECFDSVEISGVEDRFNASLGTYHDLLKIIKDKDFLDNEENEDILEDIVLTLTLFEDREMIEERLKTYAHLFDDKVMKQLKRRRYTGWGRLSRKLINGIRDKQSGKTILDFLKSDGFANRNFMQLIHDDSLTFKEDIQKAQVSGQGDSLHEHIANLAGSPAIKKGILQTVKVVDELVKVMGRHKPENIVIEMARENQTTQKGQKNSRERMKRIEEGIKELGSQILKEHPVENTQLQNEKLYLYYLQNGRDMYVDQELDINRLSDYDVDHIVPQSFLKDDSIDNKVLTRSDKARGKSDNVPSEEVVKKMKNYWRQLLNAKLITQRKFDNLTKAERGGLSELDKAGFIKRQLVETRQITKHVAQILDSRMNTKYDENDKLIREVKVITLKSKLVSDFRKDFQFYKVREINNYHHAHDAYLNAVVGTALIKKYPKLESEFVYGDYKVYDVRKMIAKSEQEIGKATAKYFFYSNIMNFFKTEITLANGEIRKRPLIETNGETGEIVWDKGRDFATVRKVLSMPQVNIVKKTEVQTGGFSKESILPKRNSDKLIARKKDWDPKKYGGFDSPTVAYSVLVVAKVEKGKSKKLKSVKELLGITIMERSSFEKNPIDFLEAKGYKEVKKDLIIKLPKYSLFELENGRKRMLASAGELQKGNELALPSKYVNFLYLASHYEKLKGSPEDNEQKQLFVEQHKHYLDEIIEQISEFSKRVILADANLDKVLSAYNKHRDKPIREQAENIIHLFTLTNLGAPAAFKYFDTTIDRKRYTSTKEVLDATLIHQSITGLYETRIDLSQLGGDGGGGGGSGGGGSGGGGSGGGGSGGGGSGGGGSGGTLNLEDEYRLYETSAEPEVSPGSTWLSDFPQAWAETGGMGLAVRQAPLIIPLKATSTPVSIKQYPMSQEAKLGIKPHIQRLLDQGILVPCQSPWNTPLLPVKKPGTNDYRPVQDLREVNKRVEDIHPTVPNPYNLLSGLPPSHRWYTVLDLKDAFFCLRLHPTSQPLFAFEWRDPGMGISGQLTWTRLPQGFKNSPTLFNEALHRDLADFRIQHPDLILLQYVDDILLAATSELDCQQGTRALLLTLGNLGYRASAKKAQLCQKQVKYLGYLLKEGQRWLTEARKETVMGQPTPKTPRQLREFLGKAGFCRLFIPGFAEMAAPLYPLTKPGTLFNWGPDQQKAYQEIKQALLTAPALGLPDLTKPFELFVDEKQGYAKGVLTQKLGPWRRPVAYLSKKLDPVAAGWPPCLRMVAAIAVLRKDAGKLTMGQPLVILAPHAVEALVKQPPDRWLSNARMTHYQAMLLDTDRVQFGPVVALNPATLLPLPEEGAPHDCLEILAETHGTRPDLTDQPIPDADHTWYTDGSSFLQEGQRKAGAAVTTETEVIWARALPAGTSAQRAELIALTQALKMAEGKRLNVYTDSRYAFATAHIHGEIYRRRGWLTSEGREIKNKSEILALLKALFLPKRLSIIHCLGHQKGDSAEARGNRLADQAAREAAIKTPPDTSTLLAGKRTADGSEFEKRTADGSEFESPKKKAKVE

SEQ ID NO: 6214 - protein, 2115 aa, synthetic construct
MPAAKRVKLDGGDKKYSIGLDIGTNSVGWAVITDEYKVPSKKFKVLGNTDRHSIKKNLIGALLFDSGETAEATRLKRTARRRYTRRKNRICYLQEIFSNEMAKVDDSFFHRLEESFLVEEDKKHERHPIFGNIVDEVAYHEKYPTIYHLRKKLVDSTDKADLRLIYLALAHMIKFRGHFLIEGDLNPDNSDVDKLFIQLVQTYNQLFEENPINASGVDAKAILSARLSKSRRLENLIAQLPGEKKNGLFGNLIALSLGLTPNFKSNFDLAEDAKLQLSKDTYDDDLDNLLAQIGDQYADLFLAAKNLSDAILLSDILRVNTEITKAPLSASMIKRYDEHHQDLTLLKALVRQQLPEKYKEIFFDQSKNGYAGYIDGGASQEEFYKFIKPILEKMDGTEELLVKLNREDLLRKQRTFDNGSIPHQIHLGELHAILRRQEDFYPFLKDNREKIEKILTFRIPYYVGPLARGNSRFAWMTRKSEETITPWNFEEVVDKGASAQSFIERMTNFDKNLPNEKVLPKHSLLYEYFTVYNELTKVKYVTEGMRKPAFLSGEQKKAIVDLLFKTNRKVTVKQLKEDYFKKIECFDSVEISGVEDRFNASLGTYHDLLKIIKDKDFLDNEENEDILEDIVLTLTLFEDREMIEERLKTYAHLFDDKVMKQLKRRRYTGWGRLSRKLINGIRDKQSGKTILDFLKSDGFANRNFMQLIHDDSLTFKEDIQKAQVSGQGDSLHEHIANLAGSPAIKKGILQTVKVVDELVKVMGRHKPENIVIEMARENQTTQKGQKNSRERMKRIEEGIKELGSQILKEHPVENTQLQNEKLYLYYLQNGRDMYVDQELDINRLSDYDVDHIVPQSFLKDDSIDNKVLTRSDKARGKSDNVPSEEVVKKMKNYWRQLLNAKLITQRKFDNLTKAERGGLSELDKAGFIKRQLVETRQITKHVAQILDSRMNTKYDENDKLIREVKVITLKSKLVSDFRKDFQFYKVREINNYHHAHDAYLNAVVGTALIKKYPKLESEFVYGDYKVYDVRKMIAKSEQEIGKATAKYFFYSNIMNFFKTEITLANGEIRKRPLIETNGETGEIVWDKGRDFATVRKVLSMPQVNIVKKTEVQTGGFSKESILPKRNSDKLIARKKDWDPKKYGGFDSPTVAYSVLVVAKVEKGKSKKLKSVKELLGITIMERSSFEKNPIDFLEAKGYKEVKKDLIIKLPKYSLFELENGRKRMLASAGELQKGNELALPSKYVNFLYLASHYEKLKGSPEDNEQKQLFVEQHKHYLDEIIEQISEFSKRVILADANLDKVLSAYNKHRDKPIREQAENIIHLFTLTNLGAPAAFKYFDTTIDRKRYTSTKEVLDATLIHQSITGLYETRIDLSQLGGDGGGGGGSGGGGSGGGGSGGGGSGGGGSGGGGSGGTLNIEDEYRLHETSKGPDVPLGSTWLSDFPQAWAETGGMGLAVRQAPLIIPLKATSTPVSIKQYPMSQEARLGIKPHIQRLLDQGILVPCQSPWNTPLLPVKKPGTNDYRPVQDLREVNKRVEDIHPTVPNPYNLLSGLPPSHQWYTVLDLKDAFFCLRLHPTSQSLFAFEWRDPEMGISGQLTWTRLPQGFKNSPTLFNEALHRDLADFRIQHPDLILLQYVDDLLLAATSELDCQQGTRALLQTLGDLGYRASAKKAQICQKQVKYLGYLLKEGQRWLTEARKETVMGQPTPKTPRQLREFLGTAGFCRLWIPGFAEMAAPLYPLTKPGTLFEWGPDQQKAYQEIKQALLTAPALGLPDLTKPFELFVDEKQGYAKGVLTQKLGPWRRPVAYLSKKLDPVAAGWPPCLRMVAAIAVLTKDAGKLTMGQPLVILAPHAVEALVKQPPDRWLSNARMTHYQALLLDTDRVQFGPIVALNPATLLPLPEEGLQHDCLDILAEAHGTRPDLTDQPLPDADHTWYTDGSSFLQEGQRKAGAAVTTETEVVWAKALPAGTSAQRAELIALTQALKMAEGKKLNVYTDSRYAFATAHIHGEIYRRRGWLTSEGKEIKNKDEILALLKALFLPKRLSIIHCPGHQKGNRAEARGNRMADQAAREVATRETPETSTLLAGKRTADGSEFEKRTADGSEFESPKKKAKVE

SEQ ID NO: 6215 - protein, 2115 aa, synthetic construct
MPAAKRVKLDGGDKKYSIGLDIGTNSVGWAVITDEYKVPSKKFKVLGNTDRHSIKKNLIGALLFDSGETAEATRLKRTARRRYTRRKNRICYLQEIFSNEMAKVDDSFFHRLEESFLVEEDKKHERHPIFGNIVDEVAYHEKYPTIYHLRKKLVDSTDKADLRLIYLALAHMIKFRGHFLIEGDLNPDNSDVDKLFIQLVQTYNQLFEENPINASGVDAKAILSARLSKSRRLENLIAQLPGEKKNGLFGNLIALSLGLTPNFKSNFDLAEDAKLQLSKDTYDDDLDNLLAQIGDQYADLFLAAKNLSDAILLSDILRVNTEITKAPLSASMIKRYDEHHQDLTLLKALVRQQLPEKYKEIFFDQSKNGYAGYIDGGASQEEFYKFIKPILEKMDGTEELLVKLNREDLLRKQRTFDNGSIPHQIHLGELHAILRRQEDFYPFLKDNREKIEKILTFRIPYYVGPLARGNSRFAWMTRKSEETITPWNFEEVVDKGASAQSFIERMTNFDKNLPNEKVLPKHSLLYEYFTVYNELTKVKYVTEGMRKPAFLSGEQKKAIVDLLFKTNRKVTVKQLKEDYFKKIECFDSVEISGVEDRFNASLGTYHDLLKIIKDKDFLDNEENEDILEDIVLTLTLFEDREMIEERLKTYAHLFDDKVMKQLKRRRYTGWGRLSRKLINGIRDKQSGKTILDFLKSDGFANRNFMQLIHDDSLTFKEDIQKAQVSGQGDSLHEHIANLAGSPAIKKGILQTVKVVDELVKVMGRHKPENIVIEMARENQTTQKGQKNSRERMKRIEEGIKELGSQILKEHPVENTQLQNEKLYLYYLQNGRDMYVDQELDINRLSDYDVDHIVPQSFLKDDSIDNKVLTRSDKARGKSDNVPSEEVVKKMKNYWRQLLNAKLITQRKFDNLTKAERGGLSELDKAGFIKRQLVETRQITKHVAQILDSRMNTKYDENDKLIREVKVITLKSKLVSDFRKDFQFYKVREINNYHHAHDAYLNAVVGTALIKKYPKLESEFVYGDYKVYDVRKMIAKSEQEIGKATAKYFFYSNIMNFFKTEITLANGEIRKRPLIETNGETGEIVWDKGRDFATVRKVLSMPQVNIVKKTEVQTGGFSKESILPKRNSDKLIARKKDWDPKKYGGFDSPTVAYSVLVVAKVEKGKSKKLKSVKELLGITIMERSSFEKNPIDFLEAKGYKEVKKDLIIKLPKYSLFELENGRKRMLASAGELQKGNELALPSKYVNFLYLASHYEKLKGSPEDNEQKQLFVEQHKHYLDEIIEQISEFSKRVILADANLDKVLSAYNKHRDKPIREQAENIIHLFTLTNLGAPAAFKYFDTTIDRKRYTSTKEVLDATLIHQSITGLYETRIDLSQLGGDGGGGGGSGGGGSGGGGSGGGGSGGGGSGGGGSGGTLNIEDEHRLHETSKEPDVSLGSTWLSDFPQAWAETGGMGLAVRQAPLIIPLKATSTPVSIKQYPMSQEARLGIKPHIQRLLDQGILVPCQSPWNTPLLPVKKPGTNDYRPVQDLREVNKRVEDIHPTVPNPYNLLSGLPPSHQWYTVLDLKDAFFCLRLHPTSQPLFAFEWRDPEMGISGQLTWTRLPQGFKNSPTLFDEALHRDLADFRIQHPDLILLQYVDDLLLAATSELDCQQGTRALLQTLGNLGYRASAKKAQICQKQVKYLGYLLKEGQRWLTEARKETVMGQPTPKTPRQLREFLGTAGFCRLWIPGFAEMAAPLYPLTKTGTLFNWGPDQQKAYQEIKQALLTAPALGLPDLTKPFELFVDEKQGYAKGVLTQKLGPWRRPVAYLSKKLDPVAAGWPPCLRMVAAIAVLTKDAGKLTMGQPLVILAPHAVEALVKQPPDRWLSNARMTHYQALLLDTDRVQFGPVVALNPATLLPLPEEGLQHNCLDILAEAHGTRPDLTDQPLPDADHTWYTDGSSLLQEGQRKAGAAVTTETEVIWAKALPAGTSAQRAELIALTQALKMAEGKKLNVYTDSRYAFATAHIHGEIYRRRGLLTSEGKEIKNKDEILALLKALFLPKRLSIIHCPGHQKGHSAEARGNRMADQAARKAAITETPDTSTLLAGKRTADGSEFEKRTADGSEFESPKKKAKVE

SEQ ID NO: 6216 - protein, 2115 aa, synthetic construct; identical to SEQ ID NO: 6215

SEQ ID NO: 6217 - protein, 2115 aa, synthetic construct
MPAAKRVKLDGGDKKYSIGLDIGTNSVGWAVITDEYKVPSKKFKVLGNTDRHSIKKNLIGALLFDSGETAEATRLKRTARRRYTRRKNRICYLQEIFSNEMAKVDDSFFHRLEESFLVEEDKKHERHPIFGNIVDEVAYHEKYPTIYHLRKKLVDSTDKADLRLIYLALAHMIKFRGHFLIEGDLNPDNSDVDKLFIQLVQTYNQLFEENPINASGVDAKAILSARLSKSRRLENLIAQLPGEKKNGLFGNLIALSLGLTPNFKSNFDLAEDAKLQLSKDTYDDDLDNLLAQIGDQYADLFLAAKNLSDAILLSDILRVNTEITKAPLSASMIKRYDEHHQDLTLLKALVRQQLPEKYKEIFFDQSKNGYAGYIDGGASQEEFYKFIKPILEKMDGTEELLVKLNREDLLRKQRTFDNGSIPHQIHLGELHAILRRQEDFYPFLKDNREKIEKILTFRIPYYVGPLARGNSRFAWMTRKSEETITPWNFEEVVDKGASAQSFIERMTNFDKNLPNEKVLPKHSLLYEYFTVYNELTKVKYVTEGMRKPAFLSGEQKKAIVDLLFKTNRKVTVKQLKEDYFKKIECFDSVEISGVEDRFNASLGTYHDLLKIIKDKDFLDNEENEDILEDIVLTLTLFEDREMIEERLKTYAHLFDDKVMKQLKRRRYTGWGRLSRKLINGIRDKQSGKTILDFLKSDGFANRNFMQLIHDDSLTFKEDIQKAQVSGQGDSLHEHIANLAGSPAIKKGILQTVKVVDELVKVMGRHKPENIVIEMARENQTTQKGQKNSRERMKRIEEGIKELGSQILKEHPVENTQLQNEKLYLYYLQNGRDMYVDQELDINRLSDYDVDHIVPQSFLKDDSIDNKVLTRSDKARGKSDNVPSEEVVKKMKNYWRQLLNAKLITQRKFDNLTKAERGGLSELDKAGFIKRQLVETRQITKHVAQILDSRMNTKYDENDKLIREVKVITLKSKLVSDFRKDFQFYKVREINNYHHAHDAYLNAVVGTALIKKYPKLESEFVYGDYKVYDVRKMIAKSEQEIGKATAKYFFYSNIMNFFKTEITLANGEIRKRPLIETNGETGEIVWDKGRDFATVRKVLSMPQVNIVKKTEVQTGGFSKESILPKRNSDKLIARKKDWDPKKYGGFDSPTVAYSVLVVAKVEKGKSKKLKSVKELLGITIMERSSFEKNPIDFLEAKGYKEVKKDLIIKLPKYSLFELENGRKRMLASAGELQKGNELALPSKYVNFLYLASHYEKLKGSPEDNEQKQLFVEQHKHYLDEIIEQISEFSKRVILADANLDKVLSAYNKHRDKPIREQAENIIHLFTLTNLGAPAAFKYFDTTIDRKRYTSTKEVLDATLIHQSITGLYETRIDLSQLGGDGGGGGGSGGGGSGGGGSGGGGSGGGGSGGGGSGGTLNIEDEYRLHEISTEPDVSPGSTWLSDFPQAWAETGGMGLAVRQAPLIIPLKATSTPVSIKQYPMSQEAKLGIKPHIQRLLDQGILVPCQSPWNTPLLPVKKPGTNDYRPVQGLREVNKRVEDIHPTVPNPYNLLSGLPTSHRWYTVLDLKDAFFCLRLHPTSQPLFASEWRDPGMGISGQLTWTRLPQGFKNSPTLFNEALHRGLADFRIQHPDLILLQYVDDLLLAATSELDCQQGTRALLKTLGNLGYRASAKKAQICQKQVKYLGYLLREGQRWLTEARKETVMGQPTPKTPRQLREFLGTAGFCRLWIPRFAEMAAPLYPLTKPGTLFNWGPDQQKAYHEIKQALLTAPALGLPDLTKPFELFVDEKQGYAKGVLTQKLGPWRRPVAYLSKKLDPVAAGWPPCLRMVAAIAVLTKDAGKLTMGQPLVILAPHAVEALVKQPPDRWLSNARMTHYQAMLLDTDRVQFGPVVALNPATLLPLPEEGAPHDCLEILAETHGTEPDLTDQPIPDADHTWYTDGSSFLQEGQRKAGAAVTTETEVIWARALPAGTSAQRAELIALTQALKMAEGKRLNVYTDSRYAFATAHIHGEIYKRRGWLTSEGREIKNKSEILALLKALFLPKRLSIIHCLGHQKGDSAEARGNRLADQAAREAAIKTPPDTSTLLAGKRTADGSEFEKRTADGSEFESPKKKAKVE

SEQ ID NO: 6218 - protein, 2109 aa, synthetic construct
MPAAKRVKLDGGDKKYSIGLDIGTNSVGWAVITDEYKVPSKKFKVLGNTDRHSIKKNLIGALLFDSGETAEATRLKRTARRRYTRRKNRICYLQEIFSNEMAKVDDSFFHRLEESFLVEEDKKHERHPIFGNIVDEVAYHEKYPTIYHLRKKLVDSTDKADLRLIYLALAHMIKFRGHFLIEGDLNPDNSDVDKLFIQLVQTYNQLFEENPINASGVDAKAILSARLSKSRRLENLIAQLPGEKKNGLFGNLIALSLGLTPNFKSNFDLAEDAKLQLSKDTYDDDLDNLLAQIGDQYADLFLAAKNLSDAILLSDILRVNTEITKAPLSASMIKRYDEHHQDLTLLKALVRQQLPEKYKEIFFDQSKNGYAGYIDGGASQEEFYKFIKPILEKMDGTEELLVKLNREDLLRKQRTFDNGSIPHQIHLGELHAILRRQEDFYPFLKDNREKIEKILTFRIPYYVGPLARGNSRFAWMTRKSEETITPWNFEEVVDKGASAQSFIERMTNFDKNLPNEKVLPKHSLLYEYFTVYNELTKVKYVTEGMRKPAFLSGEQKKAIVDLLFKTNRKVTVKQLKEDYFKKIECFDSVEISGVEDRFNASLGTYHDLLKIIKDKDFLDNEENEDILEDIVLTLTLFEDREMIEERLKTYAHLFDDKVMKQLKRRRYTGWGRLSRKLINGIRDKQSGKTILDFLKSDGFANRNFMQLIHDDSLTFKEDIQKAQVSGQGDSLHEHIANLAGSPAIKKGILQTVKVVDELVKVMGRHKPENIVIEMARENQTTQKGQKNSRERMKRIEEGIKELGSQILKEHPVENTQLQNEKLYLYYLQNGRDMYVDQELDINRLSDYDVDHIVPQSFLKDDSIDNKVLTRSDKARGKSDNVPSEEVVKKMKNYWRQLLNAKLITQRKFDNLTKAERGGLSELDKAGFIKRQLVETRQITKHVAQILDSRMNTKYDENDKLIREVKVITLKSKLVSDFRKDFQFYKVREINNYHHAHDAYLNAVVGTALIKKYPKLESEFVYGDYKVYDVRKMIAKSEQEIGKATAKYFFYSNIMNFFKTEITLANGEIRKRPLIETNGETGEIVWDKGRDFATVRKVLSMPQVNIVKKTEVQTGGFSKESILPKRNSDKLIARKKDWDPKKYGGFDSPTVAYSVLVVAKVEKGKSKKLKSVKELLGITIMERSSFEKNPIDFLEAKGYKEVKKDLIIKLPKYSLFELENGRKRMLASAGELQKGNELALPSKYVNFLYLASHYEKLKGSPEDNEQKQLFVEQHKHYLDEIIEQISEFSKRVILADANLDKVLSAYNKHRDKPIREQAENIIHLFTLTNLGAPAAFKYFDTTIDRKRYTSTKEVLDATLIHQSITGLYETRIDLSQLGGDGGGGGGSGGGGSGGGGSGGGGSGGGGSGGGGSGGTLQLDDEYRLYSPLVKPDQNIQFWLEQFPQAWAETAGMGLAKQVPPQVIQLKASATPVSVRQYPLSKEAQEGIRPHVQRLIQQGILVPVQSPWNTPLLPVRKPGTNDYRPVQDLREVNKRVQDIHPTVPNPYNLLCALPPQRSWYTVLDLKDAFFCLRLHPTSQPLFAFEWRDPGTGRTGQLTWTRLPQGFKNSPTIFDEALHRDLANFRIQHPQVTLLQYVDDLLLAGATKQDCLEGTKALLLELSDLGYRASAKKAQICRREVTYLGYSLRDGQRWLTEARKKTVVQIPAPTTAKQVREFLGTAGFCRLWIPGFATLAAPLYPLTKEKGEFSWAPEHQKAFDAIKKALLSAPALALPDVTKPFTLYVDERKGVARGVLTQTLGPWRRPVAYLSKKLDPVASGWPVCLKAIAAVAILVKDADKLTLGQNITVIAPHALENIVRQPPDRWMTNARMTHYQSLLLTERVTFAPPAALNPATLLPEETDEPVTHDCHQLLIEETGVRKDLTDIPLTGEVLTWFTDGSSYVVEGKRMAGAAVVDGTRTIWASSLPEGTSAQKAELMALTQALRLAEGKSINIYTDSRYAFATAHVHGAIYKQRGLLTSAGREIKNKEEILSLLEALHLPKRLAIIHCPGHQKAKDPISRGNQMADRVAKQAAQGVNLLAGKRTADGSEFEKRTADGSEFESPKKKAKVE

SEQ ID NO: 6219 - protein, 2109 aa, synthetic construct
MPAAKRVKLDGGDKKYSIGLDIGTNSVGWAVITDEYKVPSKKFKVLGNTDRHSIKKNLIGALLFDSGETAEATRLKRTARRRYTRRKNRICYLQEIFSNEMAKVDDSFFHRLEESFLVEEDKKHERHPIFGNIVDEVAYHEKYPTIYHLRKKLVDSTDKADLRLIYLALAHMIKFRGHFLIEGDLNPDNSDVDKLFIQLVQTYNQLFEENPINASGVDAKAILSARLSKSRRLENLIAQLPGEKKNGLFGNLIALSLGLTPNFKSNFDLAEDAKLQLSKDTYDDDLDNLLAQIGDQYADLFLAAKNLSDAILLSDILRVNTEITKAPLSASMIKRYDEHHQDLTLLKALVRQQLPEKYKEIFFDQSKNGYAGYIDGGASQEEFYKFIKPILEKMDGTEELLVKLNREDLLRKQRTFDNGSIPHQIHLGELHAILRRQEDFYPFLKDNREKIEKILTFRIPYYVGPLARGNSRFAWMTRKSEETITPWNFEEVVDKGASAQSFIERMTNFDKNLPNEKVLPKHSLLYEYFTVYNELTKVKYVTEGMRKPAFLSGEQKKAIVDLLFKTNRKVTVKQLKEDYFKKIECFDSVEISGVEDRFNASLGTYHDLLKIIKDKDFLDNEENEDILEDIVLTLTLFEDREMIEERLKTYAHLFDDKVMKQLKRRRYTGWGRLSRKLINGIRDKQSGKTILDFLKSDGFANRNFMQLIHDDSLTFKEDIQKAQVSGQGDSLHEHIANLAGSPAIKKGILQTVKVVDELVKVMGRHKPENIVIEMARENQTTQKGQKNSRERMKRIEEGIKELGSQILKEHPVENTQLQNEKLYLYYLQNGRDMYVDQELDINRLSDYDVDHIVPQSFLKDDSIDNKVLTRSDKARGKSDNVPSEEVVKKMKNYWRQLLNAKLITQRKFDNLTKAERGGLSELDKAGFIKRQLVETRQITKHVAQILDSRMNTKYDENDKLIREVKVITLKSKLVSDFRKDFQFYKVREINNYHHAHDAYLNAVVGTALIKKYPKLESEFVYGDYKVYDVRKMIAKSEQEIGKATAKYFFYSNIMNFFKTEITLANGEIRKRPLIETNGETGEIVWDKGRDFATVRKVLSMPQVNIVKKTEVQTGGFSKESILPKRNSDKLIARKKDWDPKKYGGFDSPTVAYSVLVVAKVEKGKSKKLKSVKELLGITIMERSSFEKNPIDFLEAKGYKEVKKDLIIKLPKYSLFELENGRKRMLASAGELQKGNELALPSKYVNFLYLASHYEKLKGSPEDNEQKQLFVEQHKHYLDEIIEQISEFSKRVILADANLDKVLSAYNKHRDKPIREQAENIIHLFTLTNLGAPAAFKYFDTTIDRKRYTSTKEVLDATLIHQSITGLYETRIDLSQLGGDGGGGGGSGGGGSGGGGSGGGGSGGGGSGGGGSGGTLQLDDEYRLYSPLVKPDQNIQFWLEQFPQAWAETAGMGLAKQVPPQVIQLKASATPVSVRQYPLSKEAQEGIRPHVQRLIQQGILVPVQSPWNTPLLPVRKPGTNDYRPVQDLREVNKRVQDIHPTVPNPYNLLCALPPQRSWYTVLDLKDAFFCLRLHPTSQPLFAFEWRDPGTGRTGQLTWTRLPQGFKNSPTIFNEALHRDLANFRIQHPQVTLLQYVDDLLLAGATKQDCLEGTKALLLELSDLGYRASAKKAQICRREVTYLGYSLRDGQRWLTEARKKTVVQIPAPTTAKQVREFLGTAGFCRLWIPGFATLAAPLYPLTKPKGEFSWAPEHQKAFDAIKKALLSAPALALPDVTKPFTLYVDERKGVARGVLTQTLGPWRRPVAYLSKKLDPVASGWPVCLKAIAAVAILVKDADKLTLGQNITVIAPHALENIVRQPPDRWMTNARMTHYQSLLLTERVTFAPPAALNPATLLPEETDEPVTHDCHQLLIEETGVRKDLTDIPLTGEVLTWFTDGSSYVVEGKRMAGAAVVDGTRTIWASSLPEGTSAQKAELMALTQALRLAEGKSINIYTDSRYAFATAHVHGAIYKQRGWLTSAGREIKNKEEILSLLEALHLPKRLAIIHCPGHQKAKDPISRGNQMADRVAKQAAQGVNLLAGKRTADGSEFEKRTADGSEFESPKKKAKVE

SEQ ID NO: 6220 - protein, 2106 aa, synthetic construct
MPAAKRVKLDGGDKKYSIGLDIGTNSVGWAVITDEYKVPSKKFKVLGNTDRHSIKKNLIGALLFDSGETAEATRLKRTARRRYTRRKNRICYLQEIFSNEMAKVDDSFFHRLEESFLVEEDKKHERHPIFGNIVDEVAYHEKYPTIYHLRKKLVDSTDKADLRLIYLALAHMIKFRGHFLIEGDLNPDNSDVDKLFIQLVQTYNQLFEENPINASGVDAKAILSARLSKSRRLENLIAQLPGEKKNGLFGNLIALSLGLTPNFKSNFDLAEDAKLQLSKDTYDDDLDNLLAQIGDQYADLFLAAKNLSDAILLSDILRVNTEITKAPLSASMIKRYDEHHQDLTLLKALVRQQLPEKYKEIFFDQSKNGYAGYIDGGASQEEFYKFIKPILEKMDGTEELLVKLNREDLLRKQRTFDNGSIPHQIHLGELHAILRRQEDFYPFLKDNREKIEKILTFRIPYYVGPLARGNSRFAWMTRKSEETITPWNFEEVVDKGASAQSFIERMTNFDKNLPNEKVLPKHSLLYEYFTVYNELTKVKYVTEGMRKPAFLSGEQKKAIVDLLFKTNRKVTVKQLKEDYFKKIECFDSVEISGVEDRFNASLGTYHDLLKIIKDKDFLDNEENEDILEDIVLTLTLFEDREMIEERLKTYAHLFDDKVMKQLKRRRYTGWGRLSRKLINGIRDKQSGKTILDFLKSDGFANRNFMQLIHDDSLTFKEDIQKAQVSGQGDSLHEHIANLAGSPAIKKGILQTVKVVDELVKVMGRHKPENIVIEMARENQTTQKGQKNSRERMKRIEEGIKELGSQILKEHPVENTQLQNEKLYLYYLQNGRDMYVDQELDINRLSDYDVDHIVPQSFLKDDSIDNKVLTRSDKARGKSDNVPSEEVVKKMKNYWRQLLNAKLITQRKFDNLTKAERGGLSELDKAGFIKRQLVETRQITKHVAQILDSRMNTKYDENDKLIREVKVITLKSKLVSDFRKDFQFYKVREINNYHHAHDAYLNAVVGTALIKKYPKLESEFVYGDYKVYDVRKMIAKSEQEIGKATAKYFFYSNIMNFFKTEITLANGEIRKRPLIETNGETGEIVWDKGRDFATVRKVLSMPQVNIVKKTEVQTGGFSKESILPKRNSDKLIARKKDWDPKKYGGFDSPTVAYSVLVVAKVEKGKSKKLKSVKELLGITIMERSSFEKNPIDFLEAKGYKEVKKDLIIKLPKYSLFELENGRKRMLASAGELQKGNELALPSKYVNFLYLASHYEKLKGSPEDNEQKQLFVEQHKHYLDEIIEQISEFSKRVILADANLDKVLSAYNKHRDKPIREQAENIIHLFTLTNLGAPAAFKYFDTTIDRKRYTSTKEVLDATLIHQSITGLYETRIDLSQLGGDGGGGGGSGGGGSGGGGSGGGGSGGGGSGGGGSGGVPWLMKKPLQLTVLVPLHEYQERLLQQTALPKEQKELLQKLFLKYDALWQHWENQVGHRRIKPHNIATGTLAPRPQKQYPINPKAKPSIQIVIDDLLKQGVLIQQNSTMNTPVYPVPKPDGKWRMVLDYREVNKTIPLIAAQNQHSAGILSSIYRGKYKTTLDLTNGFWAHPITPESYWLTAFTWQGKQYCWTRLPQGFLNSPALFNADVVDLLKEIPNVQAYVDDIYISHDDPQEHLEQLEKIFSILLNAGYVVSLKKSEIAQREVEFLGFNITKEGRGLTDTFKQKLLNITPPKDLKQLQSILGKLNFARNFIPNYSELVKPLYTIVAPANGKFISWTEDNSNQLQHIISVLNQADNLEERNPETRLIIKVNSSPSAGYIRYYNEGSKRPIMYVNYIFSKAEAKFTQTEKLLTTMHKGLIKAMDLAMGQEILVYSPIVSMTKIQRTPLPERKALPVRWITWMTYLEDPRIQFHYDKSLPELQQIPNVTEDVIAKTKHPSEFAMVFYTDGSAIKHPDVNKSHSAGMGIAQVQFIPEYKIVHQWSIPLGDHTAQLAEIAAVEFACKKALKISGPVLIVTDSFYVAESANKELPYWKSNGFLNNKKKPLRHVSKWKSIAECLQLKPDIIIMHEKGHQQPMTTLHTEGNNLADKLATQGSYVVHAGKRTADGSEFEKRTADGSEFESPKKKAKVE

SEQ ID NO: 6221 - protein, 2195 aa, synthetic construct
MPAAKRVKLDGGDKKYSIGLDIGTNSVGWAVITDEYKVPSKKFKVLGNTDRHSIKKNLIGALLFDSGETAEATRLKRTARRRYTRRKNRICYLQEIFSNEMAKVDDSFFHRLEESFLVEEDKKHERHPIFGNIVDEVAYHEKYPTIYHLRKKLVDSTDKADLRLIYLALAHMIKFRGHFLIEGDLNPDNSDVDKLFIQLVQTYNQLFEENPINASGVDAKAILSARLSKSRRLENLIAQLPGEKKNGLFGNLIALSLGLTPNFKSNFDLAEDAKLQLSKDTYDDDLDNLLAQIGDQYADLFLAAKNLSDAILLSDILRVNTEITKAPLSASMIKRYDEHHQDLTLLKALVRQQLPEKYKEIFFDQSKNGYAGYIDGGASQEEFYKFIKPILEKMDGTEELLVKLNREDLLRKQRTFDNGSIPHQIHLGELHAILRRQEDFYPFLKDNREKIEKILTFRIPYYVGPLARGNSRFAWMTRKSEETITPWNFEEVVDKGASAQSFIERMTNFDKNLPNEKVLPKHSLLYEYFTVYNELTKVKYVTEGMRKPAFLSGEQKKAIVDLLFKTNRKVTVKQLKEDYFKKIECFDSVEISGVEDRFNASLGTYHDLLKIIKDKDFLDNEENEDILEDIVLTLTLFEDREMIEERLKTYAHLFDDKVMKQLKRRRYTGWGRLSRKLINGIRDKQSGKTILDFLKSDGFANRNFMQLIHDDSLTFKEDIQKAQVSGQGDSLHEHIANLAGSPAIKKGILQTVKVVDELVKVMGRHKPENIVIEMARENQTTQKGQKNSRERMKRIEEGIKELGSQILKEHPVENTQLQNEKLYLYYLQNGRDMYVDQELDINRLSDYDVDHIVPQSFLKDDSIDNKVLTRSDKARGKSDNVPSEEVVKKMKNYWRQLLNAKLITQRKFDNLTKAERGGLSELDKAGFIKRQLVETRQITKHVAQILDSRMNTKYDENDKLIREVKVITLKSKLVSDFRKDFQFYKVREINNYHHAHDAYLNAVVGTALIKKYPKLESEFVYGDYKVYDVRKMIAKSEQEIGKATAKYFFYSNIMNFFKTEITLANGEIRKRPLIETNGETGEIVWDKGRDFATVRKVLSMPQVNIVKKTEVQTGGFSKESILPKRNSDKLIARKKDWDPKKYGGFDSPTVAYSVLVVAKVEKGKSKKLKSVKELLGITIMERSSFEKNPIDFLEAKGYKEVKKDLIIKLPKYSLFELENGRKRMLASAGELQKGNELALPSKYVNFLYLASHYEKLKGSPEDNEQKQLFVEQHKHYLDEIIEQISEFSKRVILADANLDKVLSAYNKHRDKPIREQAENIIHLFTLTNLGAPAAFKYFDTTIDRKRYTSTKEVLDATLIHQSITGLYETRIDLSQLGGDGGGGGGSGGGGSGGGGSGGGGSGGGGSGGGGSGGMDPLQLLQPLEAEIKGTKLKAHWNSGATITCVPEAFLEDERPIQTMLIKTIHGEKQQDVYYLTFKVQGRKVEAEVLASPYDYILLNPSDVPWLMKKPLQLTVLVPLHEYQERLLQQTALPKEQKELLQKLFLKYDALWQHWENQVGHRRIKPHNIATGTLAPRPQKQYPINPKAKPSIQIVIDDLLKQGVLIQQNSTMNTPVYPVPKPDGKWRMVLDYREVNKTIPLIAAQNQHSAGILSSIYRGKYKTTLDLTNGFWAHPITPESYWLTAFTWQGKQYCWTRLPQGFLNSPALFNADVVDLLKEIPNVQAYVDDIYISHDDPQEHLEQLEKIFSILLNAGYVVSLKKSEIAQREVEFLGFNITKEGRGLTDTFKQKLLNITPPKDLKQLQSILGLLNFARNFIPNYSELVKPLYTIVAPANGKFISWTEDNSNQLQHIISVLNQADNLEERNPETRLIIKVNSSPSAGYIRYYNEGSKRPIMYVNYIFSKAEAKFTQTEKLLTTMHKGLIKAMDLAMGQEILVYSPIVSMTKIQRTPLPERKALPVRWITWMTYLEDPRIQFHYDKSLPELQQIPNVTEDVIAKTKHPSEFAMVFYTDGSAIKHPDVNKSHSAGMGIAQVQFIPEYKIVHQWSIPLGDHTAQLAEIAAVEFACKKALKISGPVLIVTDSFYVAESANKELPYWKSNGFLNNKKKPLRHVSKWKSIAECLQLKPDIIIMHEKGHQQPMTTLHTEGNNLADKLATQGSYVVHAGKRTADGSEFEKRTADGSEFESPKKKAKVE

SEQ ID NO: 6222 - protein, 2195 aa, synthetic construct
MPAAKRVKLDGGDKKYSIGLDIGTNSVGWAVITDEYKVPSKKFKVLGNTDRHSIKKNLIGALLFDSGETAEATRLKRTARRRYTRRKNRICYLQEIFSNEMAKVDDSFFHRLEESFLVEEDKKHERHPIFGNIVDEVAYHEKYPTIYHLRKKLVDSTDKADLRLIYLALAHMIKFRGHFLIEGDLNPDNSDVDKLFIQLVQTYNQLFEENPINASGVDAKAILSARLSKSRRLENLIAQLPGEKKNGLFGNLIALSLGLTPNFKSNFDLAEDAKLQLSKDTYDDDLDNLLAQIGDQYADLFLAAKNLSDAILLSDILRVNTEITKAPLSASMIKRYDEHHQDLTLLKALVRQQLPEKYKEIFFDQSKNGYAGYIDGGASQEEFYKFIKPILEKMDGTEELLVKLNREDLLRKQRTFDNGSIPHQIHLGELHAILRRQEDFYPFLKDNREKIEKILTFRIPYYVGPLARGNSRFAWMTRKSEETITPWNFEEVVDKGASAQSFIERMTNFDKNLPNEKVLPKHSLLYEYFTVYNELTKVKYVTEGMRKPAFLSGEQKKAIVDLLFKTNRKVTVKQLKEDYFKKIECFDSVEISGVEDRFNASLGTYHDLLKIIKDKDFLDNEENEDILEDIVLTLTLFEDREMIEERLKTYAHLFDDKVMKQLKRRRYTGWGRLSRKLINGIRDKQSGKTILDFLKSDGFANRNFMQLIHDDSLTFKEDIQKAQVSGQGDSLHEHIANLAGSPAIKKGILQTVKVVDELVKVMGRHKPENIVIEMARENQTTQKGQKNSRERMKRIEEGIKELGSQILKEHPVENTQLQNEKLYLYYLQNGRDMYVDQELDINRLSDYDVDHIVPQSFLKDDSIDNKVLTRSDKARGKSDNVPSEEVVKKMKNYWRQLLNAKLITQRKFDNLTKAERGGLSELDKAGFIKRQLVETRQITKHVAQILDSRMNTKYDENDKLIREVKVITLKSKLVSDFRKDFQFYKVREINNYHHAHDAYLNAVVGTALIKKYPKLESEFVYGDYKVYDVRKMIAKSEQEIGKATAKYFFYSNIMNFFKTEITLANGEIRKRPLIETNGETGEIVWDKGRDFATVRKVLSMPQVNIVKKTEVQTGGFSKESILPKRNSDKLIARKKDWDPKKYGGFDSPTVAYSVLVVAKVEKGKSKKLKSVKELLGITIMERSSFEKNPIDFLEAKGYKEVKKDLIIKLPKYSLFELENGRKRMLASAGELQKGNELALPSKYVNFLYLASHYEKLKGSPEDNEQKQLFVEQHKHYLDEIIEQISEFSKRVILADANLDKVLSAYNKHRDKPIREQAENIIHLFTLTNLGAPAAFKYFDTTIDRKRYTSTKEVLDATLIHQSITGLYETRIDLSQLGGDGGGGGGSGGGGSGGGGSGGGGSGGGGSGGGGSGGMDPLQLLQPLEAEIKGTKLKAHWNSGATITCVPQAFLEEEVPIKNIWIKTIHGEKEQPVYYLTFKIQGRKVEAEVISSPYDYILVSPSDIPWLMKKPLQLTTLVPLQEYEERLLKQTMLTGSYKEKLQSLFLKYDALWQHWENQVGHRRIKPHHIATGTVNPRPQKQYPINPKAKASIQTVINDLLKQGVLIQQNSIMNTPVYPVPKPDGKWRMVLDYREVNKTIPLIAAQNQHSAGILSSIFRGKYKTTLDLSNGFWAHSITPESYWLTAFTWLGQQYCWTRLPQGFLNSPALFTADVVDLLKEVPNVQVYVDDIYISHDDPREHLEQLEKVFSLLLNAGYVVSLKKSEIAQHEVEFLGFNITKEGRGLTETFKQKLLNITPPRDLKQLQSILGLLNFARNFIPNFSELVKPLYNIIATANGKYITWTTDNSQQLQNIISMLNSAENLEERNPEVRLIMKVNTSPSAGYIRFYNEFAKRPIMYLNYVYTKAEVKFTNTEKLLTTIHKGLIKALDLGMGQEILVYSPIVSMTKIQKTPLPERKALPIRWITWMSYLEDPRIQFHYDKTLPELQQVPTVTDDIIAKIKHPSEFSMVFYTDGSAIKHPNVNKSHNAGMGIAQVQFKPEFTVINTWSIPLGDHTAQLAEVAAVEFACKKALKIDGPVLIVTDSFYVAESVNKELPYWQSNGFFNNKKKPLKHVSKWKSIADCIQLKPDIIIIHEKGHQPTASTFHTEGNNLADKLATQGSYVVNAGKRTADGSEFEKRTADGSEFESPKKKAKVE

SEQ ID NO: 6223 - protein, 2106 aa, synthetic construct
MPAAKRVKLDGGDKKYSIGLDIGTNSVGWAVITDEYKVPSKKFKVLGNTDRHSIKKNLIGALLFDSGETAEATRLKRTARRRYTRRKNRICYLQEIFSNEMAKVDDSFFHRLEESFLVEEDKKHERHPIFGNIVDEVAYHEKYPTIYHLRKKLVDSTDKADLRLIYLALAHMIKFRGHFLIEGDLNPDNSDVDKLFIQLVQTYNQLFEENPINASGVDAKAILSARLSKSRRLENLIAQLPGEKKNGLFGNLIALSLGLTPNFKSNFDLAEDAKLQLSKDTYDDDLDNLLAQIGDQYADLFLAAKNLSDAILLSDILRVNTEITKAPLSASMIKRYDEHHQDLTLLKALVRQQLPEKYKEIFFDQSKNGYAGYIDGGASQEEFYKFIKPILEKMDGTEELLVKLNREDLLRKQRTFDNGSIPHQIHLGELHAILRRQEDFYPFLKDNREKIEKILTFRIPYYVGPLARGNSRFAWMTRKSEETITPWNFEEVVDKGASAQSFIERMTNFDKNLPNEKVLPKHSLLYEYFTVYNELTKVKYVTEGMRKPAFLSGEQKKAIVDLLFKTNRKVTVKQLKEDYFKKIECFDSVEISGVEDRFNASLGTYHDLLKIIKDKDFLDNEENEDILEDIVLTLTLFEDREMIEERLKTYAHLFDDKVMKQLKRRRYTGWGRLSRKLINGIRDKQSGKTILDFLKSDGFANRNFMQLIHDDSLTFKEDIQKAQVSGQGDSLHEHIANLAGSPAIKKGILQTVKVVDELVKVMGRHKPENIVIEMARENQTTQKGQKNSRERMKRIEEGIKELGSQILKEHPVENTQLQNEKLYLYYLQNGRDMYVDQELDINRLSDYDVDHIVPQSFLKDDSIDNKVLTRSDKARGKSDNVPSEEVVKKMKNYWRQLLNAKLITQRKFDNLTKAERGGLSELDKAGFIKRQLVETRQITKHVAQILDSRMNTKYDENDKLIREVKVITLKSKLVSDFRKDFQFYKVREINNYHHAHDAYLNAVVGTALIKKYPKLESEFVYGDYKVYDVRKMIAKSEQEIGKATAKYFFYSNIMNFFKTEITLANGEIRKRPLIETNGETGEIVWDKGRDFATVRKVLSMPQVNIVKKTEVQTGGFSKESILPKRNSDKLIARKKDWDPKKYGGFDSPTVAYSVLVVAKVEKGKSKKLKSVKELLGITIMERSSFEKNPIDFLEAKGYKEVKKDLIIKLPKYSLFELENGRKRMLASAGELQKGNELALPSKYVNFLYLASHYEKLKGSPEDNEQKQLFVEQHKHYLDEIIEQISEFSKRVILADANLDKVLSAYNKHRDKPIREQAENIIHLFTLTNLGAPAAFKYFDTTIDRKRYTSTKEVLDATLIHQSITGLYETRIDLSQLGGDGGGGGGSGGGGSGGGGSGGGGSGGGGSGGGGSGGIPWLMKKPLQLTTLVPLQEYEERLLKQTMLTGSYKEKLQSLFLKYDALWQHWENQVGHRRIKPHHIATGTVNPRPQKQYPINPKAKASIQTVINDLLKQGVLIQQNSIMNTPVYPVPKPDGKWRMVLDYREVNKTIPLIAAQNQHSAGILSSIFRGKYKTTLDLSNGFWAHSITPESYWLTAFTWLGQQYCWTRLPQGFLNSPALFNADVVDLLKEVPNVQVYVDDIYISHDDPREHLEQLEKVFSLLLNAGYVVSLKKSEIAQHEVEFLGFNITKEGRGLTETFKQKLLNITPPRDLKQLQSILGKLNFARNFIPNFSELVKPLYNIIATAPGKYITWTTDNSQQLQNIISMLNSAENLEERNPEVRLIMKVNTSPSAGYIRFYNEFAKRPIMYLNYVYTKAEVKFTNTEKLLTTIHKGLIKALDLGMGQEILVYSPIVSMTKIQKTPLPERKALPIRWITWMSYLEDPRIQFHYDKTLPELQQVPTVTDDIIAKIKHPSEFSMVFYTDGSAIKHPNVNKSHNAGMGIAQVQFKPEFTVINTWSIPLGDHTAQLAEVAAVEFACKKALKIDGPVLIVTDSFYVAESVNKELPYWQSNGFFNNKKKPLKHVSKWKSIADCIQLKPDIIIIHEKGHQPTASTFHTEGNNLADKLATQGSYVVNAGKRTADGSEFEKRTADGSEFESPKKKAKVE

SEQ ID NO: 6224 - protein, 2106 aa, synthetic construct
MPAAKRVKLDGGDKKYSIGLDIGTNSVGWAVITDEYKVPSKKFKVLGNTDRHSIKKNLIGALLFDSGETAEATRLKRTARRRYTRRKNRICYLQEIFSNEMAKVDDSFFHRLEESFLVEEDKKHERHPIFGNIVDEVAYHEKYPTIYHLRKKLVDSTDKADLRLIYLALAHMIKFRGHFLIEGDLNPDNSDVDKLFIQLVQTYNQLFEENPINASGVDAKAILSARLSKSRRLENLIAQLPGEKKNGLFGNLIALSLGLTPNFKSNFDLAEDAKLQLSKDTYDDDLDNLLAQIGDQYADLFLAAKNLSDAILLSDILRVNTEITKAPLSASMIKRYDEHHQDLTLLKALVRQQLPEKYKEIFFDQSKNGYAGYIDGGASQEEFYKFIKPILEKMDGTEELLVKLNREDLLRKQRTFDNGSIPHQIHLGELHAILRRQEDFYPFLKDNREKIEKILTFRIPYYVGPLARGNSRFAWMTRKSEETITPWNFEEVVDKGASAQSFIERMTNFDKNLPNEKVLPKHSLLYEYFTVYNELTKVKYVTEGMRKPAFLSGEQKKAIVDLLFKTNRKVTVKQLKEDYFKKIECFDSVEISGVEDRFNASLGTYHDLLKIIKDKDFLDNEENEDILEDIVLTLTLFEDREMIEERLKTYAHLFDDKVMKQLKRRRYTGWGRLSRKLINGIRDKQSGKTILDFLKSDGFANRNFMQLIHDDSLTFKEDIQKAQVSGQGDSLHEHIANLAGSPAIKKGILQTVKVVDELVKVMGRHKPENIVIEMARENQTTQKGQKNSRERMKRIEEGIKELGSQILKEHPVENTQLQNEKLYLYYLQNGRDMYVDQELDINRLSDYDVDHIVPQSFLKDDSIDNKVLTRSDKARGKSDNVPSEEVVKKMKNYWRQLLNAKLITQRKFDNLTKAERGGLSELDKAGFIKRQLVETRQITKHVAQILDSRMNTKYDENDKLIREVKVITLKSKLVSDFRKDFQFYKVREINNYHHAHDAYLNAVVGTALIKKYPKLESEFVYGDYKVYDVRKMIAKSEQEIGKATAKYFFYSNIMNFFKTEITLANGEIRKRPLIETNGETGEIVWDKGRDFATVRKVLSMPQVNIVKKTEVQTGGFSKESILPKRNSDKLIARKKDWDPKKYGGFDSPTVAYSVLVVAKVEKGKSKKLKSVKELLGITIMERSSFEKNPIDFLEAKGYKEVKKDLIIKLPKYSLFELENGRKRMLASAGELQKGNELALPSKYVNFLYLASHYEKLKGSPEDNEQKQLFVEQHKHYLDEIIEQISEFSKRVILADANLDKVLSAYNKHRDKPIREQAENIIHLFTLTNLGAPAAFKYFDTTIDRKRYTSTKEVLDATLIHQSITGLYETRIDLSQLGGDGGGGGGSGGGGSGGGGSGGGGSGGGGSGGGGSGGVPWLTQQPLQLTILVPLQEYQDRILNKTALPEEQKQQLKALFTKYDNLWQHWENQVGHRKIRPHNIATGDYPPRPQKQYPINPKAKPSIQIVIDDLLKQGVLTPQNSTMNTPVYPVPKPDGRWRMVLDYREVNKTIPLTAAQNQHSAGILATIVRQKYKTTLDLANGFWAHPITPDSYWLTAFTWQGKQYCWTRLPQGFLNSPALFNADAVDLLKEVPNVQVYVDDIYLSHDNPHEHIQQLEKVFQILLQAGYVVSLKKSEIGQRTVEFLGFNITKEGRGLTDTFKTKLLNVTPPKDLKQLQSILGKLNFARNFIPNFAELVQTLYNLIASSPGKYIEWTEDNTKQLNKVIEALNTASNLEERLPDQRLVIKVNTSPSAGYVRYYNESGKKPIMYLNYVFSKAELKFSMLEKLLTTMHKALIKAMDLAMGQEILVYSPIVSMTKIQKTPLPERKALPIRWITWMTYLEDPRIQFHYDKTLPELKHIPDVYTSSIPPLKHPSQYEGVFCTDGSAIKSPDPTKSNNAGMGIVHAIYNPEYKILNQWSIPLGHHTAQMAEIAAVEFACKKALKVPGPVLVITDSFYVAESANKELPYWKSNGFVNNKKEPLKHISKWKSIAECLSIKPDITIQHEKGHQPINTSIHTEGNALADKLATQGSYVVNAGKRTADGSEFEKRTADGSEFESPKKKAKVE

SEQ ID NO: 6225 - protein, 2113 aa, synthetic construct
MPAAKRVKLDGGDKKYSIGLDIGTNSVGWAVITDEYKVPSKKFKVLGNTDRHSIKKNLIGALLFDSGETAEATRLKRTARRRYTRRKNRICYLQEIFSNEMAKVDDSFFHRLEESFLVEEDKKHERHPIFGNIVDEVAYHEKYPTIYHLRKKLVDSTDKADLRLIYLALAHMIKFRGHFLIEGDLNPDNSDVDKLFIQLVQTYNQLFEENPINASGVDAKAILSARLSKSRRLENLIAQLPGEKKNGLFGNLIALSLGLTPNFKSNFDLAEDAKLQLSKDTYDDDLDNLLAQIGDQYADLFLAAKNLSDAILLSDILRVNTEITKAPLSASMIKRYDEHHQDLTLLKALVRQQLPEKYKEIFFDQSKNGYAGYIDGGASQEEFYKFIKPILEKMDGTEELLVKLNREDLLRKQRTFDNGSIPHQIHLGELHAILRRQEDFYPFLKDNREKIEKILTFRIPYYVGPLARGNSRFAWMTRKSEETITPWNFEEVVDKGASAQSFIERMTNFDKNLPNEKVLPKHSLLYEYFTVYNELTKVKYVTEGMRKPAFLSGEQKKAIVDLLFKTNRKVTVKQLKEDYFKKIECFDSVEISGVEDRFNASLGTYHDLLKIIKDKDFLDNEENEDILEDIVLTLTLFEDREMIEERLKTYAHLFDDKVMKQLKRRRYTGWGRLSRKLINGIRDKQSGKTILDFLKSDGFANRNFMQLIHDDSLTFKEDIQKAQVSGQGDSLHEHIANLAGSPAIKKGILQTVKVVDELVKVMGRHKPENIVIEMARENQTTQKGQKNSRERMKRIEEGIKELGSQILKEHPVENTQLQNEKLYLYYLQNGRDMYVDQELDINRLSDYDVDHIVPQSFLKDDSIDNKVLTRSDKARGKSDNVPSEEVVKKMKNYWRQLLNAKLITQRKFDNLTKAERGGLSELDKAGFIKRQLVETRQITKHVAQILDSRMNTKYDENDKLIREVKVITLKSKLVSDFRKDFQFYKVREINNYHHAHDAYLNAVVGTALIKKYPKLESEFVYGDYKVYDVRKMIAKSEQEIGKATAKYFFYSNIMNFFKTEITLANGEIRKRPLIETNGETGEIVWDKGRDFATVRKVLSMPQVNIVKKTEVQTGGFSKESILPKRNSDKLIARKKDWDPKKYGGFDSPTVAYSVLVVAKVEKGKSKKLKSVKELLGITIMERSSFEKNPIDFLEAKGYKEVKKDLIIKLPKYSLFELENGRKRMLASAGELQKGNELALPSKYVNFLYLASHYEKLKGSPEDNEQKQLFVEQHKHYLDEIIEQISEFSKRVILADANLDKVLSAYNKHRDKPIREQAENIIHLFTLTNLGAPAAFKYFDTTIDRKRYTSTKEVLDATLIHQSITGLYETRIDLSQLGGDGGGGGGSGGGGSGGGGSGGGGSGGGGSGGGGSGGVLNLEEEYRLHEKPVPSSIDPSWLQLFPTVWAERAGMGLANQVPPVVVELRSGASPVAVRQYPMSKEAREGIRPHIQRFLDLGVLVPCQSPWNTPLLPVKKPGTNDYRPVQDLREINKRVQDIHPTVPNPYNLLSSLPPSHTWYSVLDLKDAFFCLKLHPNSQPLFAFEWRDPEKGNTGQLTWTRLPQGFKNSPTLFNEALHRDLAPFRALNPQVVLLQYVDDLLVAAPTYRDCKEGTQKLLQELSKLGYRVSAKKAQLCQKEVTYLGYLLKEGKRWLTPARKATVMKIPPPTTPRQVREFLGTAGFCRLWIPGFASLAAPLYPLTKPSIPFIWTEEHQKAFDRIKEALLSAPALALPDLTKPFTLYVDERAGVARGVLTQTLGPWRRPVAYLSKKLDPVASGWPTCLKAVAAVALLLKDADKLTLGQNVTVIASHSLESIVRQPPDRWMTNARMTHYQSLLLNERVSFAPPAVLNPATLLPVESEATPVHRCSEILAEETGTRRDLKDQPLPGVPAWYTDGSSFIAEGKRRAGAAIVDGKRTVWASSLPEGTSAQKAELVALTQALRLAEGKDINIYTDSRYAFATAHIHGAIYKQRGWLTSAGKDIKNKEEILALLEAIHLPKRVAIIHCPGHQKGNDPVATGNRRADEAAKQAALSTRVLAETTKPAGKRTADGSEFEKRTADGSEFESPKKKAKVE

SEQ ID NO: 6226 - protein, 2113 aa, synthetic construct
MPAAKRVKLDGGDKKYSIGLDIGTNSVGWAVITDEYKVPSKKFKVLGNTDRHSIKKNLIGALLFDSGETAEATRLKRTARRRYTRRKNRICYLQEIFSNEMAKVDDSFFHRLEESFLVEEDKKHERHPIFGNIVDEVAYHEKYPTIYHLRKKLVDSTDKADLRLIYLALAHMIKFRGHFLIEGDLNPDNSDVDKLFIQLVQTYNQLFEENPINASGVDAKAILSARLSKSRRLENLIAQLPGEKKNGLFGNLIALSLGLTPNFKSNFDLAEDAKLQLSKDTYDDDLDNLLAQIGDQYADLFLAAKNLSDAILLSDILRVNTEITKAPLSASMIKRYDEHHQDLTLLKALVRQQLPEKYKEIFFDQSKNGYAGYIDGGASQEEFYKFIKPILEKMDGTEELLVKLNREDLLRKQRTFDNGSIPHQIHLGELHAILRRQEDFYPFLKDNREKIEKILTFRIPYYVGPLARGNSRFAWMTRKSEETITPWNFEEVVDKGASAQSFIERMTNFDKNLPNEKVLPKHSLLYEYFTVYNELTKVKYVTEGMRKPAFLSGEQKKAIVDLLFKTNRKVTVKQLKEDYFKKIECFDSVEISGVEDRFNASLGTYHDLLKIIKDKDFLDNEENEDILEDIVLTLTLFEDREMIEERLKTYAHLFDDKVMKQLKRRRYTGWGRLSRKLINGIRDKQSGKTILDFLKSDGFANRNFMQLIHDDSLTFKEDIQKAQVSGQGDSLHEHIANLAGSPAIKKGILQTVKVVDELVKVMGRHKPENIVIEMARENQTTQKGQKNSRERMKRIEEGIKELGSQILKEHPVENTQLQNEKLYLYYLQNGRDMYVDQELDINRLSDYDVDHIVPQSFLKDDSIDNKVLTRSDKARGKSDNVPSEEVVKKMKNYWRQLLNAKLITQRKFDNLTKAERGGLSELDKAGFIKRQLVETRQITKHVAQILDSRMNTKYDENDKLIREVKVITLKSKLVSDFRKDFQFYKVREINNYHHAHDAYLNAVVGTALIKKYPKLESEFVYGDYKVYDVRKMIAKSEQEIGKATAKYFFYSNIMNFFKTEITLANGEIRKRPLIETNGETGEIVWDKGRDFATVRKVLSMPQVNIVKKTEVQTGGFSKESILPKRNSDKLIARKKDWDPKKYGGFDSPTVAYSVLVVAKVEKGKSKKLKSVKELLGITIMERSSFEKNPIDFLEAKGYKEVKKDLIIKLPKYSLFELENGRKRMLASAGELQKGNELALPSKYVNFLYLASHYEKLKGSPEDNEQKQLFVEQHKHYLDEIIEQISEFSKRVILADANLDKVLSAYNKHRDKPIREQAENIIHLFTLTNLGAPAAFKYFDTTIDRKRYTSTKEVLDATLIHQSITGLYETRIDLSQLGGDGGGGGGSGGGGSGGGGSGGGGSGGGGSGGGGSGGVLNLEEEYRLHEKPVPSSIDPSWLQLFPTVWAERAGMGLANQVPPVVVELRSGASPVAVRQYPMSKEAREGIRPHIQRFLDLGVLVPCQSPWNTPLLPVKKPGTNDYRPVQDLREINKRVQDIHPTVPNPYNLLSSLPPSHTWYSVLDLKDAFFCLKLHPNSQPLFAFEWRDPEKGNTGQLTWTRLPQGFKNSPTLFNEALHRDLAPFRALNPQVVLLQYVDDLLVAAPTYRDCKEGTQKLLQELSKLGYRVSAKKAQLCQKEVTYLGYLLKEGKRWLTPARKATVMKIPPPTTPRQVREFLGKAGFCRLFIPGFASLAAPLYPLTKPSIPFIWTEEHQKAFDRIKEALLSAPALALPDLTKPFTLYVDERAGVARGVLTQTLGPWRRPVAYLSKKLDPVASGWPTCLKAVAAVALLLKDADKLTLGQNVTVIASHSLESIVRQPPDRWMTNARMTHYQSLLLNERVSFAPPAVLNPATLLPVESEATPVHRCSEILAEETGTRRDLKDQPLPGVPAWYTDGSSFIAEGKRRAGAAIVDGKRTVWASSLPEGTSAQKAELVALTQALRLAEGKDINIYTDSRYAFATAHIHGAIYKQRGWLTSAGKDIKNKEEILALLEAIHLPKRVAIIHCPGHQKGNDPVATGNRRADEAAKQAALSTRVLAETTKPAGKRTADGSEFEKRTADGSEFESPKKKAKVE

SEQ ID NO: 6227 - protein, 2090 aa, synthetic construct
MPAAKRVKLDGGDKKYSIGLDIGTNSVGWAVITDEYKVPSKKFKVLGNTDRHSIKKNLIGALLFDSGETAEATRLKRTARRRYTRRKNRICYLQEIFSNEMAKVDDSFFHRLEESFLVEEDKKHERHPIFGNIVDEVAYHEKYPTIYHLRKKLVDSTDKADLRLIYLALAHMIKFRGHFLIEGDLNPDNSDVDKLFIQLVQTYNQLFEENPINASGVDAKAILSARLSKSRRLENLIAQLPGEKKNGLFGNLIALSLGLTPNFKSNFDLAEDAKLQLSKDTYDDDLDNLLAQIGDQYADLFLAAKNLSDAILLSDILRVNTEITKAPLSASMIKRYDEHHQDLTLLKALVRQQLPEKYKEIFFDQSKNGYAGYIDGGASQEEFYKFIKPILEKMDGTEELLVKLNREDLLRKQRTFDNGSIPHQIHLGELHAILRRQEDFYPFLKDNREKIEKILTFRIPYYVGPLARGNSRFAWMTRKSEETITPWNFEEVVDKGASAQSFIERMTNFDKNLPNEKVLPKHSLLYEYFTVYNELTKVKYVTEGMRKPAFLSGEQKKAIVDLLFKTNRKVTVKQLKEDYFKKIECFDSVEISGVEDRFNASLGTYHDLLKIIKDKDFLDNEENEDILEDIVLTLTLFEDREMIEERLKTYAHLFDDKVMKQLKRRRYTGWGRLSRKLINGIRDKQSGKTILDFLKSDGFANRNFMQLIHDDSLTFKEDIQKAQVSGQGDSLHEHIANLAGSPAIKKGILQTVKVVDELVKVMGRHKPENIVIEMARENQTTQKGQKNSRERMKRIEEGIKELGSQILKEHPVENTQLQNEKLYLYYLQNGRDMYVDQELDINRLSDYDVDHIVPQSFLKDDSIDNKVLTRSDKARGKSDNVPSEEVVKKMKNYWRQLLNAKLITQRKFDNLTKAERGGLSELDKAGFIKRQLVETRQITKHVAQILDSRMNTKYDENDKLIREVKVITLKSKLVSDFRKDFQFYKVREINNYHHAHDAYLNAVVGTALIKKYPKLESEFVYGDYKVYDVRKMIAKSEQEIGKATAKYFFYSNIMNFFKTEITLANGEIRKRPLIETNGETGEIVWDKGRDFATVRKVLSMPQVNIVKKTEVQTGGFSKESILPKRNSDKLIARKKDWDPKKYGGFDSPTVAYSVLVVAKVEKGKSKKLKSVKELLGITIMERSSFEKNPIDFLEAKGYKEVKKDLIIKLPKYSLFELENGRKRMLASAGELQKGNELALPSKYVNFLYLASHYEKLKGSPEDNEQKQLFVEQHKHYLDEIIEQISEFSKRVILADANLDKVLSAYNKHRDKPIREQAENIIHLFTLTNLGAPAAFKYFDTTIDRKRYTSTKEVLDATLIHQSITGLYETRIDLSQLGGDGGGGGGGTAPLEEEYRLFLEAPIQNVTLLEQWKREIPKVWAEINPPGLASTQAPIHVQLLSTALPVRVRQYPITLEAKRSLRETIRKFRAAGILRPVHSPWNTPLLPVRKSGTSEYRMVQDLREVNKRVETIHPTVPNPYTLLSLLPPDRIWYSVLDLKDAFFCIPLAPESQLIFAFEWADAEEGESGQLTWTRLPQGFKNSPTLFNEALNRDLQGFRLDHPSVSLLQYVDDLLIAADTQAACLSATRDLLMTLAELGYRVSGKKAQLCQEEVTYLGFKIHKGSRSLSNSRTQAILQIPVPKTKRQVREFLGTIGYCRLWIPGFAELAQPLYAATRPGNDPLVWGEKEEEAFQSLKLALTQPPALALPSLDKPFQLFVEETSGAAKGVLTQALGPWKRPVAYLSKRLDPVAAGWPRCLRAIAAAALLTREASKLTFGQDIEITSSHNLESLLRSPPDKWLTNARITQYQVLLLDPPRVRFKQTAALNPATLLPETDDTLPIHHCLDTLDSLTSTRPDLTDQPLAQAEATLFTDGSSYIRDGKRYAGAAVVTLDSVIWAEPLPIGTSAQKAELIALTKALEWSKDKSVNIYTDSRYAFATLHVHGMIYRERGWLTAGGKAIKNAPEILALLTAVWLPKRVAVMHCKGHQKDDAPTSTGNRRADEVAREVAIRPLSTQATISAGKRTADGSEFEKRTADGSEFESPKKKAKVE

SEQ ID NO: 6228 - protein, 2094 aa, synthetic construct
MPAAKRVKLDGGDKKYSIGLDIGTNSVGWAVITDEYKVPSKKFKVLGNTDRHSIKKNLIGALLFDSGETAEATRLKRTARRRYTRRKNRICYLQEIFSNEMAKVDDSFFHRLEESFLVEEDKKHERHPIFGNIVDEVAYHEKYPTIYHLRKKLVDSTDKADLRLIYLALAHMIKFRGHFLIEGDLNPDNSDVDKLFIQLVQTYNQLFEENPINASGVDAKAILSARLSKSRRLENLIAQLPGEKKNGLFGNLIALSLGLTPNFKSNFDLAEDAKLQLSKDTYDDDLDNLLAQIGDQYADLFLAAKNLSDAILLSDILRVNTEITKAPLSASMIKRYDEHHQDLTLLKALVRQQLPEKYKEIFFDQSKNGYAGYIDGGASQEEFYKFIKPILEKMDGTEELLVKLNREDLLRKQRTFDNGSIPHQIHLGELHAILRRQEDFYPFLKDNREKIEKILTFRIPYYVGPLARGNSRFAWMTRKSEETITPWNFEEVVDKGASAQSFIERMTNFDKNLPNEKVLPKHSLLYEYFTVYNELTKVKYVTEGMRKPAFLSGEQKKAIVDLLFKTNRKVTVKQLKEDYFKKIECFDSVEISGVEDRFNASLGTYHDLLKIIKDKDFLDNEENEDILEDIVLTLTLFEDREMIEERLKTYAHLFDDKVMKQLKRRRYTGWGRLSRKLINGIRDKQSGKTILDFLKSDGFANRNFMQLIHDDSLTFKEDIQKAQVSGQGDSLHEHIANLAGSPAIKKGILQTVKVVDELVKVMGRHKPENIVIEMARENQTTQKGQKNSRERMKRIEEGIKELGSQILKEHPVENTQLQNEKLYLYYLQNGRDMYVDQELDINRLSDYDVDHIVPQSFLKDDSIDNKVLTRSDKARGKSDNVPSEEVVKKMKNYWRQLLNAKLITQRKFDNLTKAERGGLSELDKAGFIKRQLVETRQITKHVAQILDSRMNTKYDENDKLIREVKVITLKSKLVSDFRKDFQFYKVREINNYHHAHDAYLNAVVGTALIKKYPKLESEFVYGDYKVYDVRKMIAKSEQEIGKATAKYFFYSNIMNFFKTEITLANGEIRKRPLIETNGETGEIVWDKGRDFATVRKVLSMPQVNIVKKTEVQTGGFSKESILPKRNSDKLIARKKDWDPKKYGGFDSPTVAYSVLVVAKVEKGKSKKLKSVKELLGITIMERSSFEKNPIDFLEAKGYKEVKKDLIIKLPKYSLFELENGRKRMLASAGELQKGNELALPSKYVNFLYLASHYEKLKGSPEDNEQKQLFVEQHKHYLDEIIEQISEFSKRVILADANLDKVLSAYNKHRDKPIREQAENIIHLFTLTNLGAPAAFKYFDTTIDRKRYTSTKEVLDATLIHQSITGLYETRIDLSQLGGDGGGGGGGTVSLQDEHRLFDIPVTTSLPDVWLQDFPQAWAETGGLGRAKCQAPIIIDLKPTAVPVSIKQYPMSLEAHMGIRQHIIKFLELGVLRPCRSPWNTPLLPVKKPGTQDYRPVQDLREINKRTVDIHPTVPNPYNLLSTLKPDYSWYTVLDLKDAFFCLPLAPQSQELFAFEWKDPERGISGQLTWTRLPQGFKNSPTLFNEALHRDLTDFRTQHPEVTLLQYVDDLLLAAPTKKACTQGTRHLLQELGEKGYRASAKKAQICQTKVTYLGYILSEGKRWLTPGRIETVARIPPPRNPREVREFLGTAGFCRLWIPGFAELAAPLYALTKPSTPFTWQTEHQLAFEALKKALLSAPALGLPDTSKPFTLFLDERQGIAKGVLTQKLGPWKRPVAYLSKKLDPVAAGWPPCLRIMAATAMLVKDSAKLTLGQPLTVITPHTLEAIVRQPPDRWITNARLTHYQALLLDTDRVQFGPPVTLNPATLLPVPENQPSPHDCRQVLAETHGTREDLKDQELPDADHTWYTDGSSYLDSGTRRAGAAVVDGHNTIWAQSLPPGTSAQKAELIALTKALELSKGKKANIYTDSRYAFATAHTHGSIYERRGWLTSEGKEIKNKAEIIALLKALFLPQEVAIIHCPGHQKGQDPVAVGNRQADRVARQAAMAEVLTLATEPDNTSHITAGKRTADGSEFEKRTADGSEFESPKKKAKVE

SEQ ID NO: 6229 - protein, 2094 aa, synthetic construct
MPAAKRVKLDGGDKKYSIGLDIGTNSVGWAVITDEYKVPSKKFKVLGNTDRHSIKKNLIGALLFDSGETAEATRLKRTARRRYTRRKNRICYLQEIFSNEMAKVDDSFFHRLEESFLVEEDKKHERHPIFGNIVDEVAYHEKYPTIYHLRKKLVDSTDKADLRLIYLALAHMIKFRGHFLIEGDLNPDNSDVDKLFIQLVQTYNQLFEENPINASGVDAKAILSARLSKSRRLENLIAQLPGEKKNGLFGNLIALSLGLTPNFKSNFDLAEDAKLQLSKDTYDDDLDNLLAQIGDQYADLFLAAKNLSDAILLSDILRVNTEITKAPLSASMIKRYDEHHQDLTLLKALVRQQLPEKYKEIFFDQSKNGYAGYIDGGASQEEFYKFIKPILEKMDGTEELLVKLNREDLLRKQRTFDNGSIPHQIHLGELHAILRRQEDFYPFLKDNREKIEKILTFRIPYYVGPLARGNSRFAWMTRKSEETITPWNFEEVVDKGASAQSFIERMTNFDKNLPNEKVLPKHSLLYEYFTVYNELTKVKYVTEGMRKPAFLSGEQKKAIVDLLFKTNRKVTVKQLKEDYFKKIECFDSVEISGVEDRFNASLGTYHDLLKIIKDKDFLDNEENEDILEDIVLTLTLFEDREMIEERLKTYAHLFDDKVMKQLKRRRYTGWGRLSRKLINGIRDKQSGKTILDFLKSDGFANRNFMQLIHDDSLTFKEDIQKAQVSGQGDSLHEHIANLAGSPAIKKGILQTVKVVDELVKVMGRHKPENIVIEMARENQTTQKGQKNSRERMKRIEEGIKELGSQILKEHPVENTQLQNEKLYLYYLQNGRDMYVDQELDINRLSDYDVDHIVPQSFLKDDSIDNKVLTRSDKARGKSDNVPSEEVVKKMKNYWRQLLNAKLITQRKFDNLTKAERGGLSELDKAGFIKRQLVETRQITKHVAQILDSRMNTKYDENDKLIREVKVITLKSKLVSDFRKDFQFYKVREINNYHHAHDAYLNAVVGTALIKKYPKLESEFVYGDYKVYDVRKMIAKSEQEIGKATAKYFFYSNIMNFFKTEITLANGEIRKRPLIETNGETGEIVWDKGRDFATVRKVLSMPQVNIVKKTEVQTGGFSKESILPKRNSDKLIARKKDWDPKKYGGFDSPTVAYSVLVVAKVEKGKSKKLKSVKELLGITIMERSSFEKNPIDFLEAKGYKEVKKDLIIKLPKYSLFELENGRKRMLASAGELQKGNELALPSKYVNFLYLASHYEKLKGSPEDNEQKQLFVEQHKHYLDEIIEQISEFSKRVILADANLDKVLSAYNKHRDKPIREQAENIIHLFTLTNLGAPAAFKYFDTTIDRKRYTSTKEVLDATLIHQSITGLYETRIDLSQLGGDGGGGGGGTVSLQDEHRLFDIPVTTSLPDVWLQDFPQAWAETGGLGRAKCQAPIIIDLKPTAVPVSIKQYPMSLEAHMGIRQHIIKFLELGVLRPCRSPWNTPLLPVKKPGTQDYRPVQDLREINKRTVDIHPTVPNPYNLLSTLKPDYSWYTVLDLKDAFFCLPLAPQSQELFAFEWKDPERGISGQLTWTRLPQGFKNSPTLFNEALHRDLTDFRTQHPEVTLLQYVDDLLLAAPTKKACTQGTRHLLQELGEKGYRASAKKAQICQTKVTYLGYILSEGKRWLTPGRIETVARIPPPRNPREVREFLGKAGFCRLFIPGFAELAAPLYALTKPSTPFTWQTEHQLAFEALKKALLSAPALGLPDTSKPFTLFLDERQGIAKGVLTQKLGPWKRPVAYLSKKLDPVAAGWPPCLRIMAATAMLVKDSAKLTLGQPLTVITPHTLEAIVRQPPDRWITNARLTHYQALLLDTDRVQFGPPVTLNPATLLPVPENQPSPHDCRQVLAETHGTREDLKDQELPDADHTWYTDGSSYLDSGTRRAGAAVVDGHNTIWAQSLPPGTSAQKAELIALTKALELSKGKKANIYTDSRYAFATAHTHGSIYERRGWLTSEGKEIKNKAEIIALLKALFLPQEVAIIHCPGHQKGQDPVAVGNRQADRVARQAAMAEVLTLATEPDNTSHITAGKRTADGSEFEKRTADGSEFESPKKKAKVE

SEQ ID NO: 6230 - protein, 2165 aa, synthetic construct
MPAAKRVKLDGGDKKYSIGLDIGTNSVGWAVITDEYKVPSKKFKVLGNTDRHSIKKNLIGALLFDSGETAEATRLKRTARRRYTRRKNRICYLQEIFSNEMAKVDDSFFHRLEESFLVEEDKKHERHPIFGNIVDEVAYHEKYPTIYHLRKKLVDSTDKADLRLIYLALAHMIKFRGHFLIEGDLNPDNSDVDKLFIQLVQTYNQLFEENPINASGVDAKAILSARLSKSRRLENLIAQLPGEKKNGLFGNLIALSLGLTPNFKSNFDLAEDAKLQLSKDTYDDDLDNLLAQIGDQYADLFLAAKNLSDAILLSDILRVNTEITKAPLSASMIKRYDEHHQDLTLLKALVRQQLPEKYKEIFFDQSKNGYAGYIDGGASQEEFYKFIKPILEKMDGTEELLVKLNREDLLRKQRTFDNGSIPHQIHLGELHAILRRQEDFYPFLKDNREKIEKILTFRIPYYVGPLARGNSRFAWMTRKSEETITPWNFEEVVDKGASAQSFIERMTNFDKNLPNEKVLPKHSLLYEYFTVYNELTKVKYVTEGMRKPAFLSGEQKKAIVDLLFKTNRKVTVKQLKEDYFKKIECFDSVEISGVEDRFNASLGTYHDLLKIIKDKDFLDNEENEDILEDIVLTLTLFEDREMIEERLKTYAHLFDDKVMKQLKRRRYTGWGRLSRKLINGIRDKQSGKTILDFLKSDGFANRNFMQLIHDDSLTFKEDIQKAQVSGQGDSLHEHIANLAGSPAIKKGILQTVKVVDELVKVMGRHKPENIVIEMARENQTTQKGQKNSRERMKRIEEGIKELGSQILKEHPVENTQLQNEKLYLYYLQNGRDMYVDQELDINRLSDYDVDHIVPQSFLKDDSIDNKVLTRSDKARGKSDNVPSEEVVKKMKNYWRQLLNAKLITQRKFDNLTKAERGGLSELDKAGFIKRQLVETRQITKHVAQILDSRMNTKYDENDKLIREVKVITLKSKLVSDFRKDFQFYKVREINNYHHAHDAYLNAVVGTALIKKYPKLESEFVYGDYKVYDVRKMIAKSEQEIGKATAKYFFYSNIMNFFKTEITLANGEIRKRPLIETNGETGEIVWDKGRDFATVRKVLSMPQVNIVKKTEVQTGGFSKESILPKRNSDKLIARKKDWDPKKYGGFDSPTVAYSVLVVAKVEKGKSKKLKSVKELLGITIMERSSFEKNPIDFLEAKGYKEVKKDLIIKLPKYSLFELENGRKRMLASAGELQKGNELALPSKYVNFLYLASHYEKLKGSPEDNEQKQLFVEQHKHYLDEIIEQISEFSKRVILADANLDKVLSAYNKHRDKPIREQAENIIHLFTLTNLGAPAAFKYFDTTIDRKRYTSTKEVLDATLIHQSITGLYETRIDLSQLGGDGGGGGGGMDLLKPLTVERKGVKIKGYWNSQADITCVPKDLLQGEEPVRQQNVTTIHGTQEGDVYYVNLKIDGRRINTEVIGTTLDYAIITPGDVPWILKKPLELTIKLDLEEQQGTLLNNSILSKKGKEELKQLFEKYSALWQSWENQVGHRRIRPHKIATGTVKPTPQKQYHINPKAKPDIQIVINDLLKQGVLIQKESTMNTPVYPVPKPNGRWRMVLDYRAVNKVTPLIAVQNQHSYGILGSLFKGRYKTTIDLSNGFWAHPIVPEDYWITAFTWQGKQYCWTVLPQGFLNSPGLFNGDVVDLLQGIPNVEVYVDDVYISHDSEKEHLEYLDILFNRLKEAGYIISLKKSNIANSIVDFLGFQITNEGRGLTDTFKEKLENITAPTTLKQLQSILGLLNFARNFIPDFTELIAPLYALIPKSPKNYVPWQIEHSTTLETLITKLNGAEYLQGRKGDKTLIMKVNASYTTGYIRYYNEGEKKPISYVSIVFSKTELKFTELEKLLTTVHKGLLKALDLSMGQNIHVYSPIVSMQNIQKTPQTAKKALASRWLSWLSYLEDPRIRFFYDPQMPALKDLPAVDTGKDNKKHPSNFQHIFYTDGSAITSPTKEGHLNAGMGIVYFINKDGNLQKQQEWSISLGNHTAQFAEIAAFEFALKKCLPLGGNILVVTDSNYVAKAYNEELDVWASNGFVNNRKKPLKHISKWKSVADLKRLRPDVVVTHEPGHQKLDSSPHAYGNNLADQLATQASFKVHAGKRTADGSEFEKRTADGSEFESPKKKAKVE

SEQ ID NO: 6231 - protein, 2086 aa, synthetic construct
MPAAKRVKLDGGDKKYSIGLDIGTNSVGWAVITDEYKVPSKKFKVLGNTDRHSIKKNLIGALLFDSGETAEATRLKRTARRRYTRRKNRICYLQEIFSNEMAKVDDSFFHRLEESFLVEEDKKHERHPIFGNIVDEVAYHEKYPTIYHLRKKLVDSTDKADLRLIYLALAHMIKFRGHFLIEGDLNPDNSDVDKLFIQLVQTYNQLFEENPINASGVDAKAILSARLSKSRRLENLIAQLPGEKKNGLFGNLIALSLGLTPNFKSNFDLAEDAKLQLSKDTYDDDLDNLLAQIGDQYADLFLAAKNLSDAILLSDILRVNTEITKAPLSASMIKRYDEHHQDLTLLKALVRQQLPEKYKEIFFDQSKNGYAGYIDGGASQEEFYKFIKPILEKMDGTEELLVKLNREDLLRKQRTFDNGSIPHQIHLGELHAILRRQEDFYPFLKDNREKIEKILTFRIPYYVGPLARGNSRFAWMTRKSEETITPWNFEEVVDKGASAQSFIERMTNFDKNLPNEKVLPKHSLLYEYFTVYNELTKVKYVTEGMRKPAFLSGEQKKAIVDLLFKTNRKVTVKQLKEDYFKKIECFDSVEISGVEDRFNASLGTYHDLLKIIKDKDFLDNEENEDILEDIVLTLTLFEDREMIEERLKTYAHLFDDKVMKQLKRRRYTGWGRLSRKLINGIRDKQSGKTILDFLKSDGFANRNFMQLIHDDSLTFKEDIQKAQVSGQGDSLHEHIANLAGSPAIKKGILQTVKVVDELVKVMGRHKPENIVIEMARENQTTQKGQKNSRERMKRIEEGIKELGSQILKEHPVENTQLQNEKLYLYYLQNGRDMYVDQELDINRLSDYDVDHIVPQSFLKDDSIDNKVLTRSDKARGKSDNVPSEEVVKKMKNYWRQLLNAKLITQRKFDNLTKAERGGLSELDKAGFIKRQLVETRQITKHVAQILDSRMNTKYDENDKLIREVKVITLKSKLVSDFRKDFQFYKVREINNYHHAHDAYLNAVVGTALIKKYPKLESEFVYGDYKVYDVRKMIAKSEQEIGKATAKYFFYSNIMNFFKTEITLANGEIRKRPLIETNGETGEIVWDKGRDFATVRKVLSMPQVNIVKKTEVQTGGFSKESILPKRNSDKLIARKKDWDPKKYGGFDSPTVAYSVLVVAKVEKGKSKKLKSVKELLGITIMERSSFEKNPIDFLEAKGYKEVKKDLIIKLPKYSLFELENGRKRMLASAGELQKGNELALPSKYVNFLYLASHYEKLKGSPEDNEQKQLFVEQHKHYLDEIIEQISEFSKRVILADANLDKVLSAYNKHRDKPIREQAENIIHLFTLTNLGAPAAFKYFDTTIDRKRYTSTKEVLDATLIHQSITGLYETRIDLSQLGGDGGGGGGGVLNLEEEYRLHEKPVPSSIDPSWLQLFPTVWAERAGMGLANQVPPVVVELRSGASPVAVRQYPMSKEAREGIRPHIQKFLDLGVLVPCRSPWNTPLLPVKKPGTNDYRPVQDLREINKRVQDIHPTVPNPYNLLSSLPPSYTWYSVLDLKDAFFCLRLHPNSQPLFAFEWKDPEKGNTGQLTWTRLPQGFKNSPTLFNEALHRDLAPFRALNPQVVLLQYVDDLLVAAPTYEDCKKGTQKLLQELSKLGYRVSAKKAQLCQREVTYLGYLLKEGKRWLTPARKATVMKIPVPTTPRQVREFLGTAGFCRLWIPGFASLAAPLYPLTKPSIPFIWTEEHQQAFDHIKKALLSAPALALPDLTKPFTLYIDERAGVARGVLTQTLGPWRRPVAYLSKKLDPVASGWPTCLKAVAAVALLLKDADKLTLGQNVTVIASHSLESIVRQPPDRWMTNARMTHYQSLLLNERVSFAPPAVLNPATLLPVESEATPVHRCSEILAEETGTRRDLEDQPLPGVPTWYTDGSSFITEGKRRAGAPIVDGKRTVWASSLPEGTSAQKAELVALTQALRLAEGKNINIYTDSRYAFATAHIHGAIYKQRGWLTSAGKDIKNKEEILALLEAIHLPRRVAIIHCPGHQRGSNPVATGNRRADEAAKQAALSTRVLAGTTKPAGKRTADGSEFEKRTADGSEFESPKKKAKVE

SEQ ID NO: 6232 - protein, 2086 aa, synthetic construct
MPAAKRVKLDGGDKKYSIGLDIGTNSVGWAVITDEYKVPSKKFKVLGNTDRHSIKKNLIGALLFDSGETAEATRLKRTARRRYTRRKNRICYLQEIFSNEMAKVDDSFFHRLEESFLVEEDKKHERHPIFGNIVDEVAYHEKYPTIYHLRKKLVDSTDKADLRLIYLALAHMIKFRGHFLIEGDLNPDNSDVDKLFIQLVQTYNQLFEENPINASGVDAKAILSARLSKSRRLENLIAQLPGEKKNGLFGNLIALSLGLTPNFKSNFDLAEDAKLQLSKDTYDDDLDNLLAQIGDQYADLFLAAKNLSDAILLSDILRVNTEITKAPLSASMIKRYDEHHQDLTLLKALVRQQLPEKYKEIFFDQSKNGYAGYIDGGASQEEFYKFIKPILEKMDGTEELLVKLNREDLLRKQRTFDNGSIPHQIHLGELHAILRRQEDFYPFLKDNREKIEKILTFRIPYYVGPLARGNSRFAWMTRKSEETITPWNFEEVVDKGASAQSFIERMTNFDKNLPNEKVLPKHSLLYEYFTVYNELTKVKYVTEGMRKPAFLSGEQKKAIVDLLFKTNRKVTVKQLKEDYFKKIECFDSVEISGVEDRFNASLGTYHDLLKIIKDKDFLDNEENEDILEDIVLTLTLFEDREMIEERLKTYAHLFDDKVMKQLKRRRYTGWGRLSRKLINGIRDKQSGKTILDFLKSDGFANRNFMQLIHDDSLTFKEDIQKAQVSGQGDSLHEHIANLAGSPAIKKGILQTVKVVDELVKVMGRHKPENIVIEMARENQTTQKGQKNSRERMKRIEEGIKELGSQILKEHPVENTQLQNEKLYLYYLQNGRDMYVDQELDINRLSDYDVDHIVPQSFLKDDSIDNKVLTRSDKARGKSDNVPSEEVVKKMKNYWRQLLNAKLITQRKFDNLTKAERGGLSELDKAGFIKRQLVETRQITKHVAQILDSRMNTKYDENDKLIREVKVITLKSKLVSDFRKDFQFYKVREINNYHHAHDAYLNAVVGTALIKKYPKLESEFVYGDYKVYDVRKMIAKSEQEIGKATAKYFFYSNIMNFFKTEITLANGEIRKRPLIETNGETGEIVWDKGRDFATVRKVLSMPQVNIVKKTEVQTGGFSKESILPKRNSDKLIARKKDWDPKKYGGFDSPTVAYSVLVVAKVEKGKSKKLKSVKELLGITIMERSSFEKNPIDFLEAKGYKEVKKDLIIKLPKYSLFELENGRKRMLASAGELQKGNELALPSKYVNFLYLASHYEKLKGSPEDNEQKQLFVEQHKHYLDEIIEQISEFSKRVILADANLDKVLSAYNKHRDKPIREQAENIIHLFTLTNLGAPAAFKYFDTTIDRKRYTSTKEVLDATLIHQSITGLYETRIDLSQLGGDGGGGGGGVLNLEEEYRLHEKPVPSSIDPSWLQLFPTVWAERAGMGLANQVPPVVVELRSGASPVAVRQYPMSKEAREGIRPHIQKFLDLGVLVPCRSPWNTPLLPVKKPGTNDYRPVQDLREINKRVQDIHPTVPNPYNLLSSLPPSYTWYSVLDLKDAFFCLRLHPNSQPLFAFEWKDPEKGNTGQLTWTRLPQGFKNSPTLFNEALHRDLAPFRALNPQVVLLQYVDDLLVAAPTYEDCKKGTQKLLQELSKLGYRVSAKKAQLCQREVTYLGYLLKEGKRWLTPARKATVMKIPVPTTPRQVREFLGKAGFCRLFIPGFASLAAPLYPLTKPSIPFIWTEEHQQAFDHIKKALLSAPALALPDLTKPFTLYIDERAGVARGVLTQTLGPWRRPVAYLSKKLDPVASGWPTCLKAVAAVALLLKDADKLTLGQNVTVIASHSLESIVRQPPDRWMTNARMTHYQSLLLNERVSFAPPAVLNPATLLPVESEATPVHRCSEILAEETGTRRDLEDQPLPGVPTWYTDGSSFITEGKRRAGAPIVDGKRTVWASSLPEGTSAQKAELVALTQALRLAEGKNINIYTDSRYAFATAHIHGAIYKQRGWLTSAGKDIKNKEEILALLEAIHLPRRVAIIHCPGHQRGSNPVATGNRRADEAAKQAALSTRVLAGTTKPAGKRTADGSEFEKRTADGSEFESPKKKAKVE

SEQ ID NO: 6233 - protein, 2119 aa, synthetic construct
MPAAKRVKLDGGDKKYSIGLDIGTNSVGWAVITDEYKVPSKKFKVLGNTDRHSIKKNLIGALLFDSGETAEATRLKRTARRRYTRRKNRICYLQEIFSNEMAKVDDSFFHRLEESFLVEEDKKHERHPIFGNIVDEVAYHEKYPTIYHLRKKLVDSTDKADLRLIYLALAHMIKFRGHFLIEGDLNPDNSDVDKLFIQLVQTYNQLFEENPINASGVDAKAILSARLSKSRRLENLIAQLPGEKKNGLFGNLIALSLGLTPNFKSNFDLAEDAKLQLSKDTYDDDLDNLLAQIGDQYADLFLAAKNLSDAILLSDILRVNTEITKAPLSASMIKRYDEHHQDLTLLKALVRQQLPEKYKEIFFDQSKNGYAGYIDGGASQEEFYKFIKPILEKMDGTEELLVKLNREDLLRKQRTFDNGSIPHQIHLGELHAILRRQEDFYPFLKDNREKIEKILTFRIPYYVGPLARGNSRFAWMTRKSEETITPWNFEEVVDKGASAQSFIERMTNFDKNLPNEKVLPKHSLLYEYFTVYNELTKVKYVTEGMRKPAFLSGEQKKAIVDLLFKTNRKVTVKQLKEDYFKKIECFDSVEISGVEDRFNASLGTYHDLLKIIKDKDFLDNEENEDILEDIVLTLTLFEDREMIEERLKTYAHLFDDKVMKQLKRRRYTGWGRLSRKLINGIRDKQSGKTILDFLKSDGFANRNFMQLIHDDSLTFKEDIQKAQVSGQGDSLHEHIANLAGSPAIKKGILQTVKVVDELVKVMGRHKPENIVIEMARENQTTQKGQKNSRERMKRIEEGIKELGSQILKEHPVENTQLQNEKLYLYYLQNGRDMYVDQELDINRLSDYDVDHIVPQSFLKDDSIDNKVLTRSDKARGKSDNVPSEEVVKKMKNYWRQLLNAKLITQRKFDNLTKAERGGLSELDKAGFIKRQLVETRQITKHVAQILDSRMNTKYDENDKLIREVKVITLKSKLVSDFRKDFQFYKVREINNYHHAHDAYLNAVVGTALIKKYPKLESEFVYGDYKVYDVRKMIAKSEQEIGKATAKYFFYSNIMNFFKTEITLANGEIRKRPLIETNGETGEIVWDKGRDFATVRKVLSMPQVNIVKKTEVQTGGFSKESILPKRNSDKLIARKKDWDPKKYGGFDSPTVAYSVLVVAKVEKGKSKKLKSVKELLGITIMERSSFEKNPIDFLEAKGYKEVKKDLIIKLPKYSLFELENGRKRMLASAGELQKGNELALPSKYVNFLYLASHYEKLKGSPEDNEQKQLFVEQHKHYLDEIIEQISEFSKRVILADANLDKVLSAYNKHRDKPIREQAENIIHLFTLTNLGAPAAFKYFDTTIDRKRYTSTKEVLDATLIHQSITGLYETRIDLSQLGGDGGGGGGGLLGRDLLTKLKAQIQFSTEGPQVTWEDRPAMCLVLNLEEEYRLHEKPVPPSIDPSWLQLFPMVWAEKAGMGLANQVPPVVVELKSDASPVAVRQYPMSKEAREGIRPHIQRFLDLGILVPCQSPWNTPLLPVKKPGTNDYRPVQDLREVNKRVQDIHPTVPNPYNLLSSLPPSHTWYSVLDLKDAFFCLKLHPNSQPLFAFEWRDPEKGNTGQLTWTRLPQGFKNSPTLFNEALHRDLASFRALNPQVVMLQYVDDLLVAAPTYRDCKEGTRRLLQELSKLGYRVSAKKAQLCREEVTYLGYLLKGGKRWLTPARKATVMKIPTPTTPRQVREFLGKAGFCRLFIPGFASLAAPLYPLTRPKVPFTWTEAHQEAFGRIKEALLSAPALALPDLTKPFALYVDEKEGVARGVLTQTLGPWRRPVAYLSKKLDPVASGWPTCLKAIAAVALLLKDADKLTLGQNVLVIAPHNLESIVRQPPDRWMTNARMTHYQSLLLNERVSFAPPAILNPATLLPVESDDTPIHICSEILAEETGTRPDLRDQPLPGVPAWYTDGSSFIMDGRRQAGAAIVDNKRTVWASNLPEGTSAQKAELIALTQALRLAEGKSINIYTDSRYAFATAHVHGAIYKQRGWLTSAGKDIKNKEEILALLEAIHLPKRVAIIHCPGHQRGTDPVATGNRKADEAAKQAAQSTRILTETTKNAGKRTADGSEFEKRTADGSEFESPKKKAKVE

SEQ ID NO: 6234 - protein, 2210 aa, synthetic construct
MPAAKRVKLDGGDKKYSIGLDIGTNSVGWAVITDEYKVPSKKFKVLGNTDRHSIKKNLIGALLFDSGETAEATRLKRTARRRYTRRKNRICYLQEIFSNEMAKVDDSFFHRLEESFLVEEDKKHERHPIFGNIVDEVAYHEKYPTIYHLRKKLVDSTDKADLRLIYLALAHMIKFRGHFLIEGDLNPDNSDVDKLFIQLVQTYNQLFEENPINASGVDAKAILSARLSKSRRLENLIAQLPGEKKNGLFGNLIALSLGLTPNFKSNFDLAEDAKLQLSKDTYDDDLDNLLAQIGDQYADLFLAAKNLSDAILLSDILRVNTEITKAPLSASMIKRYDEHHQDLTLLKALVRQQLPEKYKEIFFDQSKNGYAGYIDGGASQEEFYKFIKPILEKMDGTEELLVKLNREDLLRKQRTFDNGSIPHQIHLGELHAILRRQEDFYPFLKDNREKIEKILTFRIPYYVGPLARGNSRFAWMTRKSEETITPWNFEEVVDKGASAQSFIERMTNFDKNLPNEKVLPKHSLLYEYFTVYNELTKVKYVTEGMRKPAFLSGEQKKAIVDLLFKTNRKVTVKQLKEDYFKKIECFDSVEISGVEDRFNASLGTYHDLLKIIKDKDFLDNEENEDILEDIVLTLTLFEDREMIEERLKTYAHLFDDKVMKQLKRRRYTGWGRLSRKLINGIRDKQSGKTILDFLKSDGFANRNFMQLIHDDSLTFKEDIQKAQVSGQGDSLHEHIANLAGSPAIKKGILQTVKVVDELVKVMGRHKPENIVIEMARENQTTQKGQKNSRERMKRIEEGIKELGSQILKEHPVENTQLQNEKLYLYYLQNGRDMYVDQELDINRLSDYDVDHIVPQSFLKDDSIDNKVLTRSDKARGKSDNVPSEEVVKKMKNYWRQLLNAKLITQRKFDNLTKAERGGLSELDKAGFIKRQLVETRQITKHVAQILDSRMNTKYDENDKLIREVKVITLKSKLVSDFRKDFQFYKVREINNYHHAHDAYLNAVVGTALIKKYPKLESEFVYGDYKVYDVRKMIAKSEQEIGKATAKYFFYSNIMNFFKTEITLANGEIRKRPLIETNGETGEIVWDKGRDFATVRKVLSMPQVNIVKKTEVQTGGFSKESILPKRNSDKLIARKKDWDPKKYGGFDSPTVAYSVLVVAKVEKGKSKKLKSVKELLGITIMERSSFEKNPIDFLEAKGYKEVKKDLIIKLPKYSLFELENGRKRMLASAGELQKGNELALPSKYVNFLYLASHYEKLKGSPEDNEQKQLFVEQHKHYLDEIIEQISEFSKRVILADANLDKVLSAYNKHRDKPIREQAENIIHLFTLTNLGAPAAFKYFDTTIDRKRYTSTKEVLDATLIHQSITGLYETRIDLSQLGGDGGGGGGGTLGDQGSRGSDPLPEPRVTLTVEGIPTEFLVNTGAEHSVLTKPMGKMGSKRTVVAGATGSKVYPWTTKRLLKIGQKQVTHSFLVIPECPAPLLGRDLLTKLKAQIQFSTEGPQVTWEDRPAMCLVLNLEEEYRLHEKPVPPSIDPSWLQLFPMVWAEKAGMGLANQVPPVVVELKSDASPVAVRQYPMSKEAREGIRPHIQRFLDLGILVPCQSPWNTPLLPVKKPGTNDYRPVQDLREVNKRVQDIHPTVPNPYNLLSSLPPSHTWYSVLDLKDAFFCLKLHPNSQPLFAFEWRDPEKGNTGQLTWTRLPQGFKNSPTLFNEALHRDLASFRALNPQVVMLQYVDDLLVAAPTYRDCKEGTRRLLQELSKLGYRVSAKKAQLCREEVTYLGYLLKGGKRWLTPARKATVMKIPTPTTPRQVREFLGTAGFCRLWIPGFASLAAPLYPLTRPKVPFTWTEAHQEAFGRIKEALLSAPALALPDLTKPFALYVDEKEGVARGVLTQTLGPWRRPVAYLSKKLDPVASGWPTCLKAIAAVALLLKDADKLTLGQNVLVIAPHNLESIVRQPPDRWMTNARMTHYQSLLLNERVSFAPPAILNPATLLPVESDDTPIHICSEILAEETGTRPDLRDQPLPGVPAWYTDGSSFIMDGRRQAGAAIVDNKRTVWASNLPEGTSAQKAELIALTQALRLAEGKSINIYTDSRYAFATAHVHGAIYKQRGWLTSAGKDIKNKEEILALLEAIHLPKRVAIIHCPGHQRGTDPVATGNRKADEAAKQAAQSTRILTETTKNAGKRTADGSEFEKRTADGSEFESPKKKAKVE

SEQ ID NO: 6235 - protein, 2088 aa, synthetic construct
MPAAKRVKLDGGDKKYSIGLDIGTNSVGWAVITDEYKVPSKKFKVLGNTDRHSIKKNLIGALLFDSGETAEATRLKRTARRRYTRRKNRICYLQEIFSNEMAKVDDSFFHRLEESFLVEEDKKHERHPIFGNIVDEVAYHEKYPTIYHLRKKLVDSTDKADLRLIYLALAHMIKFRGHFLIEGDLNPDNSDVDKLFIQLVQTYNQLFEENPINASGVDAKAILSARLSKSRRLENLIAQLPGEKKNGLFGNLIALSLGLTPNFKSNFDLAEDAKLQLSKDTYDDDLDNLLAQIGDQYADLFLAAKNLSDAILLSDILRVNTEITKAPLSASMIKRYDEHHQDLTLLKALVRQQLPEKYKEIFFDQSKNGYAGYIDGGASQEEFYKFIKPILEKMDGTEELLVKLNREDLLRKQRTFDNGSIPHQIHLGELHAILRRQEDFYPFLKDNREKIEKILTFRIPYYVGPLARGNSRFAWMTRKSEETITPWNFEEVVDKGASAQSFIERMTNFDKNLPNEKVLPKHSLLYEYFTVYNELTKVKYVTEGMRKPAFLSGEQKKAIVDLLFKTNRKVTVKQLKEDYFKKIECFDSVEISGVEDRFNASLGTYHDLLKIIKDKDFLDNEENEDILEDIVLTLTLFEDREMIEERLKTYAHLFDDKVMKQLKRRRYTGWGRLSRKLINGIRDKQSGKTILDFLKSDGFANRNFMQLIHDDSLTFKEDIQKAQVSGQGDSLHEHIANLAGSPAIKKGILQTVKVVDELVKVMGRHKPENIVIEMARENQTTQKGQKNSRERMKRIEEGIKELGSQILKEHPVENTQLQNEKLYLYYLQNGRDMYVDQELDINRLSDYDVDHIVPQSFLKDDSIDNKVLTRSDKARGKSDNVPSEEVVKKMKNYWRQLLNAKLITQRKFDNLTKAERGGLSELDKAGFIKRQLVETRQITKHVAQILDSRMNTKYDENDKLIREVKVITLKSKLVSDFRKDFQFYKVREINNYHHAHDAYLNAVVGTALIKKYPKLESEFVYGDYKVYDVRKMIAKSEQEIGKATAKYFFYSNIMNFFKTEITLANGEIRKRPLIETNGETGEIVWDKGRDFATVRKVLSMPQVNIVKKTEVQTGGFSKESILPKRNSDKLIARKKDWDPKKYGGFDSPTVAYSVLVVAKVEKGKSKKLKSVKELLGITIMERSSFEKNPIDFLEAKGYKEVKKDLIIKLPKYSLFELENGRKRMLASAGELQKGNELALPSKYVNFLYLASHYEKLKGSPEDNEQKQLFVEQHKHYLDEIIEQISEFSKRVILADANLDKVLSAYNKHRDKPIREQAENIIHLFTLTNLGAPAAFKYFDTTIDRKRYTSTKEVLDATLIHQSITGLYETRIDLSQLGGDGGGGGGGTLNLEDEYRLYETSAEPEVSPGSTWLSDFPQAWAETGGMGLAVRQAPLIIPLKATSTPVSIKQYPMSQEAKLGIKPHIQRLLDQGILVPCQSPWNTPLLPVKKPGTNDYRPVQDLREVNKRVEDIHPTVPNPYNLLSGLPPSHRWYTVLDLKDAFFCLRLHPTSQPLFAFEWRDPGMGISGQLTWTRLPQGFKNSPTLFNEALHRDLADFRIQHPDLILLQYVDDILLAATSELDCQQGTRALLLTLGNLGYRASAKKAQLCQKQVKYLGYLLKEGQRWLTEARKETVMGQPTPKTPRQLREFLGKAGFCRLFIPGFAEMAAPLYPLTKPGTLFNWGPDQQKAYQEIKQALLTAPALGLPDLTKPFELFVDEKQGYAKGVLTQKLGPWRRPVAYLSKKLDPVAAGWPPCLRMVAAIAVLRKDAGKLTMGQPLVILAPHAVEALVKQPPDRWLSNARMTHYQAMLLDTDRVQFGPVVALNPATLLPLPEEGAPHDCLEILAETHGTRPDLTDQPIPDADHTWYTDGSSFLQEGQRKAGAAVTTETEVIWARALPAGTSAQRAELIALTQALKMAEGKRLNVYTDSRYAFATAHIHGEIYRRRGWLTSEGREIKNKSEILALLKALFLPKRLSIIHCLGHQKGDSAEARGNRLADQAAREAAIKTPPDTSTLLAGKRTADGSEFEKRTADGSEFESPKKKAKVE

SEQ ID NO: 6236 - protein, 2088 aa, synthetic construct
MPAAKRVKLDGGDKKYSIGLDIGTNSVGWAVITDEYKVPSKKFKVLGNTDRHSIKKNLIGALLFDSGETAEATRLKRTARRRYTRRKNRICYLQEIFSNEMAKVDDSFFHRLEESFLVEEDKKHERHPIFGNIVDEVAYHEKYPTIYHLRKKLVDSTDKADLRLIYLALAHMIKFRGHFLIEGDLNPDNSDVDKLFIQLVQTYNQLFEENPINASGVDAKAILSARLSKSRRLENLIAQLPGEKKNGLFGNLIALSLGLTPNFKSNFDLAEDAKLQLSKDTYDDDLDNLLAQIGDQYADLFLAAKNLSDAILLSDILRVNTEITKAPLSASMIKRYDEHHQDLTLLKALVRQQLPEKYKEIFFDQSKNGYAGYIDGGASQEEFYKFIKPILEKMDGTEELLVKLNREDLLRKQRTFDNGSIPHQIHLGELHAILRRQEDFYPFLKDNREKIEKILTFRIPYYVGPLARGNSRFAWMTRKSEETITPWNFEEVVDKGASAQSFIERMTNFDKNLPNEKVLPKHSLLYEYFTVYNELTKVKYVTEGMRKPAFLSGEQKKAIVDLLFKTNRKVTVKQLKEDYFKKIECFDSVEISGVEDRFNASLGTYHDLLKIIKDKDFLDNEENEDILEDIVLTLTLFEDREMIEERLKTYAHLFDDKVMKQLKRRRYTGWGRLSRKLINGIRDKQSGKTILDFLKSDGFANRNFMQLIHDDSLTFKEDIQKAQVSGQGDSLHEHIANLAGSPAIKKGILQTVKVVDELVKVMGRHKPENIVIEMARENQTTQKGQKNSRERMKRIEEGIKELGSQILKEHPVENTQLQNEKLYLYYLQNGRDMYVDQELDINRLSDYDVDHIVPQSFLKDDSIDNKVLTRSDKARGKSDNVPSEEVVKKMKNYWRQLLNAKLITQRKFDNLTKAERGGLSELDKAGFIKRQLVETRQITKHVAQILDSRMNTKYDENDKLIREVKVITLKSKLVSDFRKDFQFYKVREINNYHHAHDAYLNAVVGTALIKKYPKLESEFVYGDYKVYDVRKMIAKSEQEIGKATAKYFFYSNIMNFFKTEITLANGEIRKRPLIETNGETGEIVWDKGRDFATVRKVLSMPQVNIVKKTEVQTGGFSKESILPKRNSDKLIARKKDWDPKKYGGFDSPTVAYSVLVVAKVEKGKSKKLKSVKELLGITIMERSSFEKNPIDFLEAKGYKEVKKDLIIKLPKYSLFELENGRKRMLASAGELQKGNELALPSKYVNFLYLASHYEKLKGSPEDNEQKQLFVEQHKHYLDEIIEQISEFSKRVILADANLDKVLSAYNKHRDKPIREQAENIIHLFTLTNLGAPAAFKYFDTTIDRKRYTSTKEVLDATLIHQSITGLYETRIDLSQLGGDGGGGGGGTLNIEDEYRLHETSKGPDVPLGSTWLSDFPQAWAETGGMGLAVRQAPLIIPLKATSTPVSIKQYPMSQEARLGIKPHIQRLLDQGILVPCQSPWNTPLLPVKKPGTNDYRPVQDLREVNKRVEDIHPTVPNPYNLLSGLPPSHQWYTVLDLKDAFFCLRLHPTSQSLFAFEWRDPEMGISGQLTWTRLPQGFKNSPTLFNEALHRDLADFRIQHPDLILLQYVDDLLLAATSELDCQQGTRALLQTLGDLGYRASAKKAQICQKQVKYLGYLLKEGQRWLTEARKETVMGQPTPKTPRQLREFLGTAGFCRLWIPGFAEMAAPLYPLTKPGTLFEWGPDQQKAYQEIKQALLTAPALGLPDLTKPFELFVDEKQGYAKGVLTQKLGPWRRPVAYLSKKLDPVAAGWPPCLRMVAAIAVLTKDAGKLTMGQPLVILAPHAVEALVKQPPDRWLSNARMTHYQALLLDTDRVQFGPIVALNPATLLPLPEEGLQHDCLDILAEAHGTRPDLTDQPLPDADHTWYTDGSSFLQEGQRKAGAAVTTETEVVWAKALPAGTSAQRAELIALTQALKMAEGKKLNVYTDSRYAFATAHIHGEIYRRRGWLTSEGKEIKNKDEILALLKALFLPKRLSIIHCPGHQKGNRAEARGNRMADQAAREVATRETPETSTLLAGKRTADGSEFEKRTADGSEFESPKKKAKVE

SEQ ID NO: 6237 - protein, 2088 aa, synthetic construct
MPAAKRVKLDGGDKKYSIGLDIGTNSVGWAVITDEYKVPSKKFKVLGNTDRHSIKKNLIGALLFDSGETAEATRLKRTARRRYTRRKNRICYLQEIFSNEMAKVDDSFFHRLEESFLVEEDKKHERHPIFGNIVDEVAYHEKYPTIYHLRKKLVDSTDKADLRLIYLALAHMIKFRGHFLIEGDLNPDNSDVDKLFIQLVQTYNQLFEENPINASGVDAKAILSARLSKSRRLENLIAQLPGEKKNGLFGNLIALSLGLTPNFKSNFDLAEDAKLQLSKDTYDDDLDNLLAQIGDQYADLFLAAKNLSDAILLSDILRVNTEITKAPLSASMIKRYDEHHQDLTLLKALVRQQLPEKYKEIFFDQSKNGYAGYIDGGASQEEFYKFIKPILEKMDGTEELLVKLNREDLLRKQRTFDNGSIPHQIHLGELHAILRRQEDFYPFLKDNREKIEKILTFRIPYYVGPLARGNSRFAWMTRKSEETITPWNFEEVVDKGASAQSFIERMTNFDKNLPNEKVLPKHSLLYEYFTVYNELTKVKYVTEGMRKPAFLSGEQKKAIVDLLFKTNRKVTVKQLKEDYFKKIECFDSVEISGVEDRFNASLGTYHDLLKIIKDKDFLDNEENEDILEDIVLTLTLFEDREMIEERLKTYAHLFDDKVMKQLKRRRYTGWGRLSRKLINGIRDKQSGKTILDFLKSDGFANRNFMQLIHDDSLTFKEDIQKAQVSGQGDSLHEHIANLAGSPAIKKGILQTVKVVDELVKVMGRHKPENIVIEMARENQTTQKGQKNSRERMKRIEEGIKELGSQILKEHPVENTQLQNEKLYLYYLQNGRDMYVDQELDINRLSDYDVDHIVPQSFLKDDSIDNKVLTRSDKARGKSDNVPSEEVVKKMKNYWRQLLNAKLITQRKFDNLTKAERGGLSELDKAGFIKRQLVETRQITKHVAQILDSRMNTKYDENDKLIREVKVITLKSKLVSDFRKDFQFYKVREINNYHHAHDAYLNAVVGTALIKKYPKLESEFVYGDYKVYDVRKMIAKSEQEIGKATAKYFFYSNIMNFFKTEITLANGEIRKRPLIETNGETGEIVWDKGRDFATVRKVLSMPQVNIVKKTEVQTGGFSKESILPKRNSDKLIARKKDWDPKKYGGFDSPTVAYSVLVVAKVEKGKSKKLKSVKELLGITIMERSSFEKNPIDFLEAKGYKEVKKDLIIKLPKYSLFELENGRKRMLASAGELQKGNELALPSKYVNFLYLASHYEKLKGSPEDNEQKQLFVEQHKHYLDEIIEQISEFSKRVILADANLDKVLSAYNKHRDKPIREQAENIIHLFTLTNLGAPAAFKYFDTTIDRKRYTSTKEVLDATLIHQSITGLYETRIDLSQLGGDGGGGGGGTLNIEDEHRLHETSKEPDVSLGSTWLSDFPQAWAETGGMGLAVRQAPLIIPLKATSTPVSIKQYPMSQEARLGIKPHIQRLLDQGILVPCQSPWNTPLLPVKKPGTNDYRPVQDLREVNKRVEDIHPTVPNPYNLLSGLPPSHQWYTVLDLKDAFFCLRLHPTSQPLFAFEWRDPEMGISGQLTWTRLPQGFKNSPTLFNEALHRDLADFRIQHPDLILLQYVDDLLLAATSELDCQQGTRALLQTLGNLGYRASAKKAQICQKQVKYLGYLLKEGQRWLTEARKETVMGQPTPKTPRQLREFLGTAGFCRLWIPGFAEMAAPLYPLTKPGTLFNWGPDQQKAYQEIKQALLTAPALGLPDLTKPFELFVDEKQGYAKGVLTQKLGPWRRPVAYLSKKLDPVAAGWPPCLRMVAAIAVLTKDAGKLTMGQPLVILAPHAVEALVKQPPDRWLSNARMTHYQALLLDTDRVQFGPVVALNPATLLPLPEEGLQHNCLDILAEAHGTRPDLTDQPLPDADHTWYTDGSSLLQEGQRKAGAAVTTETEVIWAKALPAGTSAQRAELIALTQALKMAEGKKLNVYTDSRYAFATAHIHGEIYRRRGWLTSEGKEIKNKDEILALLKALFLPKRLSIIHCPGHQKGHSAEARGNRMADQAARKAAITETPDTSTLLAGKRTADGSEFEKRTADGSEFESPKKKAKVE

SEQ ID NO: 6238 - protein, 2088 aa, synthetic construct; identical to SEQ ID NO: 6237

SEQ ID NO: 6239 - protein, 2088 aa, synthetic construct
MPAAKRVKLDGGDKKYSIGLDIGTNSVGWAVITDEYKVPSKKFKVLGNTDRHSIKKNLIGALLFDSGETAEATRLKRTARRRYTRRKNRICYLQEIFSNEMAKVDDSFFHRLEESFLVEEDKKHERHPIFGNIVDEVAYHEKYPTIYHLRKKLVDSTDKADLRLIYLALAHMIKFRGHFLIEGDLNPDNSDVDKLFIQLVQTYNQLFEENPINASGVDAKAILSARLSKSRRLENLIAQLPGEKKNGLFGNLIALSLGLTPNFKSNFDLAEDAKLQLSKDTYDDDLDNLLAQIGDQYADLFLAAKNLSDAILLSDILRVNTEITKAPLSASMIKRYDEHHQDLTLLKALVRQQLPEKYKEIFFDQSKNGYAGYIDGGASQEEFYKFIKPILEKMDGTEELLVKLNREDLLRKQRTFDNGSIPHQIHLGELHAILRRQEDFYPFLKDNREKIEKILTFRIPYYVGPLARGNSRFAWMTRKSEETITPWNFEEVVDKGASAQSFIERMTNFDKNLPNEKVLPKHSLLYEYFTVYNELTKVKYVTEGMRKPAFLSGEQKKAIVDLLFKTNRKVTVKQLKEDYFKKIECFDSVEISGVEDRFNASLGTYHDLLKIIKDKDFLDNEENEDILEDIVLTLTLFEDREMIEERLKTYAHLFDDKVMKQLKRRRYTGWGRLSRKLINGIRDKQSGKTILDFLKSDGFANRNFMQLIHDDSLTFKEDIQKAQVSGQGDSLHEHIANLAGSPAIKKGILQTVKVVDELVKVMGRHKPENIVIEMARENQTTQKGQKNSRERMKRIEEGIKELGSQILKEHPVENTQLQNEKLYLYYLQNGRDMYVDQELDINRLSDYDVDHIVPQSFLKDDSIDNKVLTRSDKARGKSDNVPSEEVVKKMKNYWRQLLNAKLITQRKFDNLTKAERGGLSELDKAGFIKRQLVETRQITKHVAQILDSRMNTKYDENDKLIREVKVITLKSKLVSDFRKDFQFYKVREINNYHHAHDAYLNAVVGTALIKKYPKLESEFVYGDYKVYDVRKMIAKSEQEIGKATAKYFFYSNIMNFFKTEITLANGEIRKRPLIETNGETGEIVWDKGRDFATVRKVLSMPQVNIVKKTEVQTGGFSKESILPKRNSDKLIARKKDWDPKKYGGFDSPTVAYSVLVVAKVEKGKSKKLKSVKELLGITIMERSSFEKNPIDFLEAKGYKEVKKDLIIKLPKYSLFELENGRKRMLASAGELQKGNELALPSKYVNFLYLASHYEKLKGSPEDNEQKQLFVEQHKHYLDEIIEQISEFSKRVILADANLDKVLSAYNKHRDKPIREQAENIIHLFTLTNLGAPAAFKYFDTTIDRKRYTSTKEVLDATLIHQSITGLYETRIDLSQLGGDGGGGGGGTLNIEDEYRLHEISTEPDVSPGSTWLSDFPQAWAETGGMGLAVRQAPLIIPLKATSTPVSIKQYPMSQEAKLGIKPHIQRLLDQGILVPCQSPWNTPLLPVKKPGTNDYRPVQGLREVNKRVEDIHPTVPNPYNLLSGLPTSHRWYTVLDLKDAFFCLRLHPTSQPLFASEWRDPGMGISGQLTWTRLPQGFKNSPTLFNEALHRGLADFRIQHPDLILLQYVDDLLLAATSELDCQQGTRALLKTLGNLGYRASAKKAQICQKQVKYLGYLLREGQRWLTEARKETVMGQPTPKTPRQLREFLGTAGFCRLWIPRFAEMAAPLYPLTKPGTLFNWGPDQQKAYHEIKQALLTAPALGLPDLTKPFELFVDEKQGYAKGVLTQKLGPWRRPVAYLSKKLDPVAAGWPPCLRMVAAIAVLTKDAGKLTMGQPLVILAPHAVEALVKQPPDRWLSNARMTHYQAMLLDTDRVQFGPVVALNPATLLPLPEEGAPHDCLEILAETHGTEPDLTDQPIPDADHTWYTDGSSFLQEGQRKAGAAVTTETEVIWARALPAGTSAQRAELIALTQALKMAEGKRLNVYTDSRYAFATAHIHGEIYKRRGWLTSEGREIKNKSEILALLKALFLPKRLSIIHCLGHQKGDSAEARGNRLADQAAREAAIKTPPDTSTLLAGKRTADGSEFEKRTADGSEFESPKKKAKVE

SEQ ID NO: 6240 - protein, 2082 aa, synthetic construct
MPAAKRVKLDGGDKKYSIGLDIGTNSVGWAVITDEYKVPSKKFKVLGNTDRHSIKKNLIGALLFDSGETAEATRLKRTARRRYTRRKNRICYLQEIFSNEMAKVDDSFFHRLEESFLVEEDKKHERHPIFGNIVDEVAYHEKYPTIYHLRKKLVDSTDKADLRLIYLALAHMIKFRGHFLIEGDLNPDNSDVDKLFIQLVQTYNQLFEENPINASGVDAKAILSARLSKSRRLENLIAQLPGEKKNGLFGNLIALSLGLTPNFKSNFDLAEDAKLQLSKDTYDDDLDNLLAQIGDQYADLFLAAKNLSDAILLSDILRVNTEITKAPLSASMIKRYDEHHQDLTLLKALVRQQLPEKYKEIFFDQSKNGYAGYIDGGASQEEFYKFIKPILEKMDGTEELLVKLNREDLLRKQRTFDNGSIPHQIHLGELHAILRRQEDFYPFLKDNREKIEKILTFRIPYYVGPLARGNSRFAWMTRKSEETITPWNFEEVVDKGASAQSFIERMTNFDKNLPNEKVLPKHSLLYEYFTVYNELTKVKYVTEGMRKPAFLSGEQKKAIVDLLFKTNRKVTVKQLKEDYFKKIECFDSVEISGVEDRFNASLGTYHDLLKIIKDKDFLDNEENEDILEDIVLTLTLFEDREMIEERLKTYAHLFDDKVMKQLKRRRYTGWGRLSRKLINGIRDKQSGKTILDFLKSDGFANRNFMQLIHDDSLTFKEDIQKAQVSGQGDSLHEHIANLAGSPAIKKGILQTVKVVDELVKVMGRHKPENIVIEMARENQTTQKGQKNSRERMKRIEEGIKELGSQILKEHPVENTQLQNEKLYLYYLQNGRDMYVDQELDINRLSDYDVDHIVPQSFLKDDSIDNKVLTRSDKARGKSDNVPSEEVVKKMKNYWRQLLNAKLITQRKFDNLTKAERGGLSELDKAGFIKRQLVETRQITKHVAQILDSRMNTKYDENDKLIREVKVITLKSKLVSDFRKDFQFYKVREINNYHHAHDAYLNAVVGTALIKKYPKLESEFVYGDYKVYDVRKMIAKSEQEIGKATAKYFFYSNIMNFFKTEITLANGEIRKRPLIETNGETGEIVWDKGRDFATVRKVLSMPQVNIVKKTEVQTGGFSKESILPKRNSDKLIARKKDWDPKKYGGFDSPTVAYSVLVVAKVEKGKSKKLKSVKELLGITIMERSSFEKNPIDFLEAKGYKEVKKDLIIKLPKYSLFELENGRKRMLASAGELQKGNELALPSKYVNFLYLASHYEKLKGSPEDNEQKQLFVEQHKHYLDEIIEQISEFSKRVILADANLDKVLSAYNKHRDKPIREQAENIIHLFTLTNLGAPAAFKYFDTTIDRKRYTSTKEVLDATLIHQSITGLYETRIDLSQLGGDGGGGGGGTLQLDDEYRLYSPLVKPDQNIQFWLEQFPQAWAETAGMGLAKQVPPQVIQLKASATPVSVRQYPLSKEAQEGIRPHVQRLIQQGILVPVQSPWNTPLLPVRKPGTNDYRPVQDLREVNKRVQDIHPTVPNPYNLLCALPPQRSWYTVLDLKDAFFCLRLHPTSQPLFAFEWRDPGTGRTGQLTWTRLPQGFKNSPTIFNEALHRDLANFRIQHPQVTLLQYVDDLLLAGATKQDCLEGTKALLLELSDLGYRASAKKAQICRREVTYLGYSLRDGQRWLTEARKKTVVQIPAPTTAKQVREFLGTAGFCRLWIPGFATLAAPLYPLTKPKGEFSWAPEHQKAFDAIKKALLSAPALALPDVTKPFTLYVDERKGVARGVLTQTLGPWRRPVAYLSKKLDPVASGWPVCLKAIAAVAILVKDADKLTLGQNITVIAPHALENIVRQPPDRWMTNARMTHYQSLLLTERVTFAPPAALNPATLLPEETDEPVTHDCHQLLIEETGVRKDLTDIPLTGEVLTWFTDGSSYVVEGKRMAGAAVVDGTRTIWASSLPEGTSAQKAELMALTQALRLAEGKSINIYTDSRYAFATAHVHGAIYKQRGWLTSAGREIKNKEEILSLLEALHLPKRLAIIHCPGHQKAKDPISRGNQMADRVAKQAAQGVNLLAGKRTADGSEFEKRTADGSEFESPKKKAKVE

SEQ ID NO: 6241 - protein, 2079 aa, synthetic construct
MPAAKRVKLDGGDKKYSIGLDIGTNSVGWAVITDEYKVPSKKFKVLGNTDRHSIKKNLIGALLFDSGETAEATRLKRTARRRYTRRKNRICYLQEIFSNEMAKVDDSFFHRLEESFLVEEDKKHERHPIFGNIVDEVAYHEKYPTIYHLRKKLVDSTDKADLRLIYLALAHMIKFRGHFLIEGDLNPDNSDVDKLFIQLVQTYNQLFEENPINASGVDAKAILSARLSKSRRLENLIAQLPGEKKNGLFGNLIALSLGLTPNFKSNFDLAEDAKLQLSKDTYDDDLDNLLAQIGDQYADLFLAAKNLSDAILLSDILRVNTEITKAPLSASMIKRYDEHHQDLTLLKALVRQQLPEKYKEIFFDQSKNGYAGYIDGGASQEEFYKFIKPILEKMDGTEELLVKLNREDLLRKQRTFDNGSIPHQIHLGELHAILRRQEDFYPFLKDNREKIEKILTFRIPYYVGPLARGNSRFAWMTRKSEETITPWNFEEVVDKGASAQSFIERMTNFDKNLPNEKVLPKHSLLYEYFTVYNELTKVKYVTEGMRKPAFLSGEQKKAIVDLLFKTNRKVTVKQLKEDYFKKIECFDSVEISGVEDRFNASLGTYHDLLKIIKDKDFLDNEENEDILEDIVLTLTLFEDREMIEERLKTYAHLFDDKVMKQLKRRRYTGWGRLSRKLINGIRDKQSGKTILDFLKSDGFANRNFMQLIHDDSLTFKEDIQKAQVSGQGDSLHEHIANLAGSPAIKKGILQTVKVVDELVKVMGRHKPENIVIEMARENQTTQKGQKNSRERMKRIEEGIKELGSQILKEHPVENTQLQNEKLYLYYLQNGRDMYVDQELDINRLSDYDVDHIVPQSFLKDDSIDNKVLTRSDKARGKSDNVPSEEVVKKMKNYWRQLLNAKLITQRKFDNLTKAERGGLSELDKAGFIKRQLVETRQITKHVAQILDSRMNTKYDENDKLIREVKVITLKSKLVSDFRKDFQFYKVREINNYHHAHDAYLNAVVGTALIKKYPKLESEFVYGDYKVYDVRKMIAKSEQEIGKATAKYFFYSNIMNFFKTEITLANGEIRKRPLIETNGETGEIVWDKGRDFATVRKVLSMPQVNIVKKTEVQTGGFSKESILPKRNSDKLIARKKDWDPKKYGGFDSPTVAYSVLVVAKVEKGKSKKLKSVKELLGITIMERSSFEKNPIDFLEAKGYKEVKKDLIIKLPKYSLFELENGRKRMLASAGELQKGNELALPSKYVNFLYLASHYEKLKGSPEDNEQKQLFVEQHKHYLDEIIEQISEFSKRVILADANLDKVLSAYNKHRDKPIREQAENIIHLFTLTNLGAPAAFKYFDTTIDRKRYTSTKEVLDATLIHQSITGLYETRIDLSQLGGDGGGGGGGIPWLMKKPLQLTTLVPLQEYEERLLKQTMLTGSYKEKLQSLFLKYDALWQHWENQVGHRRIKPHHIATGTVNPRPQKQYPINPKAKASIQTVINDLLKQGVLIQQNSIMNTPVYPVPKPDGKWRMVLDYREVNKTIPLIAAQNQHSAGILSSIFRGKYKTTLDLSNGFWAHSITPESYWLTAFTWLGQQYCWTRLPQGFLNSPALFNADVVDLLKEVPNVQVYVDDIYISHDDPREHLEQLEKVFSLLLNAGYVVSLKKSEIAQHEVEFLGFNITKEGRGLTETFKQKLLNITPPRDLKQLQSILGKLNFARNFIPNFSELVKPLYNIIATAPGKYITWTTDNSQQLQNIISMLNSAENLEERNPEVRLIMKVNTSPSAGYIRFYNEFAKRPIMYLNYVYTKAEVKFTNTEKLLTTIHKGLIKALDLGMGQEILVYSPIVSMTKIQKTPLPERKALPIRWITWMSYLEDPRIQFHYDKTLPELQQVPTVTDDIIAKIKHPSEFSMVFYTDGSAIKHPNVNKSHNAGMGIAQVQFKPEFTVINTWSIPLGDHTAQLAEVAAVEFACKKALKIDGPVLIVTDSFYVAESVNKELPYWQSNGFFNNKKKPLKHVSKWKSIADCIQLKPDIIIIHEKGHQPTASTFHTEGNNLADKLATQGSYVVNAGKRTADGSEFEKRTADGSEFESPKKKAKVE

SEQ ID NO: 6242 - protein, 2086 aa, synthetic construct
MPAAKRVKLDGGDKKYSIGLDIGTNSVGWAVITDEYKVPSKKFKVLGNTDRHSIKKNLIGALLFDSGETAEATRLKRTARRRYTRRKNRICYLQEIFSNEMAKVDDSFFHRLEESFLVEEDKKHERHPIFGNIVDEVAYHEKYPTIYHLRKKLVDSTDKADLRLIYLALAHMIKFRGHFLIEGDLNPDNSDVDKLFIQLVQTYNQLFEENPINASGVDAKAILSARLSKSRRLENLIAQLPGEKKNGLFGNLIALSLGLTPNFKSNFDLAEDAKLQLSKDTYDDDLDNLLAQIGDQYADLFLAAKNLSDAILLSDILRVNTEITKAPLSASMIKRYDEHHQDLTLLKALVRQQLPEKYKEIFFDQSKNGYAGYIDGGASQEEFYKFIKPILEKMDGTEELLVKLNREDLLRKQRTFDNGSIPHQIHLGELHAILRRQEDFYPFLKDNREKIEKILTFRIPYYVGPLARGNSRFAWMTRKSEETITPWNFEEVVDKGASAQSFIERMTNFDKNLPNEKVLPKHSLLYEYFTVYNELTKVKYVTEGMRKPAFLSGEQKKAIVDLLFKTNRKVTVKQLKEDYFKKIECFDSVEISGVEDRFNASLGTYHDLLKIIKDKDFLDNEENEDILEDIVLTLTLFEDREMIEERLKTYAHLFDDKVMKQLKRRRYTGWGRLSRKLINGIRDKQSGKTILDFLKSDGFANRNFMQLIHDDSLTFKEDIQKAQVSGQGDSLHEHIANLAGSPAIKKGILQTVKVVDELVKVMGRHKPENIVIEMARENQTTQKGQKNSRERMKRIEEGIKELGSQILKEHPVENTQLQNEKLYLYYLQNGRDMYVDQELDINRLSDYDVDHIVPQSFLKDDSIDNKVLTRSDKARGKSDNVPSEEVVKKMKNYWRQLLNAKLITQRKFDNLTKAERGGLSELDKAGFIKRQLVETRQITKHVAQILDSRMNTKYDENDKLIREVKVITLKSKLVSDFRKDFQFYKVREINNYHHAHDAYLNAVVGTALIKKYPKLESEFVYGDYKVYDVRKMIAKSEQEIGKATAKYFFYSNIMNFFKTEITLANGEIRKRPLIETNGETGEIVWDKGRDFATVRKVLSMPQVNIVKKTEVQTGGFSKESILPKRNSDKLIARKKDWDPKKYGGFDSPTVAYSVLVVAKVEKGKSKKLKSVKELLGITIMERSSFEKNPIDFLEAKGYKEVKKDLIIKLPKYSLFELENGRKRMLASAGELQKGNELALPSKYVNFLYLASHYEKLKGSPEDNEQKQLFVEQHKHYLDEIIEQISEFSKRVILADANLDKVLSAYNKHRDKPIREQAENIIHLFTLTNLGAPAAFKYFDTTIDRKRYTSTKEVLDATLIHQSITGLYETRIDLSQLGGDGGGGGGGVLNLEEEYRLHEKPVPSSIDPSWLQLFPTVWAERAGMGLANQVPPVVVELRSGASPVAVRQYPMSKEAREGIRPHIQRFLDLGVLVPCQSPWNTPLLPVKKPGTNDYRPVQDLREINKRVQDIHPTVPNPYNLLSSLPPSHTWYSVLDLKDAFFCLKLHPNSQPLFAFEWRDPEKGNTGQLTWTRLPQGFKNSPTLFDEALHRDLAPFRALNPQVVLLQYVDDLLVAAPTYRDCKEGTQKLLQELSKLGYRVSAKKAQLCQKEVTYLGYLLKEGKRWLTPARKATVMKIPPPTTPRQVREFLGTAGFCRLWIPGFASLAAPLYPLTKESIPFIWTEEHQKAFDRIKEALLSAPALALPDLTKPFTLYVDERAGVARGVLTQTLGPWRRPVAYLSKKLDPVASGWPTCLKAVAAVALLLKDADKLTLGQNVTVIASHSLESIVRQPPDRWMTNARMTHYQSLLLNERVSFAPPAVLNPATLLPVESEATPVHRCSEILAEETGTRRDLKDQPLPGVPAWYTDGSSFIAEGKRRAGAAIVDGKRTVWASSLPEGTSAQKAELVALTQALRLAEGKDINIYTDSRYAFATAHIHGAIYKQRGLLTSAGKDIKNKEEILALLEAIHLPKRVAIIHCPGHQKGNDPVATGNRRADEAAKQAALSTRVLAETTKPAGKRTADGSEFEKRTADGSEFESPKKKAKVE

SEQ ID NO: 6243 - protein, 2086 aa, synthetic construct
MPAAKRVKLDGGDKKYSIGLDIGTNSVGWAVITDEYKVPSKKFKVLGNTDRHSIKKNLIGALLFDSGETAEATRLKRTARRRYTRRKNRICYLQEIFSNEMAKVDDSFFHRLEESFLVEEDKKHERHPIFGNIVDEVAYHEKYPTIYHLRKKLVDSTDKADLRLIYLALAHMIKFRGHFLIEGDLNPDNSDVDKLFIQLVQTYNQLFEENPINASGVDAKAILSARLSKSRRLENLIAQLPGEKKNGLFGNLIALSLGLTPNFKSNFDLAEDAKLQLSKDTYDDDLDNLLAQIGDQYADLFLAAKNLSDAILLSDILRVNTEITKAPLSASMIKRYDEHHQDLTLLKALVRQQLPEKYKEIFFDQSKNGYAGYIDGGASQEEFYKFIKPILEKMDGTEELLVKLNREDLLRKQRTFDNGSIPHQIHLGELHAILRRQEDFYPFLKDNREKIEKILTFRIPYYVGPLARGNSRFAWMTRKSEETITPWNFEEVVDKGASAQSFIERMTNFDKNLPNEKVLPKHSLLYEYFTVYNELTKVKYVTEGMRKPAFLSGEQKKAIVDLLFKTNRKVTVKQLKEDYFKKIECFDSVEISGVEDRFNASLGTYHDLLKIIKDKDFLDNEENEDILEDIVLTLTLFEDREMIEERLKTYAHLFDDKVMKQLKRRRYTGWGRLSRKLINGIRDKQSGKTILDFLKSDGFANRNFMQLIHDDSLTFKEDIQKAQVSGQGDSLHEHIANLAGSPAIKKGILQTVKVVDELVKVMGRHKPENIVIEMARENQTTQKGQKNSRERMKRIEEGIKELGSQILKEHPVENTQLQNEKLYLYYLQNGRDMYVDQELDINRLSDYDVDHIVPQSFLKDDSIDNKVLTRSDKARGKSDNVPSEEVVKKMKNYWRQLLNAKLITQRKFDNLTKAERGGLSELDKAGFIKRQLVETRQITKHVAQILDSRMNTKYDENDKLIREVKVITLKSKLVSDFRKDFQFYKVREINNYHHAHDAYLNAVVGTALIKKYPKLESEFVYGDYKVYDVRKMIAKSEQEIGKATAKYFFYSNIMNFFKTEITLANGEIRKRPLIETNGETGEIVWDKGRDFATVRKVLSMPQVNIVKKTEVQTGGFSKESILPKRNSDKLIARKKDWDPKKYGGFDSPTVAYSVLVVAKVEKGKSKKLKSVKELLGITIMERSSFEKNPIDFLEAKGYKEVKKDLIIKLPKYSLFELENGRKRMLASAGELQKGNELALPSKYVNFLYLASHYEKLKGSPEDNEQKQLFVEQHKHYLDEIIEQISEFSKRVILADANLDKVLSAYNKHRDKPIREQAENIIHLFTLTNLGAPAAFKYFDTTIDRKRYTSTKEVLDATLIHQSITGLYETRIDLSQLGGDGGGGGGGVLNLEEEYRLHEKPVPSSIDPSWLQLFPTVWAERAGMGLANQVPPVVVELRSGASPVAVRQYPMSKEAREGIRPHIQRFLDLGVLVPCQSPWNTPLLPVKKPGTNDYRPVQDLREINKRVQDIHPTVPNPYNLLSSLPPSHTWYSVLDLKDAFFCLKLHPNSQPLFAFEWRDPEKGNTGQLTWTRLPQGFKNSPTLFNEALHRDLAPFRALNPQVVLLQYVDDLLVAAPTYRDCKEGTQKLLQELSKLGYRVSAKKAQLCQKEVTYLGYLLKEGKRWLTPARKATVMKIPPPTTPRQVREFLGKAGFCRLFIPGFASLAAPLYPLTKPSIPFIWTEEHQKAFDRIKEALLSAPALALPDLTKPFTLYVDERAGVARGVLTQTLGPWRRPVAYLSKKLDPVASGWPTCLKAVAAVALLLKDADKLTLGQNVTVIASHSLESIVRQPPDRWMTNARMTHYQSLLLNERVSFAPPAVLNPATLLPVESEATPVHRCSEILAEETGTRRDLKDQPLPGVPAWYTDGSSFIAEGKRRAGAAIVDGKRTVWASSLPEGTSAQKAELVALTQALRLAEGKDINIYTDSRYAFATAHIHGAIYKQRGWLTSAGKDIKNKEEILALLEAIHLPKRVAIIHCPGHQKGNDPVATGNRRADEAAKQAALSTRVLAETTKPAGKRTADGSEFEKRTADGSEFESPKKKAKVE

SEQ ID NO: 6244 - protein, 2091 aa, synthetic construct
MPAAKRVKLDGGDKKYSIGLDIGTNSVGWAVITDEYKVPSKKFKVLGNTDRHSIKKNLIGALLFDSGETAEATRLKRTARRRYTRRKNRICYLQEIFSNEMAKVDDSFFHRLEESFLVEEDKKHERHPIFGNIVDEVAYHEKYPTIYHLRKKLVDSTDKADLRLIYLALAHMIKFRGHFLIEGDLNPDNSDVDKLFIQLVQTYNQLFEENPINASGVDAKAILSARLSKSRRLENLIAQLPGEKKNGLFGNLIALSLGLTPNFKSNFDLAEDAKLQLSKDTYDDDLDNLLAQIGDQYADLFLAAKNLSDAILLSDILRVNTEITKAPLSASMIKRYDEHHQDLTLLKALVRQQLPEKYKEIFFDQSKNGYAGYIDGGASQEEFYKFIKPILEKMDGTEELLVKLNREDLLRKQRTFDNGSIPHQIHLGELHAILRRQEDFYPFLKDNREKIEKILTFRIPYYVGPLARGNSRFAWMTRKSEETITPWNFEEVVDKGASAQSFIERMTNFDKNLPNEKVLPKHSLLYEYFTVYNELTKVKYVTEGMRKPAFLSGEQKKAIVDLLFKTNRKVTVKQLKEDYFKKIECFDSVEISGVEDRFNASLGTYHDLLKIIKDKDFLDNEENEDILEDIVLTLTLFEDREMIEERLKTYAHLFDDKVMKQLKRRRYTGWGRLSRKLINGIRDKQSGKTILDFLKSDGFANRNFMQLIHDDSLTFKEDIQKAQVSGQGDSLHEHIANLAGSPAIKKGILQTVKVVDELVKVMGRHKPENIVIEMARENQTTQKGQKNSRERMKRIEEGIKELGSQILKEHPVENTQLQNEKLYLYYLQNGRDMYVDQELDINRLSDYDVDHIVPQSFLKDDSIDNKVLTRSDKARGKSDNVPSEEVVKKMKNYWRQLLNAKLITQRKFDNLTKAERGGLSELDKAGFIKRQLVETRQITKHVAQILDSRMNTKYDENDKLIREVKVITLKSKLVSDFRKDFQFYKVREINNYHHAHDAYLNAVVGTALIKKYPKLESEFVYGDYKVYDVRKMIAKSEQEIGKATAKYFFYSNIMNFFKTEITLANGEIRKRPLIETNGETGEIVWDKGRDFATVRKVLSMPQVNIVKKTEVQTGGFSKESILPKRNSDKLIARKKDWDPKKYGGFDSPTVAYSVLVVAKVEKGKSKKLKSVKELLGITIMERSSFEKNPIDFLEAKGYKEVKKDLIIKLPKYSLFELENGRKRMLASAGELQKGNELALPSKYVNFLYLASHYEKLKGSPEDNEQKQLFVEQHKHYLDEIIEQISEFSKRVILADANLDKVLSAYNKHRDKPIREQAENIIHLFTLTNLGAPAAFKYFDTTIDRKRYTSTKEVLDATLIHQSITGLYETRIDLSQLGGDGGGGGGGGTAPLEEEYRLFLEAPIQNVTLLEQWKREIPKVWAEINPPGLASTQAPIHVQLLSTALPVRVRQYPITLEAKRSLRETIRKFRAAGILRPVHSPWNTPLLPVRKSGTSEYRMVQDLREVNKRVETIHPTVPNPYTLLSLLPPDRIWYSVLDLKDAFFCIPLAPESQLIFAFEWADAEEGESGQLTWTRLPQGFKNSPTLFNEALNRDLQGFRLDHPSVSLLQYVDDLLIAADTQAACLSATRDLLMTLAELGYRVSGKKAQLCQEEVTYLGFKIHKGSRSLSNSRTQAILQIPVPKTKRQVREFLGTIGYCRLWIPGFAELAQPLYAATRPGNDPLVWGEKEEEAFQSLKLALTQPPALALPSLDKPFQLFVEETSGAAKGVLTQALGPWKRPVAYLSKRLDPVAAGWPRCLRAIAAAALLTREASKLTFGQDIEITSSHNLESLLRSPPDKWLTNARITQYQVLLLDPPRVRFKQTAALNPATLLPETDDTLPIHHCLDTLDSLTSTRPDLTDQPLAQAEATLFTDGSSYIRDGKRYAGAAVVTLDSVIWAEPLPIGTSAQKAELIALTKALEWSKDKSVNIYTDSRYAFATLHVHGMIYRERGWLTAGGKAIKNAPEILALLTAVWLPKRVAVMHCKGHQKDDAPTSTGNRRADEVAREVAIRPLSTQATISAGKRTADGSEFEKRTADGSEFESPKKKAKVE

SEQ ID NO: 6245 - protein, 2095 aa, synthetic construct
MPAAKRVKLDGGDKKYSIGLDIGTNSVGWAVITDEYKVPSKKFKVLGNTDRHSIKKNLIGALLFDSGETAEATRLKRTARRRYTRRKNRICYLQEIFSNEMAKVDDSFFHRLEESFLVEEDKKHERHPIFGNIVDEVAYHEKYPTIYHLRKKLVDSTDKADLRLIYLALAHMIKFRGHFLIEGDLNPDNSDVDKLFIQLVQTYNQLFEENPINASGVDAKAILSARLSKSRRLENLIAQLPGEKKNGLFGNLIALSLGLTPNFKSNFDLAEDAKLQLSKDTYDDDLDNLLAQIGDQYADLFLAAKNLSDAILLSDILRVNTEITKAPLSASMIKRYDEHHQDLTLLKALVRQQLPEKYKEIFFDQSKNGYAGYIDGGASQEEFYKFIKPILEKMDGTEELLVKLNREDLLRKQRTFDNGSIPHQIHLGELHAILRRQEDFYPFLKDNREKIEKILTFRIPYYVGPLARGNSRFAWMTRKSEETITPWNFEEVVDKGASAQSFIERMTNFDKNLPNEKVLPKHSLLYEYFTVYNELTKVKYVTEGMRKPAFLSGEQKKAIVDLLFKTNRKVTVKQLKEDYFKKIECFDSVEISGVEDRFNASLGTYHDLLKIIKDKDFLDNEENEDILEDIVLTLTLFEDREMIEERLKTYAHLFDDKVMKQLKRRRYTGWGRLSRKLINGIRDKQSGKTILDFLKSDGFANRNFMQLIHDDSLTFKEDIQKAQVSGQGDSLHEHIANLAGSPAIKKGILQTVKVVDELVKVMGRHKPENIVIEMARENQTTQKGQKNSRERMKRIEEGIKELGSQILKEHPVENTQLQNEKLYLYYLQNGRDMYVDQELDINRLSDYDVDHIVPQSFLKDDSIDNKVLTRSDKARGKSDNVPSEEVVKKMKNYWRQLLNAKLITQRKFDNLTKAERGGLSELDKAGFIKRQLVETRQITKHVAQILDSRMNTKYDENDKLIREVKVITLKSKLVSDFRKDFQFYKVREINNYHHAHDAYLNAVVGTALIKKYPKLESEFVYGDYKVYDVRKMIAKSEQEIGKATAKYFFYSNIMNFFKTEITLANGEIRKRPLIETNGETGEIVWDKGRDFATVRKVLSMPQVNIVKKTEVQTGGFSKESILPKRNSDKLIARKKDWDPKKYGGFDSPTVAYSVLVVAKVEKGKSKKLKSVKELLGITIMERSSFEKNPIDFLEAKGYKEVKKDLIIKLPKYSLFELENGRKRMLASAGELQKGNELALPSKYVNFLYLASHYEKLKGSPEDNEQKQLFVEQHKHYLDEIIEQISEFSKRVILADANLDKVLSAYNKHRDKPIREQAENIIHLFTLTNLGAPAAFKYFDTTIDRKRYTSTKEVLDATLIHQSITGLYETRIDLSQLGGDGGGGGGGGTVSLQDEHRLFDIPVTTSLPDVWLQDFPQAWAETGGLGRAKCQAPIIIDLKPTAVPVSIKQYPMSLEAHMGIRQHIIKFLELGVLRPCRSPWNTPLLPVKKPGTQDYRPVQDLREINKRTVDIHPTVPNPYNLLSTLKPDYSWYTVLDLKDAFFCLPLAPQSQELFAFEWKDPERGISGQLTWTRLPQGFKNSPTLFNEALHRDLTDFRTQHPEVTLLQYVDDLLLAAPTKKACTQGTRHLLQELGEKGYRASAKKAQICQTKVTYLGYILSEGKRWLTPGRIETVARIPPPRNPREVREFLGTAGFCRLWIPGFAELAAPLYALTKPSTPFTWQTEHQLAFEALKKALLSAPALGLPDTSKPFTLFLDERQGIAKGVLTQKLGPWKRPVAYLSKKLDPVAAGWPPCLRIMAATAMLVKDSAKLTLGQPLTVITPHTLEAIVRQPPDRWITNARLTHYQALLLDTDRVQFGPPVTLNPATLLPVPENQPSPHDCRQVLAETHGTREDLKDQELPDADHTWYTDGSSYLDSGTRRAGAAVVDGHNTIWAQSLPPGTSAQKAELIALTKALELSKGKKANIYTDSRYAFATAHTHGSIYERRGWLTSEGKEIKNKAEIIALLKALFLPQEVAIIHCPGHQKGQDPVAVGNRQADRVARQAAMAEVLTLATEPDNTSHITAGKRTADGSEFEKRTADGSEFESPKKKAKVE

SEQ ID NO: 6246 - protein, 2087 aa, synthetic construct
MPAAKRVKLDGGDKKYSIGLDIGTNSVGWAVITDEYKVPSKKFKVLGNTDRHSIKKNLIGALLFDSGETAEATRLKRTARRRYTRRKNRICYLQEIFSNEMAKVDDSFFHRLEESFLVEEDKKHERHPIFGNIVDEVAYHEKYPTIYHLRKKLVDSTDKADLRLIYLALAHMIKFRGHFLIEGDLNPDNSDVDKLFIQLVQTYNQLFEENPINASGVDAKAILSARLSKSRRLENLIAQLPGEKKNGLFGNLIALSLGLTPNFKSNFDLAEDAKLQLSKDTYDDDLDNLLAQIGDQYADLFLAAKNLSDAILLSDILRVNTEITKAPLSASMIKRYDEHHQDLTLLKALVRQQLPEKYKEIFFDQSKNGYAGYIDGGASQEEFYKFIKPILEKMDGTEELLVKLNREDLLRKQRTFDNGSIPHQIHLGELHAILRRQEDFYPFLKDNREKIEKILTFRIPYYVGPLARGNSRFAWMTRKSEETITPWNFEEVVDKGASAQSFIERMTNFDKNLPNEKVLPKHSLLYEYFTVYNELTKVKYVTEGMRKPAFLSGEQKKAIVDLLFKTNRKVTVKQLKEDYFKKIECFDSVEISGVEDRFNASLGTYHDLLKIIKDKDFLDNEENEDILEDIVLTLTLFEDREMIEERLKTYAHLFDDKVMKQLKRRRYTGWGRLSRKLINGIRDKQSGKTILDFLKSDGFANRNFMQLIHDDSLTFKEDIQKAQVSGQGDSLHEHIANLAGSPAIKKGILQTVKVVDELVKVMGRHKPENIVIEMARENQTTQKGQKNSRERMKRIEEGIKELGSQILKEHPVENTQLQNEKLYLYYLQNGRDMYVDQELDINRLSDYDVDHIVPQSFLKDDSIDNKVLTRSDKARGKSDNVPSEEVVKKMKNYWRQLLNAKLITQRKFDNLTKAERGGLSELDKAGFIKRQLVETRQITKHVAQILDSRMNTKYDENDKLIREVKVITLKSKLVSDFRKDFQFYKVREINNYHHAHDAYLNAVVGTALIKKYPKLESEFVYGDYKVYDVRKMIAKSEQEIGKATAKYFFYSNIMNFFKTEITLANGEIRKRPLIETNGETGEIVWDKGRDFATVRKVLSMPQVNIVKKTEVQTGGFSKESILPKRNSDKLIARKKDWDPKKYGGFDSPTVAYSVLVVAKVEKGKSKKLKSVKELLGITIMERSSFEKNPIDFLEAKGYKEVKKDLIIKLPKYSLFELENGRKRMLASAGELQKGNELALPSKYVNFLYLASHYEKLKGSPEDNEQKQLFVEQHKHYLDEIIEQISEFSKRVILADANLDKVLSAYNKHRDKPIREQAENIIHLFTLTNLGAPAAFKYFDTTIDRKRYTSTKEVLDATLIHQSITGLYETRIDLSQLGGDGGGGGGGGVLNLEEEYRLHEKPVPSSIDPSWLQLFPTVWAERAGMGLANQVPPVVVELRSGASPVAVRQYPMSKEAREGIRPHIQKFLDLGVLVPCRSPWNTPLLPVKKPGTNDYRPVQDLREINKRVQDIHPTVPNPYNLLSSLPPSYTWYSVLDLKDAFFCLRLHPNSQPLFAFEWKDPEKGNTGQLTWTRLPQGFKNSPTLFNEALHRDLAPFRALNPQVVLLQYVDDLLVAAPTYEDCKKGTQKLLQELSKLGYRVSAKKAQLCQREVTYLGYLLKEGKRWLTPARKATVMKIPVPTTPRQVREFLGKAGFCRLFIPGFASLAAPLYPLTKPSIPFIWTEEHQQAFDHIKKALLSAPALALPDLTKPFTLYIDERAGVARGVLTQTLGPWRRPVAYLSKKLDPVASGWPTCLKAVAAVALLLKDADKLTLGQNVTVIASHSLESIVRQPPDRWMTNARMTHYQSLLLNERVSFAPPAVLNPATLLPVESEATPVHRCSEILAEETGTRRDLEDQPLPGVPTWYTDGSSFITEGKRRAGAPIVDGKRTVWASSLPEGTSAQKAELVALTQALRLAEGKNINIYTDSRYAFATAHIHGAIYKQRGWLTSAGKDIKNKEEILALLEAIHLPRRVAIIHCPGHQRGSNPVATGNRRADEAAKQAALSTRVLAGTTKPAGKRTADGSEFEKRTADGSEFESPKKKAKVE

SEQ ID NO: 6247 - protein, 2211 aa, synthetic construct
MPAAKRVKLDGGDKKYSIGLDIGTNSVGWAVITDEYKVPSKKFKVLGNTDRHSIKKNLIGALLFDSGETAEATRLKRTARRRYTRRKNRICYLQEIFSNEMAKVDDSFFHRLEESFLVEEDKKHERHPIFGNIVDEVAYHEKYPTIYHLRKKLVDSTDKADLRLIYLALAHMIKFRGHFLIEGDLNPDNSDVDKLFIQLVQTYNQLFEENPINASGVDAKAILSARLSKSRRLENLIAQLPGEKKNGLFGNLIALSLGLTPNFKSNFDLAEDAKLQLSKDTYDDDLDNLLAQIGDQYADLFLAAKNLSDAILLSDILRVNTEITKAPLSASMIKRYDEHHQDLTLLKALVRQQLPEKYKEIFFDQSKNGYAGYIDGGASQEEFYKFIKPILEKMDGTEELLVKLNREDLLRKQRTFDNGSIPHQIHLGELHAILRRQEDFYPFLKDNREKIEKILTFRIPYYVGPLARGNSRFAWMTRKSEETITPWNFEEVVDKGASAQSFIERMTNFDKNLPNEKVLPKHSLLYEYFTVYNELTKVKYVTEGMRKPAFLSGEQKKAIVDLLFKTNRKVTVKQLKEDYFKKIECFDSVEISGVEDRFNASLGTYHDLLKIIKDKDFLDNEENEDILEDIVLTLTLFEDREMIEERLKTYAHLFDDKVMKQLKRRRYTGWGRLSRKLINGIRDKQSGKTILDFLKSDGFANRNFMQLIHDDSLTFKEDIQKAQVSGQGDSLHEHIANLAGSPAIKKGILQTVKVVDELVKVMGRHKPENIVIEMARENQTTQKGQKNSRERMKRIEEGIKELGSQILKEHPVENTQLQNEKLYLYYLQNGRDMYVDQELDINRLSDYDVDHIVPQSFLKDDSIDNKVLTRSDKARGKSDNVPSEEVVKKMKNYWRQLLNAKLITQRKFDNLTKAERGGLSELDKAGFIKRQLVETRQITKHVAQILDSRMNTKYDENDKLIREVKVITLKSKLVSDFRKDFQFYKVREINNYHHAHDAYLNAVVGTALIKKYPKLESEFVYGDYKVYDVRKMIAKSEQEIGKATAKYFFYSNIMNFFKTEITLANGEIRKRPLIETNGETGEIVWDKGRDFATVRKVLSMPQVNIVKKTEVQTGGFSKESILPKRNSDKLIARKKDWDPKKYGGFDSPTVAYSVLVVAKVEKGKSKKLKSVKELLGITIMERSSFEKNPIDFLEAKGYKEVKKDLIIKLPKYSLFELENGRKRMLASAGELQKGNELALPSKYVNFLYLASHYEKLKGSPEDNEQKQLFVEQHKHYLDEIIEQISEFSKRVILADANLDKVLSAYNKHRDKPIREQAENIIHLFTLTNLGAPAAFKYFDTTIDRKRYTSTKEVLDATLIHQSITGLYETRIDLSQLGGDGGGGGGGGTLGDQGSRGSDPLPEPRVTLTVEGIPTEFLVNTGAEHSVLTKPMGKMGSKRTVVAGATGSKVYPWTTKRLLKIGQKQVTHSFLVIPECPAPLLGRDLLTKLKAQIQFSTEGPQVTWEDRPAMCLVLNLEEEYRLHEKPVPPSIDPSWLQLFPMVWAEKAGMGLANQVPPVVVELKSDASPVAVRQYPMSKEAREGIRPHIQRFLDLGILVPCQSPWNTPLLPVKKPGTNDYRPVQDLREVNKRVQDIHPTVPNPYNLLSSLPPSHTWYSVLDLKDAFFCLKLHPNSQPLFAFEWRDPEKGNTGQLTWTRLPQGFKNSPTLFNEALHRDLASFRALNPQVVMLQYVDDLLVAAPTYRDCKEGTRRLLQELSKLGYRVSAKKAQLCREEVTYLGYLLKGGKRWLTPARKATVMKIPTPTTPRQVREFLGTAGFCRLWIPGFASLAAPLYPLTRPKVPFTWTEAHQEAFGRIKEALLSAPALALPDLTKPFALYVDEKEGVARGVLTQTLGPWRRPVAYLSKKLDPVASGWPTCLKAIAAVALLLKDADKLTLGQNVLVIAPHNLESIVRQPPDRWMTNARMTHYQSLLLNERVSFAPPAILNPATLLPVESDDTPIHICSEILAEETGTRPDLRDQPLPGVPAWYTDGSSFIMDGRRQAGAAIVDNKRTVWASNLPEGTSAQKAELIALTQALRLAEGKSINIYTDSRYAFATAHVHGAIYKQRGWLTSAGKDIKNKEEILALLEAIHLPKRVAIIHCPGHQRGTDPVATGNRKADEAAKQAAQSTRILTETTKNAGKRTADGSEFEKRTADGSEFESPKKKAKVE

SEQ ID NO: 6248 - protein, 2089 aa, synthetic construct
MPAAKRVKLDGGDKKYSIGLDIGTNSVGWAVITDEYKVPSKKFKVLGNTDRHSIKKNLIGALLFDSGETAEATRLKRTARRRYTRRKNRICYLQEIFSNEMAKVDDSFFHRLEESFLVEEDKKHERHPIFGNIVDEVAYHEKYPTIYHLRKKLVDSTDKADLRLIYLALAHMIKFRGHFLIEGDLNPDNSDVDKLFIQLVQTYNQLFEENPINASGVDAKAILSARLSKSRRLENLIAQLPGEKKNGLFGNLIALSLGLTPNFKSNFDLAEDAKLQLSKDTYDDDLDNLLAQIGDQYADLFLAAKNLSDAILLSDILRVNTEITKAPLSASMIKRYDEHHQDLTLLKALVRQQLPEKYKEIFFDQSKNGYAGYIDGGASQEEFYKFIKPILEKMDGTEELLVKLNREDLLRKQRTFDNGSIPHQIHLGELHAILRRQEDFYPFLKDNREKIEKILTFRIPYYVGPLARGNSRFAWMTRKSEETITPWNFEEVVDKGASAQSFIERMTNFDKNLPNEKVLPKHSLLYEYFTVYNELTKVKYVTEGMRKPAFLSGEQKKAIVDLLFKTNRKVTVKQLKEDYFKKIECFDSVEISGVEDRFNASLGTYHDLLKIIKDKDFLDNEENEDILEDIVLTLTLFEDREMIEERLKTYAHLFDDKVMKQLKRRRYTGWGRLSRKLINGIRDKQSGKTILDFLKSDGFANRNFMQLIHDDSLTFKEDIQKAQVSGQGDSLHEHIANLAGSPAIKKGILQTVKVVDELVKVMGRHKPENIVIEMARENQTTQKGQKNSRERMKRIEEGIKELGSQILKEHPVENTQLQNEKLYLYYLQNGRDMYVDQELDINRLSDYDVDHIVPQSFLKDDSIDNKVLTRSDKARGKSDNVPSEEVVKKMKNYWRQLLNAKLITQRKFDNLTKAERGGLSELDKAGFIKRQLVETRQITKHVAQILDSRMNTKYDENDKLIREVKVITLKSKLVSDFRKDFQFYKVREINNYHHAHDAYLNAVVGTALIKKYPKLESEFVYGDYKVYDVRKMIAKSEQEIGKATAKYFFYSNIMNFFKTEITLANGEIRKRPLIETNGETGEIVWDKGRDFATVRKVLSMPQVNIVKKTEVQTGGFSKESILPKRNSDKLIARKKDWDPKKYGGFDSPTVAYSVLVVAKVEKGKSKKLKSVKELLGITIMERSSFEKNPIDFLEAKGYKEVKKDLIIKLPKYSLFELENGRKRMLASAGELQKGNELALPSKYVNFLYLASHYEKLKGSPEDNEQKQLFVEQHKHYLDEIIEQISEFSKRVILADANLDKVLSAYNKHRDKPIREQAENIIHLFTLTNLGAPAAFKYFDTTIDRKRYTSTKEVLDATLIHQSITGLYETRIDLSQLGGDGGGGGGGGTLNLEDEYRLYETSAEPEVSPGSTWLSDFPQAWAETGGMGLAVRQAPLIIPLKATSTPVSIKQYPMSQEAKLGIKPHIQRLLDQGILVPCQSPWNTPLLPVKKPGTNDYRPVQDLREVNKRVEDIHPTVPNPYNLLSGLPPSHRWYTVLDLKDAFFCLRLHPTSQPLFAFEWRDPGMGISGQLTWTRLPQGFKNSPTLFNEALHRDLADFRIQHPDLILLQYVDDILLAATSELDCQQGTRALLLTLGNLGYRASAKKAQLCQKQVKYLGYLLKEGQRWLTEARKETVMGQPTPKTPRQLREFLGKAGFCRLFIPGFAEMAAPLYPLTKPGTLFNWGPDQQKAYQEIKQALLTAPALGLPDLTKPFELFVDEKQGYAKGVLTQKLGPWRRPVAYLSKKLDPVAAGWPPCLRMVAAIAVLRKDAGKLTMGQPLVILAPHAVEALVKQPPDRWLSNARMTHYQAMLLDTDRVQFGPVVALNPATLLPLPEEGAPHDCLEILAETHGTRPDLTDQPIPDADHTWYTDGSSFLQEGQRKAGAAVTTETEVIWARALPAGTSAQRAELIALTQALKMAEGKRLNVYTDSRYAFATAHIHGEIYRRRGWLTSEGREIKNKSEILALLKALFLPKRLSIIHCLGHQKGDSAEARGNRLADQAAREAAIKTPPDTSTLLAGKRTADGSEFEKRTADGSEFESPKKKAKVE

SEQ ID NO: 6249 - protein, 2089 aa, synthetic construct
MPAAKRVKLDGGDKKYSIGLDIGTNSVGWAVITDEYKVPSKKFKVLGNTDRHSIKKNLIGALLFDSGETAEATRLKRTARRRYTRRKNRICYLQEIFSNEMAKVDDSFFHRLEESFLVEEDKKHERHPIFGNIVDEVAYHEKYPTIYHLRKKLVDSTDKADLRLIYLALAHMIKFRGHFLIEGDLNPDNSDVDKLFIQLVQTYNQLFEENPINASGVDAKAILSARLSKSRRLENLIAQLPGEKKNGLFGNLIALSLGLTPNFKSNFDLAEDAKLQLSKDTYDDDLDNLLAQIGDQYADLFLAAKNLSDAILLSDILRVNTEITKAPLSASMIKRYDEHHQDLTLLKALVRQQLPEKYKEIFFDQSKNGYAGYIDGGASQEEFYKFIKPILEKMDGTEELLVKLNREDLLRKQRTFDNGSIPHQIHLGELHAILRRQEDFYPFLKDNREKIEKILTFRIPYYVGPLARGNSRFAWMTRKSEETITPWNFEEVVDKGASAQSFIERMTNFDKNLPNEKVLPKHSLLYEYFTVYNELTKVKYVTEGMRKPAFLSGEQKKAIVDLLFKTNRKVTVKQLKEDYFKKIECFDSVEISGVEDRFNASLGTYHDLLKIIKDKDFLDNEENEDILEDIVLTLTLFEDREMIEERLKTYAHLFDDKVMKQLKRRRYTGWGRLSRKLINGIRDKQSGKTILDFLKSDGFANRNFMQLIHDDSLTFKEDIQKAQVSGQGDSLHEHIANLAGSPAIKKGILQTVKVVDELVKVMGRHKPENIVIEMARENQTTQKGQKNSRERMKRIEEGIKELGSQILKEHPVENTQLQNEKLYLYYLQNGRDMYVDQELDINRLSDYDVDHIVPQSFLKDDSIDNKVLTRSDKARGKSDNVPSEEVVKKMKNYWRQLLNAKLITQRKFDNLTKAERGGLSELDKAGFIKRQLVETRQITKHVAQILDSRMNTKYDENDKLIREVKVITLKSKLVSDFRKDFQFYKVREINNYHHAHDAYLNAVVGTALIKKYPKLESEFVYGDYKVYDVRKMIAKSEQEIGKATAKYFFYSNIMNFFKTEITLANGEIRKRPLIETNGETGEIVWDKGRDFATVRKVLSMPQVNIVKKTEVQTGGFSKESILPKRNSDKLIARKKDWDPKKYGGFDSPTVAYSVLVVAKVEKGKSKKLKSVKELLGITIMERSSFEKNPIDFLEAKGYKEVKKDLIIKLPKYSLFELENGRKRMLASAGELQKGNELALPSKYVNFLYLASHYEKLKGSPEDNEQKQLFVEQHKHYLDEIIEQISEFSKRVILADANLDKVLSAYNKHRDKPIREQAENIIHLFTLTNLGAPAAFKYFDTTIDRKRYTSTKEVLDATLIHQSITGLYETRIDLSQLGGDGGGGGGGGLGIEDEYRLHETSTEPDVSLGSTWLSDFPQAWAETGGMGLAVRQAPLIIPLKATSTPVSIQQYPMSHEARLGIKPHIQRLLDQGILVPCQSPWNTPLLPVKKPGTNDYRPVQDLREVNKRVEDIHPTVPNPYNLLSGLPPSHQWYTVLDLKDAFFCLRLHPTSQPLFAFEWRDPGMGISGQLTWTRLPQGFKNSPTLFNEALHRDLADFRIQHPDLILLQYVDDILLAATSELDCQQGTRALLQTLGDLGYRASAKKAQICQKQVKYLGYLLREGQRWLTEARKETVMGQPVPKTPRQLREFLGKAGFCRLFIPGFAEMAAPLYPLTKPGTLFSWGPDQQKAYQEIKQALLTAPALGLPDLTKPFELFVDEKQGYAKGVLTQKLGPWRRPVAYLSKKLDPVAAGWPPCLRMVAAIAVLTKDAGKLTMGQPLVILAPHAVEALVKQPPDRWLSNARMTHYQAMLLDTDRVQFGPVVALNPATLLPLPEEGAPHDCLEILAETHGTRPDLTDQPIPDADHTWYTDGSSFLQEGQRKAGAAVTTETEVIWAGALPAGTSAQRAELIALTQALKMAEGKRLNVYTDSRYAFATAHIHGEIYRRRGWLTSEGREIKNKSEILALLKALFLPKRLSIIHCLGHQKGDSAEARGNRLADQAAREAAIKTPPDTSTLLIAGKRTADGSEFEKRTADGSEFESPKKKAKVE

SEQ ID NO: 6250 - protein, 2092 aa, synthetic construct
MPAAKRVKLDGGDKKYSIGLDIGTNSVGWAVITDEYKVPSKKFKVLGNTDRHSIKKNLIGALLFDSGETAEATRLKRTARRRYTRRKNRICYLQEIFSNEMAKVDDSFFHRLEESFLVEEDKKHERHPIFGNIVDEVAYHEKYPTIYHLRKKLVDSTDKADLRLIYLALAHMIKFRGHFLIEGDLNPDNSDVDKLFIQLVQTYNQLFEENPINASGVDAKAILSARLSKSRRLENLIAQLPGEKKNGLFGNLIALSLGLTPNFKSNFDLAEDAKLQLSKDTYDDDLDNLLAQIGDQYADLFLAAKNLSDAILLSDILRVNTEITKAPLSASMIKRYDEHHQDLTLLKALVRQQLPEKYKEIFFDQSKNGYAGYIDGGASQEEFYKFIKPILEKMDGTEELLVKLNREDLLRKQRTFDNGSIPHQIHLGELHAILRRQEDFYPFLKDNREKIEKILTFRIPYYVGPLARGNSRFAWMTRKSEETITPWNFEEVVDKGASAQSFIERMTNFDKNLPNEKVLPKHSLLYEYFTVYNELTKVKYVTEGMRKPAFLSGEQKKAIVDLLFKTNRKVTVKQLKEDYFKKIECFDSVEISGVEDRFNASLGTYHDLLKIIKDKDFLDNEENEDILEDIVLTLTLFEDREMIEERLKTYAHLFDDKVMKQLKRRRYTGWGRLSRKLINGIRDKQSGKTILDFLKSDGFANRNFMQLIHDDSLTFKEDIQKAQVSGQGDSLHEHIANLAGSPAIKKGILQTVKVVDELVKVMGRHKPENIVIEMARENQTTQKGQKNSRERMKRIEEGIKELGSQILKEHPVENTQLQNEKLYLYYLQNGRDMYVDQELDINRLSDYDVDHIVPQSFLKDDSIDNKVLTRSDKARGKSDNVPSEEVVKKMKNYWRQLLNAKLITQRKFDNLTKAERGGLSELDKAGFIKRQLVETRQITKHVAQILDSRMNTKYDENDKLIREVKVITLKSKLVSDFRKDFQFYKVREINNYHHAHDAYLNAVVGTALIKKYPKLESEFVYGDYKVYDVRKMIAKSEQEIGKATAKYFFYSNIMNFFKTEITLANGEIRKRPLIETNGETGEIVWDKGRDFATVRKVLSMPQVNIVKKTEVQTGGFSKESILPKRNSDKLIARKKDWDPKKYGGFDSPTVAYSVLVVAKVEKGKSKKLKSVKELLGITIMERSSFEKNPIDFLEAKGYKEVKKDLIIKLPKYSLFELENGRKRMLASAGELQKGNELALPSKYVNFLYLASHYEKLKGSPEDNEQKQLFVEQHKHYLDEIIEQISEFSKRVILADANLDKVLSAYNKHRDKPIREQAENIIHLFTLTNLGAPAAFKYFDTTIDRKRYTSTKEVLDATLIHQSITGLYETRIDLSQLGGDGGGGGGGGGTAPLEEEYRLFLEAPIQNVTLLEQWKREIPKVWAEINPPGLASTQAPIHVQLLSTALPVRVRQYPITLEAKRSLRETIRKFRAAGILRPVHSPWNTPLLPVRKSGTSEYRMVQDLREVNKRVETIHPTVPNPYTLLSLLPPDRIWYSVLDLKDAFFCIPLAPESQLIFAFEWADAEEGESGQLTWTRLPQGFKNSPTLFNEALNRDLQGFRLDHPSVSLLQYVDDLLIAADTQAACLSATRDLLMTLAELGYRVSGKKAQLCQEEVTYLGFKIHKGSRSLSNSRTQAILQIPVPKTKRQVREFLGTIGYCRLWIPGFAELAQPLYAATRPGNDPLVWGEKEEEAFQSLKLALTQPPALALPSLDKPFQLFVEETSGAAKGVLTQALGPWKRPVAYLSKRLDPVAAGWPRCLRAIAAAALLTREASKLTFGQDIEITSSHNLESLLRSPPDKWLTNARITQYQVLLLDPPRVRFKQTAALNPATLLPETDDTLPIHHCLDTLDSLTSTRPDLTDQPLAQAEATLFTDGSSYIRDGKRYAGAAVVTLDSVIWAEPLPIGTSAQKAELIALTKALEWSKDKSVNIYTDSRYAFATLHVHGMIYRERGWLTAGGKAIKNAPEILALLTAVWLPKRVAVMHCKGHQKDDAPTSTGNRRADEVAREVAIRPLSTQATISAGKRTADGSEFEKRTADGSEFESPKKKAKVE

SEQ ID NO: 6251 - protein, 2212 aa, synthetic construct
MPAAKRVKLDGGDKKYSIGLDIGTNSVGWAVITDEYKVPSKKFKVLGNTDRHSIKKNLIGALLFDSGETAEATRLKRTARRRYTRRKNRICYLQEIFSNEMAKVDDSFFHRLEESFLVEEDKKHERHPIFGNIVDEVAYHEKYPTIYHLRKKLVDSTDKADLRLIYLALAHMIKFRGHFLIEGDLNPDNSDVDKLFIQLVQTYNQLFEENPINASGVDAKAILSARLSKSRRLENLIAQLPGEKKNGLFGNLIALSLGLTPNFKSNFDLAEDAKLQLSKDTYDDDLDNLLAQIGDQYADLFLAAKNLSDAILLSDILRVNTEITKAPLSASMIKRYDEHHQDLTLLKALVRQQLPEKYKEIFFDQSKNGYAGYIDGGASQEEFYKFIKPILEKMDGTEELLVKLNREDLLRKQRTFDNGSIPHQIHLGELHAILRRQEDFYPFLKDNREKIEKILTFRIPYYVGPLARGNSRFAWMTRKSEETITPWNFEEVVDKGASAQSFIERMTNFDKNLPNEKVLPKHSLLYEYFTVYNELTKVKYVTEGMRKPAFLSGEQKKAIVDLLFKTNRKVTVKQLKEDYFKKIECFDSVEISGVEDRFNASLGTYHDLLKIIKDKDFLDNEENEDILEDIVLTLTLFEDREMIEERLKTYAHLFDDKVMKQLKRRRYTGWGRLSRKLINGIRDKQSGKTILDFLKSDGFANRNFMQLIHDDSLTFKEDIQKAQVSGQGDSLHEHIANLAGSPAIKKGILQTVKVVDELVKVMGRHKPENIVIEMARENQTTQKGQKNSRERMKRIEEGIKELGSQILKEHPVENTQLQNEKLYLYYLQNGRDMYVDQELDINRLSDYDVDHIVPQSFLKDDSIDNKVLTRSDKARGKSDNVPSEEVVKKMKNYWRQLLNAKLITQRKFDNLTKAERGGLSELDKAGFIKRQLVETRQITKHVAQILDSRMNTKYDENDKLIREVKVITLKSKLVSDFRKDFQFYKVREINNYHHAHDAYLNAVVGTALIKKYPKLESEFVYGDYKVYDVRKMIAKSEQEIGKATAKYFFYSNIMNFFKTEITLANGEIRKRPLIETNGETGEIVWDKGRDFATVRKVLSMPQVNIVKKTEVQTGGFSKESILPKRNSDKLIARKKDWDPKKYGGFDSPTVAYSVLVVAKVEKGKSKKLKSVKELLGITIMERSSFEKNPIDFLEAKGYKEVKKDLIIKLPKYSLFELENGRKRMLASAGELQKGNELALPSKYVNFLYLASHYEKLKGSPEDNEQKQLFVEQHKHYLDEIIEQISEFSKRVILADANLDKVLSAYNKHRDKPIREQAENIIHLFTLTNLGAPAAFKYFDTTIDRKRYTSTKEVLDATLIHQSITGLYETRIDLSQLGGDGGGGGGGGGTLGDQGSRGSDPLPEPRVTLTVEGIPTEFLVNTGAEHSVLTKPMGKMGSKRTVVAGATGSKVYPWTTKRLLKIGQKQVTHSFLVIPECPAPLLGRDLLTKLKAQIQFSTEGPQVTWEDRPAMCLVLNLEEEYRLHEKPVPPSIDPSWLQLFPMVWAEKAGMGLANQVPPVVVELKSDASPVAVRQYPMSKEAREGIRPHIQRFLDLGILVPCQSPWNTPLLPVKKPGTNDYRPVQDLREVNKRVQDIHPTVPNPYNLLSSLPPSHTWYSVLDLKDAFFCLKLHPNSQPLFAFEWRDPEKGNTGQLTWTRLPQGFKNSPTLFNEALHRDLASFRALNPQVVMLQYVDDLLVAAPTYRDCKEGTRRLLQELSKLGYRVSAKKAQLCREEVTYLGYLLKGGKRWLTPARKATVMKIPTPTTPRQVREFLGTAGFCRLWIPGFASLAAPLYPLTRPKVPFTWTEAHQEAFGRIKEALLSAPALALPDLTKPFALYVDEKEGVARGVLTQTLGPWRRPVAYLSKKLDPVASGWPTCLKAIAAVALLLKDADKLTLGQNVLVIAPHNLESIVRQPPDRWMTNARMTHYQSLLLNERVSFAPPAILNPATLLPVESDDTPIHICSEILAEETGTRPDLRDQPLPGVPAWYTDGSSFIMDGRRQAGAAIVDNKRTVWASNLPEGTSAQKAELIALTQALRLAEGKSINIYTDSRYAFATAHVHGAIYKQRGWLTSAGKDIKNKEEILALLEAIHLPKRVAIIHCPGHQRGTDPVATGNRKADEAAKQAAQSTRILTETTKNAGKRTADGSEFEKRTADGSEFESPKKKAKVE

SEQ ID NO: 6252 - protein, 2088 aa, synthetic construct
MPAAKRVKLDGGDKKYSIGLDIGTNSVGWAVITDEYKVPSKKFKVLGNTDRHSIKKNLIGALLFDSGETAEATRLKRTARRRYTRRKNRICYLQEIFSNEMAKVDDSFFHRLEESFLVEEDKKHERHPIFGNIVDEVAYHEKYPTIYHLRKKLVDSTDKADLRLIYLALAHMIKFRGHFLIEGDLNPDNSDVDKLFIQLVQTYNQLFEENPINASGVDAKAILSARLSKSRRLENLIAQLPGEKKNGLFGNLIALSLGLTPNFKSNFDLAEDAKLQLSKDTYDDDLDNLLAQIGDQYADLFLAAKNLSDAILLSDILRVNTEITKAPLSASMIKRYDEHHQDLTLLKALVRQQLPEKYKEIFFDQSKNGYAGYIDGGASQEEFYKFIKPILEKMDGTEELLVKLNREDLLRKQRTFDNGSIPHQIHLGELHAILRRQEDFYPFLKDNREKIEKILTFRIPYYVGPLARGNSRFAWMTRKSEETITPWNFEEVVDKGASAQSFIERMTNFDKNLPNEKVLPKHSLLYEYFTVYNELTKVKYVTEGMRKPAFLSGEQKKAIVDLLFKTNRKVTVKQLKEDYFKKIECFDSVEISGVEDRFNASLGTYHDLLKIIKDKDFLDNEENEDILEDIVLTLTLFEDREMIEERLKTYAHLFDDKVMKQLKRRRYTGWGRLSRKLINGIRDKQSGKTILDFLKSDGFANRNFMQLIHDDSLTFKEDIQKAQVSGQGDSLHEHIANLAGSPAIKKGILQTVKVVDELVKVMGRHKPENIVIEMARENQTTQKGQKNSRERMKRIEEGIKELGSQILKEHPVENTQLQNEKLYLYYLQNGRDMYVDQELDINRLSDYDVDHIVPQSFLKDDSIDNKVLTRSDKARGKSDNVPSEEVVKKMKNYWRQLLNAKLITQRKFDNLTKAERGGLSELDKAGFIKRQLVETRQITKHVAQILDSRMNTKYDENDKLIREVKVITLKSKLVSDFRKDFQFYKVREINNYHHAHDAYLNAVVGTALIKKYPKLESEFVYGDYKVYDVRKMIAKSEQEIGKATAKYFFYSNIMNFFKTEITLANGEIRKRPLIETNGETGEIVWDKGRDFATVRKVLSMPQVNIVKKTEVQTGGFSKESILPKRNSDKLIARKKDWDPKKYGGFDSPTVAYSVLVVAKVEKGKSKKLKSVKELLGITIMERSSFEKNPIDFLEAKGYKEVKKDLIIKLPKYSLFELENGRKRMLASAGELQKGNELALPSKYVNFLYLASHYEKLKGSPEDNEQKQLFVEQHKHYLDEIIEQISEFSKRVILADANLDKVLSAYNKHRDKPIREQAENIIHLFTLTNLGAPAAFKYFDTTIDRKRYTSTKEVLDATLIHQSITGLYETRIDLSQLGGDGGGGGGGGGVLNLEEEYRLHEKPVPSSIDPSWLQLFPTVWAERAGMGLANQVPPVVVELRSGASPVAVRQYPMSKEAREGIRPHIQRFLDLGVLVPCQSPWNTPLLPVKKPGTNDYRPVQDLREINKRVQDIHPTVPNPYNLLSSLPPSHTWYSVLDLKDAFFCLKLHPNSQPLFAFEWRDPEKGNTGQLTWTRLPQGFKNSPTLFDEALHRDLAPFRALNPQVVLLQYVDDLLVAAPTYRDCKEGTQKLLQELSKLGYRVSAKKAQLCQKEVTYLGYLLKEGKRWLTPARKATVMKIPPPTTPRQVREFLGTAGFCRLWIPGFASLAAPLYPLTKESIPFIWTEEHQKAFDRIKEALLSAPALALPDLTKPFTLYVDERAGVARGVLTQTLGPWRRPVAYLSKKLDPVASGWPTCLKAVAAVALLLKDADKLTLGQNVTVIASHSLESIVRQPPDRWMTNARMTHYQSLLLNERVSFAPPAVLNPATLLPVESEATPVHRCSEILAEETGTRRDLKDQPLPGVPAWYTDGSSFIAEGKRRAGAAIVDGKRTVWASSLPEGTSAQKAELVALTQALRLAEGKDINIYTDSRYAFATAHIHGAIYKQRGLLTSAGKDIKNKEEILALLEAIHLPKRVAIIHCPGHQKGNDPVATGNRRADEAAKQAALSTRVLAETTKPAGKRTADGSEFEKRTADGSEFESPKKKAKVE

SEQ ID NO: 6253 - protein, 2090 aa, synthetic construct
MPAAKRVKLDGGDKKYSIGLDIGTNSVGWAVITDEYKVPSKKFKVLGNTDRHSIKKNLIGALLFDSGETAEATRLKRTARRRYTRRKNRICYLQEIFSNEMAKVDDSFFHRLEESFLVEEDKKHERHPIFGNIVDEVAYHEKYPTIYHLRKKLVDSTDKADLRLIYLALAHMIKFRGHFLIEGDLNPDNSDVDKLFIQLVQTYNQLFEENPINASGVDAKAILSARLSKSRRLENLIAQLPGEKKNGLFGNLIALSLGLTPNFKSNFDLAEDAKLQLSKDTYDDDLDNLLAQIGDQYADLFLAAKNLSDAILLSDILRVNTEITKAPLSASMIKRYDEHHQDLTLLKALVRQQLPEKYKEIFFDQSKNGYAGYIDGGASQEEFYKFIKPILEKMDGTEELLVKLNREDLLRKQRTFDNGSIPHQIHLGELHAILRRQEDFYPFLKDNREKIEKILTFRIPYYVGPLARGNSRFAWMTRKSEETITPWNFEEVVDKGASAQSFIERMTNFDKNLPNEKVLPKHSLLYEYFTVYNELTKVKYVTEGMRKPAFLSGEQKKAIVDLLFKTNRKVTVKQLKEDYFKKIECFDSVEISGVEDRFNASLGTYHDLLKIIKDKDFLDNEENEDILEDIVLTLTLFEDREMIEERLKTYAHLFDDKVMKQLKRRRYTGWGRLSRKLINGIRDKQSGKTILDFLKSDGFANRNFMQLIHDDSLTFKEDIQKAQVSGQGDSLHEHIANLAGSPAIKKGILQTVKVVDELVKVMGRHKPENIVIEMARENQTTQKGQKNSRERMKRIEEGIKELGSQILKEHPVENTQLQNEKLYLYYLQNGRDMYVDQELDINRLSDYDVDHIVPQSFLKDDSIDNKVLTRSDKARGKSDNVPSEEVVKKMKNYWRQLLNAKLITQRKFDNLTKAERGGLSELDKAGFIKRQLVETRQITKHVAQILDSRMNTKYDENDKLIREVKVITLKSKLVSDFRKDFQFYKVREINNYHHAHDAYLNAVVGTALIKKYPKLESEFVYGDYKVYDVRKMIAKSEQEIGKATAKYFFYSNIMNFFKTEITLANGEIRKRPLIETNGETGEIVWDKGRDFATVRKVLSMPQVNIVKKTEVQTGGFSKESILPKRNSDKLIARKKDWDPKKYGGFDSPTVAYSVLVVAKVEKGKSKKLKSVKELLGITIMERSSFEKNPIDFLEAKGYKEVKKDLIIKLPKYSLFELENGRKRMLASAGELQKGNELALPSKYVNFLYLASHYEKLKGSPEDNEQKQLFVEQHKHYLDEIIEQISEFSKRVILADANLDKVLSAYNKHRDKPIREQAENIIHLFTLTNLGAPAAFKYFDTTIDRKRYTSTKEVLDATLIHQSITGLYETRIDLSQLGGDGGGGGGGGGTLNIEDEYRLHETSKEPDVPLGSTWLSDFPQAWAETGGMGLAVRQAPLIIPLKATSTPVSIKQYPMSQEARLGIKPHIQRLLDQGILVPCQSPWNTPLLPVKKPGTNDYRPVQDLREVNKRVEDIHPTVPNPYNLLSGLPPSHQWYTVLDLKDAFFCLRLHPTSQPLFAFEWRDPEMGISGQLTWTRLPQGFKNSPTLFNEALHRDLADFRIQHPDLILLQYVDDLLLAATSEQDCQRGTRALLQTLGNLGYRASAKKAQICQKQVKYLGYLLKEGQRWLTEARKETVMGQPTPKTPRQLREFLGKAGFCRLFIPGFAEMAAPLYPLTKPGTLFNWGPDQQKAYQEIKQALLTAPALGLPDLTKPFELFVDEKQGYAKGVLTQKLGPWRRPVAYLSKKLDPVAAGWPPCLRMVAAIAVLTKDAGKLTMGQPLVILAPHAVEALVKQPPDRWLSNARMTHYQAMLLDTDRVQFGPVVALNPATLLPLPEKEAPHDCLEILAETHGTRPDLTDQPIPDADYTWYTDGSSFLQEGQRRAGAAVTTETEVIWARALPAGTSAQRAELIALTQALKMAEGKKLNVYTDSRYAFATAHVHGEIYRRRGWLTSEGREIKNKNEILALLKALFLPKRLSIIHCPGHQKGNSAEARGNRMADQAAREAAMKAVLETSTLLAGKRTADGSEFEKRTADGSEFESPKKKAKVE

SEQ ID NO: 6254 - protein, 2093 aa, synthetic construct
MPAAKRVKLDGGDKKYSIGLDIGTNSVGWAVITDEYKVPSKKFKVLGNTDRHSIKKNLIGALLFDSGETAEATRLKRTARRRYTRRKNRICYLQEIFSNEMAKVDDSFFHRLEESFLVEEDKKHERHPIFGNIVDEVAYHEKYPTIYHLRKKLVDSTDKADLRLIYLALAHMIKFRGHFLIEGDLNPDNSDVDKLFIQLVQTYNQLFEENPINASGVDAKAILSARLSKSRRLENLIAQLPGEKKNGLFGNLIALSLGLTPNFKSNFDLAEDAKLQLSKDTYDDDLDNLLAQIGDQYADLFLAAKNLSDAILLSDILRVNTEITKAPLSASMIKRYDEHHQDLTLLKALVRQQLPEKYKEIFFDQSKNGYAGYIDGGASQEEFYKFIKPILEKMDGTEELLVKLNREDLLRKQRTFDNGSIPHQIHLGELHAILRRQEDFYPFLKDNREKIEKILTFRIPYYVGPLARGNSRFAWMTRKSEETITPWNFEEVVDKGASAQSFIERMTNFDKNLPNEKVLPKHSLLYEYFTVYNELTKVKYVTEGMRKPAFLSGEQKKAIVDLLFKTNRKVTVKQLKEDYFKKIECFDSVEISGVEDRFNASLGTYHDLLKIIKDKDFLDNEENEDILEDIVLTLTLFEDREMIEERLKTYAHLFDDKVMKQLKRRRYTGWGRLSRKLINGIRDKQSGKTILDFLKSDGFANRNFMQLIHDDSLTFKEDIQKAQVSGQGDSLHEHIANLAGSPAIKKGILQTVKVVDELVKVMGRHKPENIVIEMARENQTTQKGQKNSRERMKRIEEGIKELGSQILKEHPVENTQLQNEKLYLYYLQNGRDMYVDQELDINRLSDYDVDHIVPQSFLKDDSIDNKVLTRSDKARGKSDNVPSEEVVKKMKNYWRQLLNAKLITQRKFDNLTKAERGGLSELDKAGFIKRQLVETRQITKHVAQILDSRMNTKYDENDKLIREVKVITLKSKLVSDFRKDFQFYKVREINNYHHAHDAYLNAVVGTALIKKYPKLESEFVYGDYKVYDVRKMIAKSEQEIGKATAKYFFYSNIMNFFKTEITLANGEIRKRPLIETNGETGEIVWDKGRDFATVRKVLSMPQVNIVKKTEVQTGGFSKESILPKRNSDKLIARKKDWDPKKYGGFDSPTVAYSVLVVAKVEKGKSKKLKSVKELLGITIMERSSFEKNPIDFLEAKGYKEVKKDLIIKLPKYSLFELENGRKRMLASAGELQKGNELALPSKYVNFLYLASHYEKLKGSPEDNEQKQLFVEQHKHYLDEIIEQISEFSKRVILADANLDKVLSAYNKHRDKPIREQAENIIHLFTLTNLGAPAAFKYFDTTIDRKRYTSTKEVLDATLIHQSITGLYETRIDLSQLGGDGGGGGGGGGGTAPLEEEYRLFLEAPIQNVTLLEQWKREIPKVWAEINPPGLASTQAPIHVQLLSTALPVRVRQYPITLEAKRSLRETIRKFRAAGILRPVHSPWNTPLLPVRKSGTSEYRMVQDLREVNKRVETIHPTVPNPYTLLSLLPPDRIWYSVLDLKDAFFCIPLAPESQLIFAFEWADAEEGESGQLTWTRLPQGFKNSPTLFDEALNRDLQGFRLDHPSVSLLQYVDDLLIAADTQAACLSATRDLLMTLAELGYRVSGKKAQLCQEEVTYLGFKIHKGSRSLSNSRTQAILQIPVPKTKRQVREFLGTIGYCRLWIPGFAELAQPLYAATRGGNDPLVWGEKEEEAFQSLKLALTQPPALALPSLDKPFQLFVEETSGAAKGVLTQALGPWKRPVAYLSKRLDPVAAGWPRCLRAIAAAALLTREASKLTFGQDIEITSSHNLESLLRSPPDKWLTNARITQYQVLLLDPPRVRFKQTAALNPATLLPETDDTLPIHHCLDTLDSLTSTRPDLTDQPLAQAEATLFTDGSSYIRDGKRYAGAAVVTLDSVIWAEPLPIGTSAQKAELIALTKALEWSKDKSVNIYTDSRYAFATLHVHGMIYRERGLLTAGGKAIKNAPEILALLTAVWLPKRVAVMHCKGHQKDDAPTSTGNRRADEVAREVAIRPLSTQATISAGKRTADGSEFEKRTADGSEFESPKKKAKVE

SEQ ID NO: 6255 - protein, 1996 aa, synthetic construct
MPAAKRVKLDGGDKKYSIGLDIGTNSVGWAVITDEYKVPSKKFKVLGNTDRHSIKKNLIGALLFDSGETAEATRLKRTARRRYTRRKNRICYLQEIFSNEMAKVDDSFFHRLEESFLVEEDKKHERHPIFGNIVDEVAYHEKYPTIYHLRKKLVDSTDKADLRLIYLALAHMIKFRGHFLIEGDLNPDNSDVDKLFIQLVQTYNQLFEENPINASGVDAKAILSARLSKSRRLENLIAQLPGEKKNGLFGNLIALSLGLTPNFKSNFDLAEDAKLQLSKDTYDDDLDNLLAQIGDQYADLFLAAKNLSDAILLSDILRVNTEITKAPLSASMIKRYDEHHQDLTLLKALVRQQLPEKYKEIFFDQSKNGYAGYIDGGASQEEFYKFIKPILEKMDGTEELLVKLNREDLLRKQRTFDNGSIPHQIHLGELHAILRRQEDFYPFLKDNREKIEKILTFRIPYYVGPLARGNSRFAWMTRKSEETITPWNFEEVVDKGASAQSFIERMTNFDKNLPNEKVLPKHSLLYEYFTVYNELTKVKYVTEGMRKPAFLSGEQKKAIVDLLFKTNRKVTVKQLKEDYFKKIECFDSVEISGVEDRFNASLGTYHDLLKIIKDKDFLDNEENEDILEDIVLTLTLFEDREMIEERLKTYAHLFDDKVMKQLKRRRYTGWGRLSRKLINGIRDKQSGKTILDFLKSDGFANRNFMQLIHDDSLTFKEDIQKAQVSGQGDSLHEHIANLAGSPAIKKGILQTVKVVDELVKVMGRHKPENIVIEMARENQTTQKGQKNSRERMKRIEEGIKELGSQILKEHPVENTQLQNEKLYLYYLQNGRDMYVDQELDINRLSDYDVDHIVPQSFLKDDSIDNKVLTRSDKARGKSDNVPSEEVVKKMKNYWRQLLNAKLITQRKFDNLTKAERGGLSELDKAGFIKRQLVETRQITKHVAQILDSRMNTKYDENDKLIREVKVITLKSKLVSDFRKDFQFYKVREINNYHHAHDAYLNAVVGTALIKKYPKLESEFVYGDYKVYDVRKMIAKSEQEIGKATAKYFFYSNIMNFFKTEITLANGEIRKRPLIETNGETGEIVWDKGRDFATVRKVLSMPQVNIVKKTEVQTGGFSKESILPKRNSDKLIARKKDWDPKKYGGFDSPTVAYSVLVVAKVEKGKSKKLKSVKELLGITIMERSSFEKNPIDFLEAKGYKEVKKDLIIKLPKYSLFELENGRKRMLASAGELQKGNELALPSKYVNFLYLASHYEKLKGSPEDNEQKQLFVEQHKHYLDEIIEQISEFSKRVILADANLDKVLSAYNKHRDKPIREQAENIIHLFTLTNLGAPAAFKYFDTTIDRKRYTSTKEVLDATLIHQSITGLYETRIDLSQLGGDGGGGGGGGGGGVLDTPPSHIGLEHLPPPPEVPQFPLNLERLQALQDLVHRSLEAGYISPWDGPGNNPVFPVRKPNGAWRFVHDLRATNALTKPIPALSPGPPDLTAPPTHPPHIICLDLKDAFFQIPVEDRFRFYLSFTLPSPGGLQPHRRFAWRVLPQGFINSPALFQRALQEPLRQVSAAFSQSLLVSYMDDILYASPTEEQRSQCYQALAARLRDLGFQVASEKTSQTPSPVPFLGQMVHEQIVTYQSLPTLQISSPISLHQLQAVLGDLQWVSRGTPTTRRPLQLLYSSLKRHHDPRAIIQLSPEQLQGIAELRQALSHNARSRYNEQEPLLAYVHLTRAGSTLVLFQKGAQFPLAYFQTPLTDNQASPWGLLLLLGCQYLQTQALSSYAKPILKYYHNLPKTSLDNWIQSSEDPRVQELLQLWPQISSQGIQPPGPWKTLITRAEVFLTPQFSPDPIPAALCLFSDGATGRGAYCLWKDHLLDFQAVPAPESAQKGELAGLLAGLAAAPPEPVNIWVDSKYLYSLLRTWVLGAWLQPDPVPSYALLYKSLLRHPAIVVGHVRSHSSASHPIASLNNYVDQLAGKRTADGSEFEKRTADGSEFESPKKKAKVE

SEQ ID NO: 6256 - protein, 2089 aa, synthetic construct
MPAAKRVKLDGGDKKYSIGLDIGTNSVGWAVITDEYKVPSKKFKVLGNTDRHSIKKNLIGALLFDSGETAEATRLKRTARRRYTRRKNRICYLQEIFSNEMAKVDDSFFHRLEESFLVEEDKKHERHPIFGNIVDEVAYHEKYPTIYHLRKKLVDSTDKADLRLIYLALAHMIKFRGHFLIEGDLNPDNSDVDKLFIQLVQTYNQLFEENPINASGVDAKAILSARLSKSRRLENLIAQLPGEKKNGLFGNLIALSLGLTPNFKSNFDLAEDAKLQLSKDTYDDDLDNLLAQIGDQYADLFLAAKNLSDAILLSDILRVNTEITKAPLSASMIKRYDEHHQDLTLLKALVRQQLPEKYKEIFFDQSKNGYAGYIDGGASQEEFYKFIKPILEKMDGTEELLVKLNREDLLRKQRTFDNGSIPHQIHLGELHAILRRQEDFYPFLKDNREKIEKILTFRIPYYVGPLARGNSRFAWMTRKSEETITPWNFEEVVDKGASAQSFIERMTNFDKNLPNEKVLPKHSLLYEYFTVYNELTKVKYVTEGMRKPAFLSGEQKKAIVDLLFKTNRKVTVKQLKEDYFKKIECFDSVEISGVEDRFNASLGTYHDLLKIIKDKDFLDNEENEDILEDIVLTLTLFEDREMIEERLKTYAHLFDDKVMKQLKRRRYTGWGRLSRKLINGIRDKQSGKTILDFLKSDGFANRNFMQLIHDDSLTFKEDIQKAQVSGQGDSLHEHIANLAGSPAIKKGILQTVKVVDELVKVMGRHKPENIVIEMARENQTTQKGQKNSRERMKRIEEGIKELGSQILKEHPVENTQLQNEKLYLYYLQNGRDMYVDQELDINRLSDYDVDHIVPQSFLKDDSIDNKVLTRSDKARGKSDNVPSEEVVKKMKNYWRQLLNAKLITQRKFDNLTKAERGGLSELDKAGFIKRQLVETRQITKHVAQILDSRMNTKYDENDKLIREVKVITLKSKLVSDFRKDFQFYKVREINNYHHAHDAYLNAVVGTALIKKYPKLESEFVYGDYKVYDVRKMIAKSEQEIGKATAKYFFYSNIMNFFKTEITLANGEIRKRPLIETNGETGEIVWDKGRDFATVRKVLSMPQVNIVKKTEVQTGGFSKESILPKRNSDKLIARKKDWDPKKYGGFDSPTVAYSVLVVAKVEKGKSKKLKSVKELLGITIMERSSFEKNPIDFLEAKGYKEVKKDLIIKLPKYSLFELENGRKRMLASAGELQKGNELALPSKYVNFLYLASHYEKLKGSPEDNEQKQLFVEQHKHYLDEIIEQISEFSKRVILADANLDKVLSAYNKHRDKPIREQAENIIHLFTLTNLGAPAAFKYFDTTIDRKRYTSTKEVLDATLIHQSITGLYETRIDLSQLGGDGGGGGGGGGGVLNLEEEYRLHEKPVPSSIDPSWLQLFPTVWAERAGMGLANQVPPVVVELRSGASPVAVRQYPMSKEAREGIRPHIQKFLDLGVLVPCRSPWNTPLLPVKKPGTNDYRPVQDLREINKRVQDIHPTVPNPYNLLSSLPPSYTWYSVLDLKDAFFCLRLHPNSQPLFAFEWKDPEKGNTGQLTWTRLPQGFKNSPTLFNEALHRDLAPFRALNPQVVLLQYVDDLLVAAPTYEDCKKGTQKLLQELSKLGYRVSAKKAQLCQREVTYLGYLLKEGKRWLTPARKATVMKIPVPTTPRQVREFLGKAGFCRLFIPGFASLAAPLYPLTKPSIPFIWTEEHQQAFDHIKKALLSAPALALPDLTKPFTLYIDERAGVARGVLTQTLGPWRRPVAYLSKKLDPVASGWPTCLKAVAAVALLLKDADKLTLGQNVTVIASHSLESIVRQPPDRWMTNARMTHYQSLLLNERVSFAPPAVLNPATLLPVESEATPVHRCSEILAEETGTRRDLEDQPLPGVPTWYTDGSSFITEGKRRAGAPIVDGKRTVWASSLPEGTSAQKAELVALTQALRLAEGKNINIYTDSRYAFATAHIHGAIYKQRGWLTSAGKDIKNKEEILALLEAIHLPRRVAIIHCPGHQRGSNPVATGNRRADEAAKQAALSTRVLAGTTKPAGKRTADGSEFEKRTADGSEFESPKKKAKVE

SEQ ID NO: 6257 - protein, 2213 aa, synthetic construct
MPAAKRVKLDGGDKKYSIGLDIGTNSVGWAVITDEYKVPSKKFKVLGNTDRHSIKKNLIGALLFDSGETAEATRLKRTARRRYTRRKNRICYLQEIFSNEMAKVDDSFFHRLEESFLVEEDKKHERHPIFGNIVDEVAYHEKYPTIYHLRKKLVDSTDKADLRLIYLALAHMIKFRGHFLIEGDLNPDNSDVDKLFIQLVQTYNQLFEENPINASGVDAKAILSARLSKSRRLENLIAQLPGEKKNGLFGNLIALSLGLTPNFKSNFDLAEDAKLQLSKDTYDDDLDNLLAQIGDQYADLFLAAKNLSDAILLSDILRVNTEITKAPLSASMIKRYDEHHQDLTLLKALVRQQLPEKYKEIFFDQSKNGYAGYIDGGASQEEFYKFIKPILEKMDGTEELLVKLNREDLLRKQRTFDNGSIPHQIHLGELHAILRRQEDFYPFLKDNREKIEKILTFRIPYYVGPLARGNSRFAWMTRKSEETITPWNFEEVVDKGASAQSFIERMTNFDKNLPNEKVLPKHSLLYEYFTVYNELTKVKYVTEGMRKPAFLSGEQKKAIVDLLFKTNRKVTVKQLKEDYFKKIECFDSVEISGVEDRFNASLGTYHDLLKIIKDKDFLDNEENEDILEDIVLTLTLFEDREMIEERLKTYAHLFDDKVMKQLKRRRYTGWGRLSRKLINGIRDKQSGKTILDFLKSDGFANRNFMQLIHDDSLTFKEDIQKAQVSGQGDSLHEHIANLAGSPAIKKGILQTVKVVDELVKVMGRHKPENIVIEMARENQTTQKGQKNSRERMKRIEEGIKELGSQILKEHPVENTQLQNEKLYLYYLQNGRDMYVDQELDINRLSDYDVDHIVPQSFLKDDSIDNKVLTRSDKARGKSDNVPSEEVVKKMKNYWRQLLNAKLITQRKFDNLTKAERGGLSELDKAGFIKRQLVETRQITKHVAQILDSRMNTKYDENDKLIREVKVITLKSKLVSDFRKDFQFYKVREINNYHHAHDAYLNAVVGTALIKKYPKLESEFVYGDYKVYDVRKMIAKSEQEIGKATAKYFFYSNIMNFFKTEITLANGEIRKRPLIETNGETGEIVWDKGRDFATVRKVLSMPQVNIVKKTEVQTGGFSKESILPKRNSDKLIARKKDWDPKKYGGFDSPTVAYSVLVVAKVEKGKSKKLKSVKELLGITIMERSSFEKNPIDFLEAKGYKEVKKDLIIKLPKYSLFELENGRKRMLASAGELQKGNELALPSKYVNFLYLASHYEKLKGSPEDNEQKQLFVEQHKHYLDEIIEQISEFSKRVILADANLDKVLSAYNKHRDKPIREQAENIIHLFTLTNLGAPAAFKYFDTTIDRKRYTSTKEVLDATLIHQSITGLYETRIDLSQLGGDGGGGGGGGGGTLGDQGSRGSDPLPEPRVTLTVEGIPTEFLVNTGAEHSVLTKPMGKMGSKRTVVAGATGSKVYPWTTKRLLKIGQKQVTHSFLVIPECPAPLLGRDLLTKLKAQIQFSTEGPQVTWEDRPAMCLVLNLEEEYRLHEKPVPPSIDPSWLQLFPMVWAEKAGMGLANQVPPVVVELKSDASPVAVRQYPMSKEAREGIRPHIQRFLDLGILVPCQSPWNTPLLPVKKPGTNDYRPVQDLREVNKRVQDIHPTVPNPYNLLSSLPPSHTWYSVLDLKDAFFCLKLHPNSQPLFAFEWRDPEKGNTGQLTWTRLPQGFKNSPTLFNEALHRDLASFRALNPQVVMLQYVDDLLVAAPTYRDCKEGTRRLLQELSKLGYRVSAKKAQLCREEVTYLGYLLKGGKRWLTPARKATVMKIPTPTTPRQVREFLGTAGFCRLWIPGFASLAAPLYPLTRPKVPFTWTEAHQEAFGRIKEALLSAPALALPDLTKPFALYVDEKEGVARGVLTQTLGPWRRPVAYLSKKLDPVASGWPTCLKAIAAVALLLKDADKLTLGQNVLVIAPHNLESIVRQPPDRWMTNARMTHYQSLLLNERVSFAPPAILNPATLLPVESDDTPIHICSEILAEETGTRPDLRDQPLPGVPAWYTDGSSFIMDGRRQAGAAIVDNKRTVWASNLPEGTSAQKAELIALTQALRLAEGKSINIYTDSRYAFATAHVHGAIYKQRGWLTSAGKDIKNKEEILALLEAIHLPKRVAIIHCPGHQRGTDPVATGNRKADEAAKQAAQSTRILTETTKNAGKRTADGSEFEKRTADGSEFESPKKKAKVE

SEQ ID NO: 6258 - protein, 2213 aa, synthetic construct
MPAAKRVKLDGGDKKYSIGLDIGTNSVGWAVITDEYKVPSKKFKVLGNTDRHSIKKNLIGALLFDSGETAEATRLKRTARRRYTRRKNRICYLQEIFSNEMAKVDDSFFHRLEESFLVEEDKKHERHPIFGNIVDEVAYHEKYPTIYHLRKKLVDSTDKADLRLIYLALAHMIKFRGHFLIEGDLNPDNSDVDKLFIQLVQTYNQLFEENPINASGVDAKAILSARLSKSRRLENLIAQLPGEKKNGLFGNLIALSLGLTPNFKSNFDLAEDAKLQLSKDTYDDDLDNLLAQIGDQYADLFLAAKNLSDAILLSDILRVNTEITKAPLSASMIKRYDEHHQDLTLLKALVRQQLPEKYKEIFFDQSKNGYAGYIDGGASQEEFYKFIKPILEKMDGTEELLVKLNREDLLRKQRTFDNGSIPHQIHLGELHAILRRQEDFYPFLKDNREKIEKILTFRIPYYVGPLARGNSRFAWMTRKSEETITPWNFEEVVDKGASAQSFIERMTNFDKNLPNEKVLPKHSLLYEYFTVYNELTKVKYVTEGMRKPAFLSGEQKKAIVDLLFKTNRKVTVKQLKEDYFKKIECFDSVEISGVEDRFNASLGTYHDLLKIIKDKDFLDNEENEDILEDIVLTLTLFEDREMIEERLKTYAHLFDDKVMKQLKRRRYTGWGRLSRKLINGIRDKQSGKTILDFLKSDGFANRNFMQLIHDDSLTFKEDIQKAQVSGQGDSLHEHIANLAGSPAIKKGILQTVKVVDELVKVMGRHKPENIVIEMARENQTTQKGQKNSRERMKRIEEGIKELGSQILKEHPVENTQLQNEKLYLYYLQNGRDMYVDQELDINRLSDYDVDHIVPQSFLKDDSIDNKVLTRSDKARGKSDNVPSEEVVKKMKNYWRQLLNAKLITQRKFDNLTKAERGGLSELDKAGFIKRQLVETRQITKHVAQILDSRMNTKYDENDKLIREVKVITLKSKLVSDFRKDFQFYKVREINNYHHAHDAYLNAVVGTALIKKYPKLESEFVYGDYKVYDVRKMIAKSEQEIGKATAKYFFYSNIMNFFKTEITLANGEIRKRPLIETNGETGEIVWDKGRDFATVRKVLSMPQVNIVKKTEVQTGGFSKESILPKRNSDKLIARKKDWDPKKYGGFDSPTVAYSVLVVAKVEKGKSKKLKSVKELLGITIMERSSFEKNPIDFLEAKGYKEVKKDLIIKLPKYSLFELENGRKRMLASAGELQKGNELALPSKYVNFLYLASHYEKLKGSPEDNEQKQLFVEQHKHYLDEIIEQISEFSKRVILADANLDKVLSAYNKHRDKPIREQAENIIHLFTLTNLGAPAAFKYFDTTIDRKRYTSTKEVLDATLIHQSITGLYETRIDLSQLGGDGGGGGGGGGGTLGDQGSRGSDPLPEPRVTLTVEGIPTEFLVNTGAEHSVLTKPMGKMGSKRTVVAGATGSKVYPWTTKRLLKIGQKQVTHSFLVIPECPAPLLGRDLLTKLKAQIQFSTEGPQVTWEDRPAMCLVLNLEEEYRLHEKPVPPSIDPSWLQLFPMVWAEKAGMGLANQVPPVVVELKSDASPVAVRQYPMSKEAREGIRPHIQRFLDLGILVPCQSPWNTPLLPVKKPGTNDYRPVQDLREVNKRVQDIHPTVPNPYNLLSSLPPSHTWYSVLDLKDAFFCLKLHPNSQPLFAFEWRDPEKGNTGQLTWTRLPQGFKNSPTLFNEALHRDLASFRALNPQVVMLQYVDDLLVAAPTYRDCKEGTRRLLQELSKLGYRVSAKKAQLCREEVTYLGYLLKGGKRWLTPARKATVMKIPTPTTPRQVREFLGKAGFCRLFIPGFASLAAPLYPLTRPKVPFTWTEAHQEAFGRIKEALLSAPALALPDLTKPFALYVDEKEGVARGVLTQTLGPWRRPVAYLSKKLDPVASGWPTCLKAIAAVALLLKDADKLTLGQNVLVIAPHNLESIVRQPPDRWMTNARMTHYQSLLLNERVSFAPPAILNPATLLPVESDDTPIHICSEILAEETGTRPDLRDQPLPGVPAWYTDGSSFIMDGRRQAGAAIVDNKRTVWASNLPEGTSAQKAELIALTQALRLAEGKSINIYTDSRYAFATAHVHGAIYKQRGWLTSAGKDIKNKEEILALLEAIHLPKRVAIIHCPGHQRGTDPVATGNRKADEAAKQAAQSTRILTETTKNAGKRTADGSEFEKRTADGSEFESPKKKAKVE

SEQ ID NO: 6259 - protein, 2091 aa, synthetic construct
MPAAKRVKLDGGDKKYSIGLDIGTNSVGWAVITDEYKVPSKKFKVLGNTDRHSIKKNLIGALLFDSGETAEATRLKRTARRRYTRRKNRICYLQEIFSNEMAKVDDSFFHRLEESFLVEEDKKHERHPIFGNIVDEVAYHEKYPTIYHLRKKLVDSTDKADLRLIYLALAHMIKFRGHFLIEGDLNPDNSDVDKLFIQLVQTYNQLFEENPINASGVDAKAILSARLSKSRRLENLIAQLPGEKKNGLFGNLIALSLGLTPNFKSNFDLAEDAKLQLSKDTYDDDLDNLLAQIGDQYADLFLAAKNLSDAILLSDILRVNTEITKAPLSASMIKRYDEHHQDLTLLKALVRQQLPEKYKEIFFDQSKNGYAGYIDGGASQEEFYKFIKPILEKMDGTEELLVKLNREDLLRKQRTFDNGSIPHQIHLGELHAILRRQEDFYPFLKDNREKIEKILTFRIPYYVGPLARGNSRFAWMTRKSEETITPWNFEEVVDKGASAQSFIERMTNFDKNLPNEKVLPKHSLLYEYFTVYNELTKVKYVTEGMRKPAFLSGEQKKAIVDLLFKTNRKVTVKQLKEDYFKKIECFDSVEISGVEDRFNASLGTYHDLLKIIKDKDFLDNEENEDILEDIVLTLTLFEDREMIEERLKTYAHLFDDKVMKQLKRRRYTGWGRLSRKLINGIRDKQSGKTILDFLKSDGFANRNFMQLIHDDSLTFKEDIQKAQVSGQGDSLHEHIANLAGSPAIKKGILQTVKVVDELVKVMGRHKPENIVIEMARENQTTQKGQKNSRERMKRIEEGIKELGSQILKEHPVENTQLQNEKLYLYYLQNGRDMYVDQELDINRLSDYDVDHIVPQSFLKDDSIDNKVLTRSDKARGKSDNVPSEEVVKKMKNYWRQLLNAKLITQRKFDNLTKAERGGLSELDKAGFIKRQLVETRQITKHVAQILDSRMNTKYDENDKLIREVKVITLKSKLVSDFRKDFQFYKVREINNYHHAHDAYLNAVVGTALIKKYPKLESEFVYGDYKVYDVRKMIAKSEQEIGKATAKYFFYSNIMNFFKTEITLANGEIRKRPLIETNGETGEIVWDKGRDFATVRKVLSMPQVNIVKKTEVQTGGFSKESILPKRNSDKLIARKKDWDPKKYGGFDSPTVAYSVLVVAKVEKGKSKKLKSVKELLGITIMERSSFEKNPIDFLEAKGYKEVKKDLIIKLPKYSLFELENGRKRMLASAGELQKGNELALPSKYVNFLYLASHYEKLKGSPEDNEQKQLFVEQHKHYLDEIIEQISEFSKRVILADANLDKVLSAYNKHRDKPIREQAENIIHLFTLTNLGAPAAFKYFDTTIDRKRYTSTKEVLDATLIHQSITGLYETRIDLSQLGGDGGGGGGGGGGTLNLEDEYRLYETSAEPEVSPGSTWLSDFPQAWAETGGMGLAVRQAPLIIPLKATSTPVSIKQYPMSQEAKLGIKPHIQRLLDQGILVPCQSPWNTPLLPVKKPGTNDYRPVQDLREVNKRVEDIHPTVPNPYNLLSGLPPSHRWYTVLDLKDAFFCLRLHPTSQPLFAFEWRDPGMGISGQLTWTRLPQGFKNSPTLFNEALHRDLADFRIQHPDLILLQYVDDILLAATSELDCQQGTRALLLTLGNLGYRASAKKAQLCQKQVKYLGYLLKEGQRWLTEARKETVMGQPTPKTPRQLREFLGTAGFCRLWIPGFAEMAAPLYPLTKPGTLFNWGPDQQKAYQEIKQALLTAPALGLPDLTKPFELFVDEKQGYAKGVLTQKLGPWRRPVAYLSKKLDPVAAGWPPCLRMVAAIAVLRKDAGKLTMGQPLVILAPHAVEALVKQPPDRWLSNARMTHYQAMLLDTDRVQFGPVVALNPATLLPLPEEGAPHDCLEILAETHGTRPDLTDQPIPDADHTWYTDGSSFLQEGQRKAGAAVTTETEVIWARALPAGTSAQRAELIALTQALKMAEGKRLNVYTDSRYAFATAHIHGEIYRRRGWLTSEGREIKNKSEILALLKALFLPKRLSIIHCLGHQKGDSAEARGNRLADQAAREAAIKTPPDTSTLLAGKRTADGSEFEKRTADGSEFESPKKKAKVE

SEQ ID NO: 6260 - protein, 2091 aa, synthetic construct
MPAAKRVKLDGGDKKYSIGLDIGTNSVGWAVITDEYKVPSKKFKVLGNTDRHSIKKNLIGALLFDSGETAEATRLKRTARRRYTRRKNRICYLQEIFSNEMAKVDDSFFHRLEESFLVEEDKKHERHPIFGNIVDEVAYHEKYPTIYHLRKKLVDSTDKADLRLIYLALAHMIKFRGHFLIEGDLNPDNSDVDKLFIQLVQTYNQLFEENPINASGVDAKAILSARLSKSRRLENLIAQLPGEKKNGLFGNLIALSLGLTPNFKSNFDLAEDAKLQLSKDTYDDDLDNLLAQIGDQYADLFLAAKNLSDAILLSDILRVNTEITKAPLSASMIKRYDEHHQDLTLLKALVRQQLPEKYKEIFFDQSKNGYAGYIDGGASQEEFYKFIKPILEKMDGTEELLVKLNREDLLRKQRTFDNGSIPHQIHLGELHAILRRQEDFYPFLKDNREKIEKILTFRIPYYVGPLARGNSRFAWMTRKSEETITPWNFEEVVDKGASAQSFIERMTNFDKNLPNEKVLPKHSLLYEYFTVYNELTKVKYVTEGMRKPAFLSGEQKKAIVDLLFKTNRKVTVKQLKEDYFKKIECFDSVEISGVEDRFNASLGTYHDLLKIIKDKDFLDNEENEDILEDIVLTLTLFEDREMIEERLKTYAHLFDDKVMKQLKRRRYTGWGRLSRKLINGIRDKQSGKTILDFLKSDGFANRNFMQLIHDDSLTFKEDIQKAQVSGQGDSLHEHIANLAGSPAIKKGILQTVKVVDELVKVMGRHKPENIVIEMARENQTTQKGQKNSRERMKRIEEGIKELGSQILKEHPVENTQLQNEKLYLYYLQNGRDMYVDQELDINRLSDYDVDHIVPQSFLKDDSIDNKVLTRSDKARGKSDNVPSEEVVKKMKNYWRQLLNAKLITQRKFDNLTKAERGGLSELDKAGFIKRQLVETRQITKHVAQILDSRMNTKYDENDKLIREVKVITLKSKLVSDFRKDFQFYKVREINNYHHAHDAYLNAVVGTALIKKYPKLESEFVYGDYKVYDVRKMIAKSEQEIGKATAKYFFYSNIMNFFKTEITLANGEIRKRPLIETNGETGEIVWDKGRDFATVRKVLSMPQVNIVKKTEVQTGGFSKESILPKRNSDKLIARKKDWDPKKYGGFDSPTVAYSVLVVAKVEKGKSKKLKSVKELLGITIMERSSFEKNPIDFLEAKGYKEVKKDLIIKLPKYSLFELENGRKRMLASAGELQKGNELALPSKYVNFLYLASHYEKLKGSPEDNEQKQLFVEQHKHYLDEIIEQISEFSKRVILADANLDKVLSAYNKHRDKPIREQAENIIHLFTLTNLGAPAAFKYFDTTIDRKRYTSTKEVLDATLIHQSITGLYETRIDLSQLGGDGGGGGGGGGGTLNIEDEYRLHETSKEPDVSLGSTWLSDFPQAWAETGGMGLAVRQAPLIIPLKATSTPVSIKQYPMSQEARLGIKPHIQRLLDQGILVPCQSPWNTPLLPVKKPGTNDYRPVQDLREVNKRVEDIHPTVPNPYNLLSGLPPSHQWYTVLDLKDAFFCLRLHPTSQPLFAFEWRDPEMGISGQLTWTRLPQGFKNSPTLFNEALHRDLAGFRIQHPDLILLQYVDDLLLAATSELDCQQGTRALLQTLGDLGYRASAKKAQICQKQVKYLGYLLKEGQRWLTEARKETVMGQPIPKTPRQLREFLGTAGFCRLWIPGFAEMAAPLYPLTKPGTLFNWGPDQQKAFQEIKQALLTAPALGLPDLTKPFELFVDEKQGYAKGVLTQKLGPWRRPVAYLSKKLDPVAAGWPPCLRMVAAIAVLTKDAGKLTMGQPLVILAPHAVEALVKQPPDRWLSNARMTHYQALLLDTDRVQFGPVVALNPATLLPLPEEGLQHDCLDILAEAHGTRSDLMDQPLPDADHTWYTDGSSFLQEGQRKAGAAVTTETEVIWARALPAGTSAQRAELIALTQALKMAEGKKLNVYTDSRYAFATAHIHGEIYRRRGWLTSEGKEIKNKDEILALLKALFLPKRLSIIHCPGHQKGNSAEARGNRMADQAAREVATRETPETSTLLAGKRTADGSEFEKRTADGSEFESPKKKAKVE

SEQ ID NO: 6261 - protein, 2082 aa, synthetic construct
MPAAKRVKLDGGDKKYSIGLDIGTNSVGWAVITDEYKVPSKKFKVLGNTDRHSIKKNLIGALLFDSGETAEATRLKRTARRRYTRRKNRICYLQEIFSNEMAKVDDSFFHRLEESFLVEEDKKHERHPIFGNIVDEVAYHEKYPTIYHLRKKLVDSTDKADLRLIYLALAHMIKFRGHFLIEGDLNPDNSDVDKLFIQLVQTYNQLFEENPINASGVDAKAILSARLSKSRRLENLIAQLPGEKKNGLFGNLIALSLGLTPNFKSNFDLAEDAKLQLSKDTYDDDLDNLLAQIGDQYADLFLAAKNLSDAILLSDILRVNTEITKAPLSASMIKRYDEHHQDLTLLKALVRQQLPEKYKEIFFDQSKNGYAGYIDGGASQEEFYKFIKPILEKMDGTEELLVKLNREDLLRKQRTFDNGSIPHQIHLGELHAILRRQEDFYPFLKDNREKIEKILTFRIPYYVGPLARGNSRFAWMTRKSEETITPWNFEEVVDKGASAQSFIERMTNFDKNLPNEKVLPKHSLLYEYFTVYNELTKVKYVTEGMRKPAFLSGEQKKAIVDLLFKTNRKVTVKQLKEDYFKKIECFDSVEISGVEDRFNASLGTYHDLLKIIKDKDFLDNEENEDILEDIVLTLTLFEDREMIEERLKTYAHLFDDKVMKQLKRRRYTGWGRLSRKLINGIRDKQSGKTILDFLKSDGFANRNFMQLIHDDSLTFKEDIQKAQVSGQGDSLHEHIANLAGSPAIKKGILQTVKVVDELVKVMGRHKPENIVIEMARENQTTQKGQKNSRERMKRIEEGIKELGSQILKEHPVENTQLQNEKLYLYYLQNGRDMYVDQELDINRLSDYDVDHIVPQSFLKDDSIDNKVLTRSDKARGKSDNVPSEEVVKKMKNYWRQLLNAKLITQRKFDNLTKAERGGLSELDKAGFIKRQLVETRQITKHVAQILDSRMNTKYDENDKLIREVKVITLKSKLVSDFRKDFQFYKVREINNYHHAHDAYLNAVVGTALIKKYPKLESEFVYGDYKVYDVRKMIAKSEQEIGKATAKYFFYSNIMNFFKTEITLANGEIRKRPLIETNGETGEIVWDKGRDFATVRKVLSMPQVNIVKKTEVQTGGFSKESILPKRNSDKLIARKKDWDPKKYGGFDSPTVAYSVLVVAKVEKGKSKKLKSVKELLGITIMERSSFEKNPIDFLEAKGYKEVKKDLIIKLPKYSLFELENGRKRMLASAGELQKGNELALPSKYVNFLYLASHYEKLKGSPEDNEQKQLFVEQHKHYLDEIIEQISEFSKRVILADANLDKVLSAYNKHRDKPIREQAENIIHLFTLTNLGAPAAFKYFDTTIDRKRYTSTKEVLDATLIHQSITGLYETRIDLSQLGGDGGGGGGGGGGIPWLMKKPLQLTTLVPLQEYEERLLKQTMLTGSYKEKLQSLFLKYDALWQHWENQVGHRRIKPHHIATGTVNPRPQKQYPINPKAKASIQTVINDLLKQGVLIQQNSIMNTPVYPVPKPDGKWRMVLDYREVNKTIPLIAAQNQHSAGILSSIFRGKYKTTLDLSNGFWAHSITPESYWLTAFTWLGQQYCWTRLPQGFLNSPALFNADVVDLLKEVPNVQVYVDDIYISHDDPREHLEQLEKVFSLLLNAGYVVSLKKSEIAQHEVEFLGFNITKEGRGLTETFKQKLLNITPPRDLKQLQSILGLLNFARNFIPNFSELVKPLYNIIATAPGKYITWTTDNSQQLQNIISMLNSAENLEERNPEVRLIMKVNTSPSAGYIRFYNEFAKRPIMYLNYVYTKAEVKFTNTEKLLTTIHKGLIKALDLGMGQEILVYSPIVSMTKIQKTPLPERKALPIRWITWMSYLEDPRIQFHYDKTLPELQQVPTVTDDIIAKIKHPSEFSMVFYTDGSAIKHPNVNKSHNAGMGIAQVQFKPEFTVINTWSIPLGDHTAQLAEVAAVEFACKKALKIDGPVLIVTDSFYVAESVNKELPYWQSNGFFNNKKKPLKHVSKWKSIADCIQLKPDIIIIHEKGHQPTASTFHTEGNNLADKLATQGSYVVNAGKRTADGSEFEKRTADGSEFESPKKKAKVE

SEQ ID NO: 6262 - protein, 2091 aa, synthetic construct
MPAAKRVKLDGGDKKYSIGLDIGTNSVGWAVITDEYKVPSKKFKVLGNTDRHSIKKNLIGALLFDSGETAEATRLKRTARRRYTRRKNRICYLQEIFSNEMAKVDDSFFHRLEESFLVEEDKKHERHPIFGNIVDEVAYHEKYPTIYHLRKKLVDSTDKADLRLIYLALAHMIKFRGHFLIEGDLNPDNSDVDKLFIQLVQTYNQLFEENPINASGVDAKAILSARLSKSRRLENLIAQLPGEKKNGLFGNLIALSLGLTPNFKSNFDLAEDAKLQLSKDTYDDDLDNLLAQIGDQYADLFLAAKNLSDAILLSDILRVNTEITKAPLSASMIKRYDEHHQDLTLLKALVRQQLPEKYKEIFFDQSKNGYAGYIDGGASQEEFYKFIKPILEKMDGTEELLVKLNREDLLRKQRTFDNGSIPHQIHLGELHAILRRQEDFYPFLKDNREKIEKILTFRIPYYVGPLARGNSRFAWMTRKSEETITPWNFEEVVDKGASAQSFIERMTNFDKNLPNEKVLPKHSLLYEYFTVYNELTKVKYVTEGMRKPAFLSGEQKKAIVDLLFKTNRKVTVKQLKEDYFKKIECFDSVEISGVEDRFNASLGTYHDLLKIIKDKDFLDNEENEDILEDIVLTLTLFEDREMIEERLKTYAHLFDDKVMKQLKRRRYTGWGRLSRKLINGIRDKQSGKTILDFLKSDGFANRNFMQLIHDDSLTFKEDIQKAQVSGQGDSLHEHIANLAGSPAIKKGILQTVKVVDELVKVMGRHKPENIVIEMARENQTTQKGQKNSRERMKRIEEGIKELGSQILKEHPVENTQLQNEKLYLYYLQNGRDMYVDQELDINRLSDYDVDHIVPQSFLKDDSIDNKVLTRSDKARGKSDNVPSEEVVKKMKNYWRQLLNAKLITQRKFDNLTKAERGGLSELDKAGFIKRQLVETRQITKHVAQILDSRMNTKYDENDKLIREVKVITLKSKLVSDFRKDFQFYKVREINNYHHAHDAYLNAVVGTALIKKYPKLESEFVYGDYKVYDVRKMIAKSEQEIGKATAKYFFYSNIMNFFKTEITLANGEIRKRPLIETNGETGEIVWDKGRDFATVRKVLSMPQVNIVKKTEVQTGGFSKESILPKRNSDKLIARKKDWDPKKYGGFDSPTVAYSVLVVAKVEKGKSKKLKSVKELLGITIMERSSFEKNPIDFLEAKGYKEVKKDLIIKLPKYSLFELENGRKRMLASAGELQKGNELALPSKYVNFLYLASHYEKLKGSPEDNEQKQLFVEQHKHYLDEIIEQISEFSKRVILADANLDKVLSAYNKHRDKPIREQAENIIHLFTLTNLGAPAAFKYFDTTIDRKRYTSTKEVLDATLIHQSITGLYETRIDLSQLGGDGGGGGGGGGGTLNIEDEYRLHETSKEPDVPLGSTWLSDFPQAWAETGGMGLAVRQAPLIIPLKATSTPVSIKQYPMSQEARLGIKPHIQRLLDQGILVPCQSPWNTPLLPVKKPGTNDYRPVQDLREVNKRVEDIHPTVPNPYNLLSGLPPSHQWYTVLDLKDAFFCLRLHPTSQPLFAFEWRDPEMGISGQLTWTRLPQGFKNSPTLFNEALHRDLADFRIQHPDLILLQYVDDLLLAATSEQDCQRGTRALLQTLGNLGYRASAKKAQICQKQVKYLGYLLKEGQRWLTEARKETVMGQPTPKTPRQLREFLGTAGFCRLWIPGFAEMAAPLYPLTKPGTLFNWGPDQQKAYQEIKQALLTAPALGLPDLTKPFELFVDEKQGYAKGVLTQKLGPWRRPVAYLSKKLDPVAAGWPPCLRMVAAIAVLTKDAGKLTMGQPLVILAPHAVEALVKQPPDRWLSNARMTHYQAMLLDTDRVQFGPVVALNPATLLPLPEKEAPHDCLEILAETHGTRPDLTDQPIPDADYTWYTDGSSFLQEGQRRAGAAVTTETEVIWARALPAGTSAQRAELIALTQALKMAEGKKLNVYTDSRYAFATAHVHGEIYRRRGWLTSEGREIKNKNEILALLKALFLPKRLSIIHCPGHQKGNSAEARGNRMADQAAREAAMKAVLETSTLLAGKRTADGSEFEKRTADGSEFESPKKKAKVE

SEQ ID NO: 6263 - protein, 2091 aa, synthetic construct
MPAAKRVKLDGGDKKYSIGLDIGTNSVGWAVITDEYKVPSKKFKVLGNTDRHSIKKNLIGALLFDSGETAEATRLKRTARRRYTRRKNRICYLQEIFSNEMAKVDDSFFHRLEESFLVEEDKKHERHPIFGNIVDEVAYHEKYPTIYHLRKKLVDSTDKADLRLIYLALAHMIKFRGHFLIEGDLNPDNSDVDKLFIQLVQTYNQLFEENPINASGVDAKAILSARLSKSRRLENLIAQLPGEKKNGLFGNLIALSLGLTPNFKSNFDLAEDAKLQLSKDTYDDDLDNLLAQIGDQYADLFLAAKNLSDAILLSDILRVNTEITKAPLSASMIKRYDEHHQDLTLLKALVRQQLPEKYKEIFFDQSKNGYAGYIDGGASQEEFYKFIKPILEKMDGTEELLVKLNREDLLRKQRTFDNGSIPHQIHLGELHAILRRQEDFYPFLKDNREKIEKILTFRIPYYVGPLARGNSRFAWMTRKSEETITPWNFEEVVDKGASAQSFIERMTNFDKNLPNEKVLPKHSLLYEYFTVYNELTKVKYVTEGMRKPAFLSGEQKKAIVDLLFKTNRKVTVKQLKEDYFKKIECFDSVEISGVEDRFNASLGTYHDLLKIIKDKDFLDNEENEDILEDIVLTLTLFEDREMIEERLKTYAHLFDDKVMKQLKRRRYTGWGRLSRKLINGIRDKQSGKTILDFLKSDGFANRNFMQLIHDDSLTFKEDIQKAQVSGQGDSLHEHIANLAGSPAIKKGILQTVKVVDELVKVMGRHKPENIVIEMARENQTTQKGQKNSRERMKRIEEGIKELGSQILKEHPVENTQLQNEKLYLYYLQNGRDMYVDQELDINRLSDYDVDHIVPQSFLKDDSIDNKVLTRSDKARGKSDNVPSEEVVKKMKNYWRQLLNAKLITQRKFDNLTKAERGGLSELDKAGFIKRQLVETRQITKHVAQILDSRMNTKYDENDKLIREVKVITLKSKLVSDFRKDFQFYKVREINNYHHAHDAYLNAVVGTALIKKYPKLESEFVYGDYKVYDVRKMIAKSEQEIGKATAKYFFYSNIMNFFKTEITLANGEIRKRPLIETNGETGEIVWDKGRDFATVRKVLSMPQVNIVKKTEVQTGGFSKESILPKRNSDKLIARKKDWDPKKYGGFDSPTVAYSVLVVAKVEKGKSKKLKSVKELLGITIMERSSFEKNPIDFLEAKGYKEVKKDLIIKLPKYSLFELENGRKRMLASAGELQKGNELALPSKYVNFLYLASHYEKLKGSPEDNEQKQLFVEQHKHYLDEIIEQISEFSKRVILADANLDKVLSAYNKHRDKPIREQAENIIHLFTLTNLGAPAAFKYFDTTIDRKRYTSTKEVLDATLIHQSITGLYETRIDLSQLGGDGGGGGGGGGGTLNIEDEYRLHETSKEPDVPLGSTWLSDFPQAWAETGGMGLAVRQAPLIIPLKATSTPVSIKQYPMSQEARLGIKPHIQRLLDQGILVPCQSPWNTPLLPVKKPGTNDYRPVQDLREVNKRVEDIHPTVPNPYNLLSGLPPSHQWYTVLDLKDAFFCLRLHPTSQPLFAFEWRDPEMGISGQLTWTRLPQGFKNSPTLFNEALHRDLADFRIQHPDLILLQYVDDLLLAATSEQDCQRGTRALLQTLGNLGYRASAKKAQICQKQVKYLGYLLKEGQRWLTEARKETVMGQPTPKTPRQLREFLGKAGFCRLFIPGFAEMAAPLYPLTKPGTLFNWGPDQQKAYQEIKQALLTAPALGLPDLTKPFELFVDEKQGYAKGVLTQKLGPWRRPVAYLSKKLDPVAAGWPPCLRMVAAIAVLTKDAGKLTMGQPLVILAPHAVEALVKQPPDRWLSNARMTHYQAMLLDTDRVQFGPVVALNPATLLPLPEKEAPHDCLEILAETHGTRPDLTDQPIPDADYTWYTDGSSFLQEGQRRAGAAVTTETEVIWARALPAGTSAQRAELIALTQALKMAEGKKLNVYTDSRYAFATAHVHGEIYRRRGWLTSEGREIKNKNEILALLKALFLPKRLSIIHCPGHQKGNSAEARGNRMADQAAREAAMKAVLETSTLLAGKRTADGSEFEKRTADGSEFESPKKKAKVE

SEQ ID NO: 6264 - protein, 2094 aa, synthetic construct
MPAAKRVKLDGGDKKYSIGLDIGTNSVGWAVITDEYKVPSKKFKVLGNTDRHSIKKNLIGALLFDSGETAEATRLKRTARRRYTRRKNRICYLQEIFSNEMAKVDDSFFHRLEESFLVEEDKKHERHPIFGNIVDEVAYHEKYPTIYHLRKKLVDSTDKADLRLIYLALAHMIKFRGHFLIEGDLNPDNSDVDKLFIQLVQTYNQLFEENPINASGVDAKAILSARLSKSRRLENLIAQLPGEKKNGLFGNLIALSLGLTPNFKSNFDLAEDAKLQLSKDTYDDDLDNLLAQIGDQYADLFLAAKNLSDAILLSDILRVNTEITKAPLSASMIKRYDEHHQDLTLLKALVRQQLPEKYKEIFFDQSKNGYAGYIDGGASQEEFYKFIKPILEKMDGTEELLVKLNREDLLRKQRTFDNGSIPHQIHLGELHAILRRQEDFYPFLKDNREKIEKILTFRIPYYVGPLARGNSRFAWMTRKSEETITPWNFEEVVDKGASAQSFIERMTNFDKNLPNEKVLPKHSLLYEYFTVYNELTKVKYVTEGMRKPAFLSGEQKKAIVDLLFKTNRKVTVKQLKEDYFKKIECFDSVEISGVEDRFNASLGTYHDLLKIIKDKDFLDNEENEDILEDIVLTLTLFEDREMIEERLKTYAHLFDDKVMKQLKRRRYTGWGRLSRKLINGIRDKQSGKTILDFLKSDGFANRNFMQLIHDDSLTFKEDIQKAQVSGQGDSLHEHIANLAGSPAIKKGILQTVKVVDELVKVMGRHKPENIVIEMARENQTTQKGQKNSRERMKRIEEGIKELGSQILKEHPVENTQLQNEKLYLYYLQNGRDMYVDQELDINRLSDYDVDHIVPQSFLKDDSIDNKVLTRSDKARGKSDNVPSEEVVKKMKNYWRQLLNAKLITQRKFDNLTKAERGGLSELDKAGFIKRQLVETRQITKHVAQILDSRMNTKYDENDKLIREVKVITLKSKLVSDFRKDFQFYKVREINNYHHAHDAYLNAVVGTALIKKYPKLESEFVYGDYKVYDVRKMIAKSEQEIGKATAKYFFYSNIMNFFKTEITLANGEIRKRPLIETNGETGEIVWDKGRDFATVRKVLSMPQVNIVKKTEVQTGGFSKESILPKRNSDKLIARKKDWDPKKYGGFDSPTVAYSVLVVAKVEKGKSKKLKSVKELLGITIMERSSFEKNPIDFLEAKGYKEVKKDLIIKLPKYSLFELENGRKRMLASAGELQKGNELALPSKYVNFLYLASHYEKLKGSPEDNEQKQLFVEQHKHYLDEIIEQISEFSKRVILADANLDKVLSAYNKHRDKPIREQAENIIHLFTLTNLGAPAAFKYFDTTIDRKRYTSTKEVLDATLIHQSITGLYETRIDLSQLGGDGGGGGGGGGGGTAPLEEEYRLFLEAPIQNVTLLEQWKREIPKVWAEINPPGLASTQAPIHVQLLSTALPVRVRQYPITLEAKRSLRETIRKFRAAGILRPVHSPWNTPLLPVRKSGTSEYRMVQDLREVNKRVETIHPTVPNPYTLLSLLPPDRIWYSVLDLKDAFFCIPLAPESQLIFAFEWADAEEGESGQLTWTRLPQGFKNSPTLFNEALNRDLQGFRLDHPSVSLLQYVDDLLIAADTQAACLSATRDLLMTLAELGYRVSGKKAQLCQEEVTYLGFKIHKGSRSLSNSRTQAILQIPVPKTKRQVREFLGTIGYCRLWIPGFAELAQPLYAATRPGNDPLVWGEKEEEAFQSLKLALTQPPALALPSLDKPFQLFVEETSGAAKGVLTQALGPWKRPVAYLSKRLDPVAAGWPRCLRAIAAAALLTREASKLTFGQDIEITSSHNLESLLRSPPDKWLTNARITQYQVLLLDPPRVRFKQTAALNPATLLPETDDTLPIHHCLDTLDSLTSTRPDLTDQPLAQAEATLFTDGSSYIRDGKRYAGAAVVTLDSVIWAEPLPIGTSAQKAELIALTKALEWSKDKSVNIYTDSRYAFATLHVHGMIYRERGWLTAGGKAIKNAPEILALLTAVWLPKRVAVMHCKGHQKDDAPTSTGNRRADEVAREVAIRPLSTQATISAGKRTADGSEFEKRTADGSEFESPKKKAKVE

SEQ ID NO: 6265 - protein, 2094 aa, synthetic construct
MPAAKRVKLDGGDKKYSIGLDIGTNSVGWAVITDEYKVPSKKFKVLGNTDRHSIKKNLIGALLFDSGETAEATRLKRTARRRYTRRKNRICYLQEIFSNEMAKVDDSFFHRLEESFLVEEDKKHERHPIFGNIVDEVAYHEKYPTIYHLRKKLVDSTDKADLRLIYLALAHMIKFRGHFLIEGDLNPDNSDVDKLFIQLVQTYNQLFEENPINASGVDAKAILSARLSKSRRLENLIAQLPGEKKNGLFGNLIALSLGLTPNFKSNFDLAEDAKLQLSKDTYDDDLDNLLAQIGDQYADLFLAAKNLSDAILLSDILRVNTEITKAPLSASMIKRYDEHHQDLTLLKALVRQQLPEKYKEIFFDQSKNGYAGYIDGGASQEEFYKFIKPILEKMDGTEELLVKLNREDLLRKQRTFDNGSIPHQIHLGELHAILRRQEDFYPFLKDNREKIEKILTFRIPYYVGPLARGNSRFAWMTRKSEETITPWNFEEVVDKGASAQSFIERMTNFDKNLPNEKVLPKHSLLYEYFTVYNELTKVKYVTEGMRKPAFLSGEQKKAIVDLLFKTNRKVTVKQLKEDYFKKIECFDSVEISGVEDRFNASLGTYHDLLKIIKDKDFLDNEENEDILEDIVLTLTLFEDREMIEERLKTYAHLFDDKVMKQLKRRRYTGWGRLSRKLINGIRDKQSGKTILDFLKSDGFANRNFMQLIHDDSLTFKEDIQKAQVSGQGDSLHEHIANLAGSPAIKKGILQTVKVVDELVKVMGRHKPENIVIEMARENQTTQKGQKNSRERMKRIEEGIKELGSQILKEHPVENTQLQNEKLYLYYLQNGRDMYVDQELDINRLSDYDVDHIVPQSFLKDDSIDNKVLTRSDKARGKSDNVPSEEVVKKMKNYWRQLLNAKLITQRKFDNLTKAERGGLSELDKAGFIKRQLVETRQITKHVAQILDSRMNTKYDENDKLIREVKVITLKSKLVSDFRKDFQFYKVREINNYHHAHDAYLNAVVGTALIKKYPKLESEFVYGDYKVYDVRKMIAKSEQEIGKATAKYFFYSNIMNFFKTEITLANGEIRKRPLIETNGETGEIVWDKGRDFATVRKVLSMPQVNIVKKTEVQTGGFSKESILPKRNSDKLIARKKDWDPKKYGGFDSPTVAYSVLVVAKVEKGKSKKLKSVKELLGITIMERSSFEKNPIDFLEAKGYKEVKKDLIIKLPKYSLFELENGRKRMLASAGELQKGNELALPSKYVNFLYLASHYEKLKGSPEDNEQKQLFVEQHKHYLDEIIEQISEFSKRVILADANLDKVLSAYNKHRDKPIREQAENIIHLFTLTNLGAPAAFKYFDTTIDRKRYTSTKEVLDATLIHQSITGLYETRIDLSQLGGDGGGGGGGGGGGTAPLEEEYRLFLEAPIQNVTLLEQWKREIPKVWAEINPPGLASTQAPIHVQLLSTALPVRVRQYPITLEAKRSLRETIRKFRAAGILRPVHSPWNTPLLPVRKSGTSEYRMVQDLREVNKRVETIHPTVPNPYTLLSLLPPDRIWYSVLDLKDAFFCIPLAPESQLIFAFEWADAEEGESGQLTWTRLPQGFKNSPTLFNEALNRDLQGFRLDHPSVSLLQYVDDLLIAADTQAACLSATRDLLMTLAELGYRVSGKKAQLCQEEVTYLGFKIHKGSRSLSNSRTQAILQIPVPKTKRQVREFLGKIGYCRLFIPGFAELAQPLYAATRPGNDPLVWGEKEEEAFQSLKLALTQPPALALPSLDKPFQLFVEETSGAAKGVLTQALGPWKRPVAYLSKRLDPVAAGWPRCLRAIAAAALLTREASKLTFGQDIEITSSHNLESLLRSPPDKWLTNARITQYQVLLLDPPRVRFKQTAALNPATLLPETDDTLPIHHCLDTLDSLTSTRPDLTDQPLAQAEATLFTDGSSYIRDGKRYAGAAVVTLDSVIWAEPLPIGTSAQKAELIALTKALEWSKDKSVNIYTDSRYAFATLHVHGMIYRERGWLTAGGKAIKNAPEILALLTAVWLPKRVAVMHCKGHQKDDAPTSTGNRRADEVAREVAIRPLSTQATISAGKRTADGSEFEKRTADGSEFESPKKKAKVE

SEQ ID NO: 6266 - protein, 2098 aa, synthetic construct
MPAAKRVKLDGGDKKYSIGLDIGTNSVGWAVITDEYKVPSKKFKVLGNTDRHSIKKNLIGALLFDSGETAEATRLKRTARRRYTRRKNRICYLQEIFSNEMAKVDDSFFHRLEESFLVEEDKKHERHPIFGNIVDEVAYHEKYPTIYHLRKKLVDSTDKADLRLIYLALAHMIKFRGHFLIEGDLNPDNSDVDKLFIQLVQTYNQLFEENPINASGVDAKAILSARLSKSRRLENLIAQLPGEKKNGLFGNLIALSLGLTPNFKSNFDLAEDAKLQLSKDTYDDDLDNLLAQIGDQYADLFLAAKNLSDAILLSDILRVNTEITKAPLSASMIKRYDEHHQDLTLLKALVRQQLPEKYKEIFFDQSKNGYAGYIDGGASQEEFYKFIKPILEKMDGTEELLVKLNREDLLRKQRTFDNGSIPHQIHLGELHAILRRQEDFYPFLKDNREKIEKILTFRIPYYVGPLARGNSRFAWMTRKSEETITPWNFEEVVDKGASAQSFIERMTNFDKNLPNEKVLPKHSLLYEYFTVYNELTKVKYVTEGMRKPAFLSGEQKKAIVDLLFKTNRKVTVKQLKEDYFKKIECFDSVEISGVEDRFNASLGTYHDLLKIIKDKDFLDNEENEDILEDIVLTLTLFEDREMIEERLKTYAHLFDDKVMKQLKRRRYTGWGRLSRKLINGIRDKQSGKTILDFLKSDGFANRNFMQLIHDDSLTFKEDIQKAQVSGQGDSLHEHIANLAGSPAIKKGILQTVKVVDELVKVMGRHKPENIVIEMARENQTTQKGQKNSRERMKRIEEGIKELGSQILKEHPVENTQLQNEKLYLYYLQNGRDMYVDQELDINRLSDYDVDHIVPQSFLKDDSIDNKVLTRSDKARGKSDNVPSEEVVKKMKNYWRQLLNAKLITQRKFDNLTKAERGGLSELDKAGFIKRQLVETRQITKHVAQILDSRMNTKYDENDKLIREVKVITLKSKLVSDFRKDFQFYKVREINNYHHAHDAYLNAVVGTALIKKYPKLESEFVYGDYKVYDVRKMIAKSEQEIGKATAKYFFYSNIMNFFKTEITLANGEIRKRPLIETNGETGEIVWDKGRDFATVRKVLSMPQVNIVKKTEVQTGGFSKESILPKRNSDKLIARKKDWDPKKYGGFDSPTVAYSVLVVAKVEKGKSKKLKSVKELLGITIMERSSFEKNPIDFLEAKGYKEVKKDLIIKLPKYSLFELENGRKRMLASAGELQKGNELALPSKYVNFLYLASHYEKLKGSPEDNEQKQLFVEQHKHYLDEIIEQISEFSKRVILADANLDKVLSAYNKHRDKPIREQAENIIHLFTLTNLGAPAAFKYFDTTIDRKRYTSTKEVLDATLIHQSITGLYETRIDLSQLGGDGGGGGGGGGGGTVSLQDEHRLFDIPVTTSLPDVWLQDFPQAWAETGGLGRAKCQAPIIIDLKPTAVPVSIKQYPMSLEAHMGIRQHIIKFLELGVLRPCRSPWNTPLLPVKKPGTQDYRPVQDLREINKRTVDIHPTVPNPYNLLSTLKPDYSWYTVLDLKDAFFCLPLAPQSQELFAFEWKDPERGISGQLTWTRLPQGFKNSPTLFNEALHRDLTDFRTQHPEVTLLQYVDDLLLAAPTKKACTQGTRHLLQELGEKGYRASAKKAQICQTKVTYLGYILSEGKRWLTPGRIETVARIPPPRNPREVREFLGKAGFCRLFIPGFAELAAPLYALTKPSTPFTWQTEHQLAFEALKKALLSAPALGLPDTSKPFTLFLDERQGIAKGVLTQKLGPWKRPVAYLSKKLDPVAAGWPPCLRIMAATAMLVKDSAKLTLGQPLTVITPHTLEAIVRQPPDRWITNARLTHYQALLLDTDRVQFGPPVTLNPATLLPVPENQPSPHDCRQVLAETHGTREDLKDQELPDADHTWYTDGSSYLDSGTRRAGAAVVDGHNTIWAQSLPPGTSAQKAELIALTKALELSKGKKANIYTDSRYAFATAHTHGSIYERRGWLTSEGKEIKNKAEIIALLKALFLPQEVAIIHCPGHQKGQDPVAVGNRQADRVARQAAMAEVLTLATEPDNTSHITAGKRTADGSEFEKRTADGSEFESPKKKAKVE

SEQ ID NO: 6267 - protein, 2091 aa, synthetic construct
MPAAKRVKLDGGDKKYSIGLDIGTNSVGWAVITDEYKVPSKKFKVLGNTDRHSIKKNLIGALLFDSGETAEATRLKRTARRRYTRRKNRICYLQEIFSNEMAKVDDSFFHRLEESFLVEEDKKHERHPIFGNIVDEVAYHEKYPTIYHLRKKLVDSTDKADLRLIYLALAHMIKFRGHFLIEGDLNPDNSDVDKLFIQLVQTYNQLFEENPINASGVDAKAILSARLSKSRRLENLIAQLPGEKKNGLFGNLIALSLGLTPNFKSNFDLAEDAKLQLSKDTYDDDLDNLLAQIGDQYADLFLAAKNLSDAILLSDILRVNTEITKAPLSASMIKRYDEHHQDLTLLKALVRQQLPEKYKEIFFDQSKNGYAGYIDGGASQEEFYKFIKPILEKMDGTEELLVKLNREDLLRKQRTFDNGSIPHQIHLGELHAILRRQEDFYPFLKDNREKIEKILTFRIPYYVGPLARGNSRFAWMTRKSEETITPWNFEEVVDKGASAQSFIERMTNFDKNLPNEKVLPKHSLLYEYFTVYNELTKVKYVTEGMRKPAFLSGEQKKAIVDLLFKTNRKVTVKQLKEDYFKKIECFDSVEISGVEDRFNASLGTYHDLLKIIKDKDFLDNEENEDILEDIVLTLTLFEDREMIEERLKTYAHLFDDKVMKQLKRRRYTGWGRLSRKLINGIRDKQSGKTILDFLKSDGFANRNFMQLIHDDSLTFKEDIQKAQVSGQGDSLHEHIANLAGSPAIKKGILQTVKVVDELVKVMGRHKPENIVIEMARENQTTQKGQKNSRERMKRIEEGIKELGSQILKEHPVENTQLQNEKLYLYYLQNGRDMYVDQELDINRLSDYDVDHIVPQSFLKDDSIDNKVLTRSDKARGKSDNVPSEEVVKKMKNYWRQLLNAKLITQRKFDNLTKAERGGLSELDKAGFIKRQLVETRQITKHVAQILDSRMNTKYDENDKLIREVKVITLKSKLVSDFRKDFQFYKVREINNYHHAHDAYLNAVVGTALIKKYPKLESEFVYGDYKVYDVRKMIAKSEQEIGKATAKYFFYSNIMNFFKTEITLANGEIRKRPLIETNGETGEIVWDKGRDFATVRKVLSMPQVNIVKKTEVQTGGFSKESILPKRNSDKLIARKKDWDPKKYGGFDSPTVAYSVLVVAKVEKGKSKKLKSVKELLGITIMERSSFEKNPIDFLEAKGYKEVKKDLIIKLPKYSLFELENGRKRMLASAGELQKGNELALPSKYVNFLYLASHYEKLKGSPEDNEQKQLFVEQHKHYLDEIIEQISEFSKRVILADANLDKVLSAYNKHRDKPIREQAENIIHLFTLTNLGAPAAFKYFDTTIDRKRYTSTKEVLDATLIHQSITGLYETRIDLSQLGGDGGGGGGGGGGGTLQLEEEYRLFEPESTQKQEMDIWLKNFPQAWAETGGMGTAHCQAPVLIQLKATATPISIRQYPMPHEAYQGIKPHIRRMLDQGILKPCQSPWNTPLLPVKKPGTEDYRPVQDLREVNKRVEDIHPTVPNPYNLLSTLPPSHPWYTVLDLKDAFFCLRLHSESQLLFAFEWRDPEIGLSGQLTWTRLPQGFKNSPTLFNEALHSDLADFRVRYPALVLLQYVDDLLLAAATRTECLEGTKALLETLGNKGYRASAKKAQICLQEVTYLGYSLKDGQRWLTKARKEAILSIPVPKNSRQVREFLGKAGYCRLFIPGFAELAAPLYPLTRPGTLFQWGTEQQLAFEDIKKALLSSPALGLPDITKPFELFIDENSGFAKGVLVQKLGPWKRPVAYLSKKLDTVASGWPPCLRMVAAIAILVKDAGKLTLGQPLTILTSHPVEALVRQPPNKWLSNARMTHYQAMLLDAERVHFGPTVSLNPATLLPLPSGGNHHDCLQILAETHGTRPDLTDQPLPDADLTWYTDGSSFIRNGEREAGAAVTTESEVIWAAPLPPGTSAQRAELIALTQALKMAEGKKLTVYTDSRYAFATTHVHGEIYRRRGWLTSEGKEIKNKNEILALLEALFLPKRLSIIHCPGHQKGDSPQAKGNRLADDTAKKAATETHSSLTVLPAGKRTADGSEFEKRTADGSEFESPKKKAKVE

SEQ ID NO: 6268 - protein, 2123 aa, synthetic construct
MPAAKRVKLDGGDKKYSIGLDIGTNSVGWAVITDEYKVPSKKFKVLGNTDRHSIKKNLIGALLFDSGETAEATRLKRTARRRYTRRKNRICYLQEIFSNEMAKVDDSFFHRLEESFLVEEDKKHERHPIFGNIVDEVAYHEKYPTIYHLRKKLVDSTDKADLRLIYLALAHMIKFRGHFLIEGDLNPDNSDVDKLFIQLVQTYNQLFEENPINASGVDAKAILSARLSKSRRLENLIAQLPGEKKNGLFGNLIALSLGLTPNFKSNFDLAEDAKLQLSKDTYDDDLDNLLAQIGDQYADLFLAAKNLSDAILLSDILRVNTEITKAPLSASMIKRYDEHHQDLTLLKALVRQQLPEKYKEIFFDQSKNGYAGYIDGGASQEEFYKFIKPILEKMDGTEELLVKLNREDLLRKQRTFDNGSIPHQIHLGELHAILRRQEDFYPFLKDNREKIEKILTFRIPYYVGPLARGNSRFAWMTRKSEETITPWNFEEVVDKGASAQSFIERMTNFDKNLPNEKVLPKHSLLYEYFTVYNELTKVKYVTEGMRKPAFLSGEQKKAIVDLLFKTNRKVTVKQLKEDYFKKIECFDSVEISGVEDRFNASLGTYHDLLKIIKDKDFLDNEENEDILEDIVLTLTLFEDREMIEERLKTYAHLFDDKVMKQLKRRRYTGWGRLSRKLINGIRDKQSGKTILDFLKSDGFANRNFMQLIHDDSLTFKEDIQKAQVSGQGDSLHEHIANLAGSPAIKKGILQTVKVVDELVKVMGRHKPENIVIEMARENQTTQKGQKNSRERMKRIEEGIKELGSQILKEHPVENTQLQNEKLYLYYLQNGRDMYVDQELDINRLSDYDVDHIVPQSFLKDDSIDNKVLTRSDKARGKSDNVPSEEVVKKMKNYWRQLLNAKLITQRKFDNLTKAERGGLSELDKAGFIKRQLVETRQITKHVAQILDSRMNTKYDENDKLIREVKVITLKSKLVSDFRKDFQFYKVREINNYHHAHDAYLNAVVGTALIKKYPKLESEFVYGDYKVYDVRKMIAKSEQEIGKATAKYFFYSNIMNFFKTEITLANGEIRKRPLIETNGETGEIVWDKGRDFATVRKVLSMPQVNIVKKTEVQTGGFSKESILPKRNSDKLIARKKDWDPKKYGGFDSPTVAYSVLVVAKVEKGKSKKLKSVKELLGITIMERSSFEKNPIDFLEAKGYKEVKKDLIIKLPKYSLFELENGRKRMLASAGELQKGNELALPSKYVNFLYLASHYEKLKGSPEDNEQKQLFVEQHKHYLDEIIEQISEFSKRVILADANLDKVLSAYNKHRDKPIREQAENIIHLFTLTNLGAPAAFKYFDTTIDRKRYTSTKEVLDATLIHQSITGLYETRIDLSQLGGDGGGGGGGGGGGLLGRDLLTKLKAQIQFSTEGPQVTWEDRPAMCLVLNLEEEYRLHEKPVPPSIDPSWLQLFPMVWAEKAGMGLANQVPPVVVELKSDASPVAVRQYPMSKEAREGIRPHIQRFLDLGILVPCQSPWNTPLLPVKKPGTNDYRPVQDLREVNKRVQDIHPTVPNPYNLLSSLPPSHTWYSVLDLKDAFFCLKLHPNSQPLFAFEWRDPEKGNTGQLTWTRLPQGFKNSPTLFNEALHRDLASFRALNPQVVMLQYVDDLLVAAPTYRDCKEGTRRLLQELSKLGYRVSAKKAQLCREEVTYLGYLLKGGKRWLTPARKATVMKIPTPTTPRQVREFLGTAGFCRLWIPGFASLAAPLYPLTRPKVPFTWTEAHQEAFGRIKEALLSAPALALPDLTKPFALYVDEKEGVARGVLTQTLGPWRRPVAYLSKKLDPVASGWPTCLKAIAAVALLLKDADKLTLGQNVLVIAPHNLESIVRQPPDRWMTNARMTHYQSLLLNERVSFAPPAILNPATLLPVESDDTPIHICSEILAEETGTRPDLRDQPLPGVPAWYTDGSSFIMDGRRQAGAAIVDNKRTVWASNLPEGTSAQKAELIALTQALRLAEGKSINIYTDSRYAFATAHVHGAIYKQRGWLTSAGKDIKNKEEILALLEAIHLPKRVAIIHCPGHQRGTDPVATGNRKADEAAKQAAQSTRILTETTKNAGKRTADGSEFEKRTADGSEFESPKKKAKVE

SEQ ID NO: 6269 - protein, 2123 aa, synthetic construct
MPAAKRVKLDGGDKKYSIGLDIGTNSVGWAVITDEYKVPSKKFKVLGNTDRHSIKKNLIGALLFDSGETAEATRLKRTARRRYTRRKNRICYLQEIFSNEMAKVDDSFFHRLEESFLVEEDKKHERHPIFGNIVDEVAYHEKYPTIYHLRKKLVDSTDKADLRLIYLALAHMIKFRGHFLIEGDLNPDNSDVDKLFIQLVQTYNQLFEENPINASGVDAKAILSARLSKSRRLENLIAQLPGEKKNGLFGNLIALSLGLTPNFKSNFDLAEDAKLQLSKDTYDDDLDNLLAQIGDQYADLFLAAKNLSDAILLSDILRVNTEITKAPLSASMIKRYDEHHQDLTLLKALVRQQLPEKYKEIFFDQSKNGYAGYIDGGASQEEFYKFIKPILEKMDGTEELLVKLNREDLLRKQRTFDNGSIPHQIHLGELHAILRRQEDFYPFLKDNREKIEKILTFRIPYYVGPLARGNSRFAWMTRKSEETITPWNFEEVVDKGASAQSFIERMTNFDKNLPNEKVLPKHSLLYEYFTVYNELTKVKYVTEGMRKPAFLSGEQKKAIVDLLFKTNRKVTVKQLKEDYFKKIECFDSVEISGVEDRFNASLGTYHDLLKIIKDKDFLDNEENEDILEDIVLTLTLFEDREMIEERLKTYAHLFDDKVMKQLKRRRYTGWGRLSRKLINGIRDKQSGKTILDFLKSDGFANRNFMQLIHDDSLTFKEDIQKAQVSGQGDSLHEHIANLAGSPAIKKGILQTVKVVDELVKVMGRHKPENIVIEMARENQTTQKGQKNSRERMKRIEEGIKELGSQILKEHPVENTQLQNEKLYLYYLQNGRDMYVDQELDINRLSDYDVDHIVPQSFLKDDSIDNKVLTRSDKARGKSDNVPSEEVVKKMKNYWRQLLNAKLITQRKFDNLTKAERGGLSELDKAGFIKRQLVETRQITKHVAQILDSRMNTKYDENDKLIREVKVITLKSKLVSDFRKDFQFYKVREINNYHHAHDAYLNAVVGTALIKKYPKLESEFVYGDYKVYDVRKMIAKSEQEIGKATAKYFFYSNIMNFFKTEITLANGEIRKRPLIETNGETGEIVWDKGRDFATVRKVLSMPQVNIVKKTEVQTGGFSKESILPKRNSDKLIARKKDWDPKKYGGFDSPTVAYSVLVVAKVEKGKSKKLKSVKELLGITIMERSSFEKNPIDFLEAKGYKEVKKDLIIKLPKYSLFELENGRKRMLASAGELQKGNELALPSKYVNFLYLASHYEKLKGSPEDNEQKQLFVEQHKHYLDEIIEQISEFSKRVILADANLDKVLSAYNKHRDKPIREQAENIIHLFTLTNLGAPAAFKYFDTTIDRKRYTSTKEVLDATLIHQSITGLYETRIDLSQLGGDGGGGGGGGGGGLLGRDLLTKLKAQIQFSTEGPQVTWEDRPAMCLVLNLEEEYRLHEKPVPPSIDPSWLQLFPMVWAEKAGMGLANQVPPVVVELKSDASPVAVRQYPMSKEAREGIRPHIQRFLDLGILVPCQSPWNTPLLPVKKPGTNDYRPVQDLREVNKRVQDIHPTVPNPYNLLSSLPPSHTWYSVLDLKDAFFCLKLHPNSQPLFAFEWRDPEKGNTGQLTWTRLPQGFKNSPTLFNEALHRDLASFRALNPQVVMLQYVDDLLVAAPTYRDCKEGTRRLLQELSKLGYRVSAKKAQLCREEVTYLGYLLKGGKRWLTPARKATVMKIPTPTTPRQVREFLGKAGFCRLFIPGFASLAAPLYPLTRPKVPFTWTEAHQEAFGRIKEALLSAPALALPDLTKPFALYVDEKEGVARGVLTQTLGPWRRPVAYLSKKLDPVASGWPTCLKAIAAVALLLKDADKLTLGQNVLVIAPHNLESIVRQPPDRWMTNARMTHYQSLLLNERVSFAPPAILNPATLLPVESDDTPIHICSEILAEETGTRPDLRDQPLPGVPAWYTDGSSFIMDGRRQAGAAIVDNKRTVWASNLPEGTSAQKAELIALTQALRLAEGKSINIYTDSRYAFATAHVHGAIYKQRGWLTSAGKDIKNKEEILALLEAIHLPKRVAIIHCPGHQRGTDPVATGNRKADEAAKQAAQSTRILTETTKNAGKRTADGSEFEKRTADGSEFESPKKKAKVE

SEQ ID NO: 6270 - protein, 2092 aa, synthetic construct
MPAAKRVKLDGGDKKYSIGLDIGTNSVGWAVITDEYKVPSKKFKVLGNTDRHSIKKNLIGALLFDSGETAEATRLKRTARRRYTRRKNRICYLQEIFSNEMAKVDDSFFHRLEESFLVEEDKKHERHPIFGNIVDEVAYHEKYPTIYHLRKKLVDSTDKADLRLIYLALAHMIKFRGHFLIEGDLNPDNSDVDKLFIQLVQTYNQLFEENPINASGVDAKAILSARLSKSRRLENLIAQLPGEKKNGLFGNLIALSLGLTPNFKSNFDLAEDAKLQLSKDTYDDDLDNLLAQIGDQYADLFLAAKNLSDAILLSDILRVNTEITKAPLSASMIKRYDEHHQDLTLLKALVRQQLPEKYKEIFFDQSKNGYAGYIDGGASQEEFYKFIKPILEKMDGTEELLVKLNREDLLRKQRTFDNGSIPHQIHLGELHAILRRQEDFYPFLKDNREKIEKILTFRIPYYVGPLARGNSRFAWMTRKSEETITPWNFEEVVDKGASAQSFIERMTNFDKNLPNEKVLPKHSLLYEYFTVYNELTKVKYVTEGMRKPAFLSGEQKKAIVDLLFKTNRKVTVKQLKEDYFKKIECFDSVEISGVEDRFNASLGTYHDLLKIIKDKDFLDNEENEDILEDIVLTLTLFEDREMIEERLKTYAHLFDDKVMKQLKRRRYTGWGRLSRKLINGIRDKQSGKTILDFLKSDGFANRNFMQLIHDDSLTFKEDIQKAQVSGQGDSLHEHIANLAGSPAIKKGILQTVKVVDELVKVMGRHKPENIVIEMARENQTTQKGQKNSRERMKRIEEGIKELGSQILKEHPVENTQLQNEKLYLYYLQNGRDMYVDQELDINRLSDYDVDHIVPQSFLKDDSIDNKVLTRSDKARGKSDNVPSEEVVKKMKNYWRQLLNAKLITQRKFDNLTKAERGGLSELDKAGFIKRQLVETRQITKHVAQILDSRMNTKYDENDKLIREVKVITLKSKLVSDFRKDFQFYKVREINNYHHAHDAYLNAVVGTALIKKYPKLESEFVYGDYKVYDVRKMIAKSEQEIGKATAKYFFYSNIMNFFKTEITLANGEIRKRPLIETNGETGEIVWDKGRDFATVRKVLSMPQVNIVKKTEVQTGGFSKESILPKRNSDKLIARKKDWDPKKYGGFDSPTVAYSVLVVAKVEKGKSKKLKSVKELLGITIMERSSFEKNPIDFLEAKGYKEVKKDLIIKLPKYSLFELENGRKRMLASAGELQKGNELALPSKYVNFLYLASHYEKLKGSPEDNEQKQLFVEQHKHYLDEIIEQISEFSKRVILADANLDKVLSAYNKHRDKPIREQAENIIHLFTLTNLGAPAAFKYFDTTIDRKRYTSTKEVLDATLIHQSITGLYETRIDLSQLGGDGGGGGGGGGGGTLNLEDEYRLYETSAEPEVSPGSTWLSDFPQAWAETGGMGLAVRQAPLIIPLKATSTPVSIKQYPMSQEAKLGIKPHIQRLLDQGILVPCQSPWNTPLLPVKKPGTNDYRPVQDLREVNKRVEDIHPTVPNPYNLLSGLPPSHRWYTVLDLKDAFFCLRLHPTSQPLFAFEWRDPGMGISGQLTWTRLPQGFKNSPTLFNEALHRDLADFRIQHPDLILLQYVDDILLAATSELDCQQGTRALLLTLGNLGYRASAKKAQLCQKQVKYLGYLLKEGQRWLTEARKETVMGQPTPKTPRQLREFLGTAGFCRLWIPGFAEMAAPLYPLTKPGTLFNWGPDQQKAYQEIKQALLTAPALGLPDLTKPFELFVDEKQGYAKGVLTQKLGPWRRPVAYLSKKLDPVAAGWPPCLRMVAAIAVLRKDAGKLTMGQPLVILAPHAVEALVKQPPDRWLSNARMTHYQAMLLDTDRVQFGPVVALNPATLLPLPEEGAPHDCLEILAETHGTRPDLTDQPIPDADHTWYTDGSSFLQEGQRKAGAAVTTETEVIWARALPAGTSAQRAELIALTQALKMAEGKRLNVYTDSRYAFATAHIHGEIYRRRGWLTSEGREIKNKSEILALLKALFLPKRLSIIHCLGHQKGDSAEARGNRLADQAAREAAIKTPPDTSTLLAGKRTADGSEFEKRTADGSEFESPKKKAKVE

SEQ ID NO: 6271 - protein, 2092 aa, synthetic construct
MPAAKRVKLDGGDKKYSIGLDIGTNSVGWAVITDEYKVPSKKFKVLGNTDRHSIKKNLIGALLFDSGETAEATRLKRTARRRYTRRKNRICYLQEIFSNEMAKVDDSFFHRLEESFLVEEDKKHERHPIFGNIVDEVAYHEKYPTIYHLRKKLVDSTDKADLRLIYLALAHMIKFRGHFLIEGDLNPDNSDVDKLFIQLVQTYNQLFEENPINASGVDAKAILSARLSKSRRLENLIAQLPGEKKNGLFGNLIALSLGLTPNFKSNFDLAEDAKLQLSKDTYDDDLDNLLAQIGDQYADLFLAAKNLSDAILLSDILRVNTEITKAPLSASMIKRYDEHHQDLTLLKALVRQQLPEKYKEIFFDQSKNGYAGYIDGGASQEEFYKFIKPILEKMDGTEELLVKLNREDLLRKQRTFDNGSIPHQIHLGELHAILRRQEDFYPFLKDNREKIEKILTFRIPYYVGPLARGNSRFAWMTRKSEETITPWNFEEVVDKGASAQSFIERMTNFDKNLPNEKVLPKHSLLYEYFTVYNELTKVKYVTEGMRKPAFLSGEQKKAIVDLLFKTNRKVTVKQLKEDYFKKIECFDSVEISGVEDRFNASLGTYHDLLKIIKDKDFLDNEENEDILEDIVLTLTLFEDREMIEERLKTYAHLFDDKVMKQLKRRRYTGWGRLSRKLINGIRDKQSGKTILDFLKSDGFANRNFMQLIHDDSLTFKEDIQKAQVSGQGDSLHEHIANLAGSPAIKKGILQTVKVVDELVKVMGRHKPENIVIEMARENQTTQKGQKNSRERMKRIEEGIKELGSQILKEHPVENTQLQNEKLYLYYLQNGRDMYVDQELDINRLSDYDVDHIVPQSFLKDDSIDNKVLTRSDKARGKSDNVPSEEVVKKMKNYWRQLLNAKLITQRKFDNLTKAERGGLSELDKAGFIKRQLVETRQITKHVAQILDSRMNTKYDENDKLIREVKVITLKSKLVSDFRKDFQFYKVREINNYHHAHDAYLNAVVGTALIKKYPKLESEFVYGDYKVYDVRKMIAKSEQEIGKATAKYFFYSNIMNFFKTEITLANGEIRKRPLIETNGETGEIVWDKGRDFATVRKVLSMPQVNIVKKTEVQTGGFSKESILPKRNSDKLIARKKDWDPKKYGGFDSPTVAYSVLVVAKVEKGKSKKLKSVKELLGITIMERSSFEKNPIDFLEAKGYKEVKKDLIIKLPKYSLFELENGRKRMLASAGELQKGNELALPSKYVNFLYLASHYEKLKGSPEDNEQKQLFVEQHKHYLDEIIEQISEFSKRVILADANLDKVLSAYNKHRDKPIREQAENIIHLFTLTNLGAPAAFKYFDTTIDRKRYTSTKEVLDATLIHQSITGLYETRIDLSQLGGDGGGGGGGGGGGTLNLEDEYRLYETSAEPEVSPGSTWLSDFPQAWAETGGMGLAVRQAPLIIPLKATSTPVSIKQYPMSQEAKLGIKPHIQRLLDQGILVPCQSPWNTPLLPVKKPGTNDYRPVQDLREVNKRVEDIHPTVPNPYNLLSGLPPSHRWYTVLDLKDAFFCLRLHPTSQPLFAFEWRDPGMGISGQLTWTRLPQGFKNSPTLFNEALHRDLADFRIQHPDLILLQYVDDILLAATSELDCQQGTRALLLTLGNLGYRASAKKAQLCQKQVKYLGYLLKEGQRWLTEARKETVMGQPTPKTPRQLREFLGKAGFCRLFIPGFAEMAAPLYPLTKPGTLFNWGPDQQKAYQEIKQALLTAPALGLPDLTKPFELFVDEKQGYAKGVLTQKLGPWRRPVAYLSKKLDPVAAGWPPCLRMVAAIAVLRKDAGKLTMGQPLVILAPHAVEALVKQPPDRWLSNARMTHYQAMLLDTDRVQFGPVVALNPATLLPLPEEGAPHDCLEILAETHGTRPDLTDQPIPDADHTWYTDGSSFLQEGQRKAGAAVTTETEVIWARALPAGTSAQRAELIALTQALKMAEGKRLNVYTDSRYAFATAHIHGEIYRRRGWLTSEGREIKNKSEILALLKALFLPKRLSIIHCLGHQKGDSAEARGNRLADQAAREAAIKTPPDTSTLLAGKRTADGSEFEKRTADGSEFESPKKKAKVE

SEQ ID NO: 6272 - protein, 2090 aa, synthetic construct
MPAAKRVKLDGGDKKYSIGLDIGTNSVGWAVITDEYKVPSKKFKVLGNTDRHSIKKNLIGALLFDSGETAEATRLKRTARRRYTRRKNRICYLQEIFSNEMAKVDDSFFHRLEESFLVEEDKKHERHPIFGNIVDEVAYHEKYPTIYHLRKKLVDSTDKADLRLIYLALAHMIKFRGHFLIEGDLNPDNSDVDKLFIQLVQTYNQLFEENPINASGVDAKAILSARLSKSRRLENLIAQLPGEKKNGLFGNLIALSLGLTPNFKSNFDLAEDAKLQLSKDTYDDDLDNLLAQIGDQYADLFLAAKNLSDAILLSDILRVNTEITKAPLSASMIKRYDEHHQDLTLLKALVRQQLPEKYKEIFFDQSKNGYAGYIDGGASQEEFYKFIKPILEKMDGTEELLVKLNREDLLRKQRTFDNGSIPHQIHLGELHAILRRQEDFYPFLKDNREKIEKILTFRIPYYVGPLARGNSRFAWMTRKSEETITPWNFEEVVDKGASAQSFIERMTNFDKNLPNEKVLPKHSLLYEYFTVYNELTKVKYVTEGMRKPAFLSGEQKKAIVDLLFKTNRKVTVKQLKEDYFKKIECFDSVEISGVEDRFNASLGTYHDLLKIIKDKDFLDNEENEDILEDIVLTLTLFEDREMIEERLKTYAHLFDDKVMKQLKRRRYTGWGRLSRKLINGIRDKQSGKTILDFLKSDGFANRNFMQLIHDDSLTFKEDIQKAQVSGQGDSLHEHIANLAGSPAIKKGILQTVKVVDELVKVMGRHKPENIVIEMARENQTTQKGQKNSRERMKRIEEGIKELGSQILKEHPVENTQLQNEKLYLYYLQNGRDMYVDQELDINRLSDYDVDHIVPQSFLKDDSIDNKVLTRSDKARGKSDNVPSEEVVKKMKNYWRQLLNAKLITQRKFDNLTKAERGGLSELDKAGFIKRQLVETRQITKHVAQILDSRMNTKYDENDKLIREVKVITLKSKLVSDFRKDFQFYKVREINNYHHAHDAYLNAVVGTALIKKYPKLESEFVYGDYKVYDVRKMIAKSEQEIGKATAKYFFYSNIMNFFKTEITLANGEIRKRPLIETNGETGEIVWDKGRDFATVRKVLSMPQVNIVKKTEVQTGGFSKESILPKRNSDKLIARKKDWDPKKYGGFDSPTVAYSVLVVAKVEKGKSKKLKSVKELLGITIMERSSFEKNPIDFLEAKGYKEVKKDLIIKLPKYSLFELENGRKRMLASAGELQKGNELALPSKYVNFLYLASHYEKLKGSPEDNEQKQLFVEQHKHYLDEIIEQISEFSKRVILADANLDKVLSAYNKHRDKPIREQAENIIHLFTLTNLGAPAAFKYFDTTIDRKRYTSTKEVLDATLIHQSITGLYETRIDLSQLGGDGGGGGGGGGGGVLNLEEEYRLHEKPVPSSIDPSWLQLFPTVWAERAGMGLANQVPPVVVELRSGASPVAVRQYPMSKEAREGIRPHIQRFLDLGVLVPCQSPWNTPLLPVKKPGTNDYRPVQDLREINKRVQDIHPTVPNPYNLLSSLPPSHTWYSVLDLKDAFFCLKLHPNSQPLFAFEWRDPEKGNTGQLTWTRLPQGFKNSPTLFNEALHRDLAPFRALNPQVVLLQYVDDLLVAAPTYRDCKEGTQKLLQELSKLGYRVSAKKAQLCQKEVTYLGYLLKEGKRWLTPARKATVMKIPPPTTPRQVREFLGKAGFCRLFIPGFASLAAPLYPLTKPSIPFIWTEEHQKAFDRIKEALLSAPALALPDLTKPFTLYVDERAGVARGVLTQTLGPWRRPVAYLSKKLDPVASGWPTCLKAVAAVALLLKDADKLTLGQNVTVIASHSLESIVRQPPDRWMTNARMTHYQSLLLNERVSFAPPAVLNPATLLPVESEATPVHRCSEILAEETGTRRDLKDQPLPGVPAWYTDGSSFIAEGKRRAGAAIVDGKRTVWASSLPEGTSAQKAELVALTQALRLAEGKDINIYTDSRYAFATAHIHGAIYKQRGWLTSAGKDIKNKEEILALLEAIHLPKRVAIIHCPGHQKGNDPVATGNRRADEAAKQAALSTRVLAETTKPAGKRTADGSEFEKRTADGSEFESPKKKAKVE

SEQ ID NO: 6273 - protein, 2092 aa, synthetic construct
MPAAKRVKLDGGDKKYSIGLDIGTNSVGWAVITDEYKVPSKKFKVLGNTDRHSIKKNLIGALLFDSGETAEATRLKRTARRRYTRRKNRICYLQEIFSNEMAKVDDSFFHRLEESFLVEEDKKHERHPIFGNIVDEVAYHEKYPTIYHLRKKLVDSTDKADLRLIYLALAHMIKFRGHFLIEGDLNPDNSDVDKLFIQLVQTYNQLFEENPINASGVDAKAILSARLSKSRRLENLIAQLPGEKKNGLFGNLIALSLGLTPNFKSNFDLAEDAKLQLSKDTYDDDLDNLLAQIGDQYADLFLAAKNLSDAILLSDILRVNTEITKAPLSASMIKRYDEHHQDLTLLKALVRQQLPEKYKEIFFDQSKNGYAGYIDGGASQEEFYKFIKPILEKMDGTEELLVKLNREDLLRKQRTFDNGSIPHQIHLGELHAILRRQEDFYPFLKDNREKIEKILTFRIPYYVGPLARGNSRFAWMTRKSEETITPWNFEEVVDKGASAQSFIERMTNFDKNLPNEKVLPKHSLLYEYFTVYNELTKVKYVTEGMRKPAFLSGEQKKAIVDLLFKTNRKVTVKQLKEDYFKKIECFDSVEISGVEDRFNASLGTYHDLLKIIKDKDFLDNEENEDILEDIVLTLTLFEDREMIEERLKTYAHLFDDKVMKQLKRRRYTGWGRLSRKLINGIRDKQSGKTILDFLKSDGFANRNFMQLIHDDSLTFKEDIQKAQVSGQGDSLHEHIANLAGSPAIKKGILQTVKVVDELVKVMGRHKPENIVIEMARENQTTQKGQKNSRERMKRIEEGIKELGSQILKEHPVENTQLQNEKLYLYYLQNGRDMYVDQELDINRLSDYDVDHIVPQSFLKDDSIDNKVLTRSDKARGKSDNVPSEEVVKKMKNYWRQLLNAKLITQRKFDNLTKAERGGLSELDKAGFIKRQLVETRQITKHVAQILDSRMNTKYDENDKLIREVKVITLKSKLVSDFRKDFQFYKVREINNYHHAHDAYLNAVVGTALIKKYPKLESEFVYGDYKVYDVRKMIAKSEQEIGKATAKYFFYSNIMNFFKTEITLANGEIRKRPLIETNGETGEIVWDKGRDFATVRKVLSMPQVNIVKKTEVQTGGFSKESILPKRNSDKLIARKKDWDPKKYGGFDSPTVAYSVLVVAKVEKGKSKKLKSVKELLGITIMERSSFEKNPIDFLEAKGYKEVKKDLIIKLPKYSLFELENGRKRMLASAGELQKGNELALPSKYVNFLYLASHYEKLKGSPEDNEQKQLFVEQHKHYLDEIIEQISEFSKRVILADANLDKVLSAYNKHRDKPIREQAENIIHLFTLTNLGAPAAFKYFDTTIDRKRYTSTKEVLDATLIHQSITGLYETRIDLSQLGGDGGGGGGGGGGGTLNIEDEYRLHETSKEPDVPLGSTWLSDFPQAWAETGGMGLAVRQAPLIIPLKATSTPVSIKQYPMSQEARLGIKPHIQRLLDQGILVPCQSPWNTPLLPVKKPGTNDYRPVQDLREVNKRVEDIHPTVPNPYNLLSGLPPSHQWYTVLDLKDAFFCLRLHPTSQPLFAFEWRDPEMGISGQLTWTRLPQGFKNSPTLFNEALHRDLADFRIQHPDLILLQYVDDLLLAATSEQDCQRGTRALLQTLGNLGYRASAKKAQICQKQVKYLGYLLKEGQRWLTEARKETVMGQPTPKTPRQLREFLGKAGFCRLFIPGFAEMAAPLYPLTKPGTLFNWGPDQQKAYQEIKQALLTAPALGLPDLTKPFELFVDEKQGYAKGVLTQKLGPWRRPVAYLSKKLDPVAAGWPPCLRMVAAIAVLTKDAGKLTMGQPLVILAPHAVEALVKQPPDRWLSNARMTHYQAMLLDTDRVQFGPVVALNPATLLPLPEKEAPHDCLEILAETHGTRPDLTDQPIPDADYTWYTDGSSFLQEGQRRAGAAVTTETEVIWARALPAGTSAQRAELIALTQALKMAEGKKLNVYTDSRYAFATAHVHGEIYRRRGWLTSEGREIKNKNEILALLKALFLPKRLSIIHCPGHQKGNSAEARGNRMADQAAREAAMKAVLETSTLLAGKRTADGSEFEKRTADGSEFESPKKKAKVE

SEQ ID NO: 6274 - protein, 2095 aa, synthetic construct
MPAAKRVKLDGGDKKYSIGLDIGTNSVGWAVITDEYKVPSKKFKVLGNTDRHSIKKNLIGALLFDSGETAEATRLKRTARRRYTRRKNRICYLQEIFSNEMAKVDDSFFHRLEESFLVEEDKKHERHPIFGNIVDEVAYHEKYPTIYHLRKKLVDSTDKADLRLIYLALAHMIKFRGHFLIEGDLNPDNSDVDKLFIQLVQTYNQLFEENPINASGVDAKAILSARLSKSRRLENLIAQLPGEKKNGLFGNLIALSLGLTPNFKSNFDLAEDAKLQLSKDTYDDDLDNLLAQIGDQYADLFLAAKNLSDAILLSDILRVNTEITKAPLSASMIKRYDEHHQDLTLLKALVRQQLPEKYKEIFFDQSKNGYAGYIDGGASQEEFYKFIKPILEKMDGTEELLVKLNREDLLRKQRTFDNGSIPHQIHLGELHAILRRQEDFYPFLKDNREKIEKILTFRIPYYVGPLARGNSRFAWMTRKSEETITPWNFEEVVDKGASAQSFIERMTNFDKNLPNEKVLPKHSLLYEYFTVYNELTKVKYVTEGMRKPAFLSGEQKKAIVDLLFKTNRKVTVKQLKEDYFKKIECFDSVEISGVEDRFNASLGTYHDLLKIIKDKDFLDNEENEDILEDIVLTLTLFEDREMIEERLKTYAHLFDDKVMKQLKRRRYTGWGRLSRKLINGIRDKQSGKTILDFLKSDGFANRNFMQLIHDDSLTFKEDIQKAQVSGQGDSLHEHIANLAGSPAIKKGILQTVKVVDELVKVMGRHKPENIVIEMARENQTTQKGQKNSRERMKRIEEGIKELGSQILKEHPVENTQLQNEKLYLYYLQNGRDMYVDQELDINRLSDYDVDHIVPQSFLKDDSIDNKVLTRSDKARGKSDNVPSEEVVKKMKNYWRQLLNAKLITQRKFDNLTKAERGGLSELDKAGFIKRQLVETRQITKHVAQILDSRMNTKYDENDKLIREVKVITLKSKLVSDFRKDFQFYKVREINNYHHAHDAYLNAVVGTALIKKYPKLESEFVYGDYKVYDVRKMIAKSEQEIGKATAKYFFYSNIMNFFKTEITLANGEIRKRPLIETNGETGEIVWDKGRDFATVRKVLSMPQVNIVKKTEVQTGGFSKESILPKRNSDKLIARKKDWDPKKYGGFDSPTVAYSVLVVAKVEKGKSKKLKSVKELLGITIMERSSFEKNPIDFLEAKGYKEVKKDLIIKLPKYSLFELENGRKRMLASAGELQKGNELALPSKYVNFLYLASHYEKLKGSPEDNEQKQLFVEQHKHYLDEIIEQISEFSKRVILADANLDKVLSAYNKHRDKPIREQAENIIHLFTLTNLGAPAAFKYFDTTIDRKRYTSTKEVLDATLIHQSITGLYETRIDLSQLGGDGGGGGGGGGGGGTAPLEEEYRLFLEAPIQNVTLLEQWKREIPKVWAEINPPGLASTQAPIHVQLLSTALPVRVRQYPITLEAKRSLRETIRKFRAAGILRPVHSPWNTPLLPVRKSGTSEYRMVQDLREVNKRVETIHPTVPNPYTLLSLLPPDRIWYSVLDLKDAFFCIPLAPESQLIFAFEWADAEEGESGQLTWTRLPQGFKNSPTLFDEALNRDLQGFRLDHPSVSLLQYVDDLLIAADTQAACLSATRDLLMTLAELGYRVSGKKAQLCQEEVTYLGFKIHKGSRSLSNSRTQAILQIPVPKTKRQVREFLGTIGYCRLWIPGFAELAQPLYAATRGGNDPLVWGEKEEEAFQSLKLALTQPPALALPSLDKPFQLFVEETSGAAKGVLTQALGPWKRPVAYLSKRLDPVAAGWPRCLRAIAAAALLTREASKLTFGQDIEITSSHNLESLLRSPPDKWLTNARITQYQVLLLDPPRVRFKQTAALNPATLLPETDDTLPIHHCLDTLDSLTSTRPDLTDQPLAQAEATLFTDGSSYIRDGKRYAGAAVVTLDSVIWAEPLPIGTSAQKAELIALTKALEWSKDKSVNIYTDSRYAFATLHVHGMIYRERGLLTAGGKAIKNAPEILALLTAVWLPKRVAVMHCKGHQKDDAPTSTGNRRADEVAREVAIRPLSTQATISAGKRTADGSEFEKRTADGSEFESPKKKAKVE

SEQ ID NO: 6275 - protein, 2095 aa, synthetic construct
MPAAKRVKLDGGDKKYSIGLDIGTNSVGWAVITDEYKVPSKKFKVLGNTDRHSIKKNLIGALLFDSGETAEATRLKRTARRRYTRRKNRICYLQEIFSNEMAKVDDSFFHRLEESFLVEEDKKHERHPIFGNIVDEVAYHEKYPTIYHLRKKLVDSTDKADLRLIYLALAHMIKFRGHFLIEGDLNPDNSDVDKLFIQLVQTYNQLFEENPINASGVDAKAILSARLSKSRRLENLIAQLPGEKKNGLFGNLIALSLGLTPNFKSNFDLAEDAKLQLSKDTYDDDLDNLLAQIGDQYADLFLAAKNLSDAILLSDILRVNTEITKAPLSASMIKRYDEHHQDLTLLKALVRQQLPEKYKEIFFDQSKNGYAGYIDGGASQEEFYKFIKPILEKMDGTEELLVKLNREDLLRKQRTFDNGSIPHQIHLGELHAILRRQEDFYPFLKDNREKIEKILTFRIPYYVGPLARGNSRFAWMTRKSEETITPWNFEEVVDKGASAQSFIERMTNFDKNLPNEKVLPKHSLLYEYFTVYNELTKVKYVTEGMRKPAFLSGEQKKAIVDLLFKTNRKVTVKQLKEDYFKKIECFDSVEISGVEDRFNASLGTYHDLLKIIKDKDFLDNEENEDILEDIVLTLTLFEDREMIEERLKTYAHLFDDKVMKQLKRRRYTGWGRLSRKLINGIRDKQSGKTILDFLKSDGFANRNFMQLIHDDSLTFKEDIQKAQVSGQGDSLHEHIANLAGSPAIKKGILQTVKVVDELVKVMGRHKPENIVIEMARENQTTQKGQKNSRERMKRIEEGIKELGSQILKEHPVENTQLQNEKLYLYYLQNGRDMYVDQELDINRLSDYDVDHIVPQSFLKDDSIDNKVLTRSDKARGKSDNVPSEEVVKKMKNYWRQLLNAKLITQRKFDNLTKAERGGLSELDKAGFIKRQLVETRQITKHVAQILDSRMNTKYDENDKLIREVKVITLKSKLVSDFRKDFQFYKVREINNYHHAHDAYLNAVVGTALIKKYPKLESEFVYGDYKVYDVRKMIAKSEQEIGKATAKYFFYSNIMNFFKTEITLANGEIRKRPLIETNGETGEIVWDKGRDFATVRKVLSMPQVNIVKKTEVQTGGFSKESILPKRNSDKLIARKKDWDPKKYGGFDSPTVAYSVLVVAKVEKGKSKKLKSVKELLGITIMERSSFEKNPIDFLEAKGYKEVKKDLIIKLPKYSLFELENGRKRMLASAGELQKGNELALPSKYVNFLYLASHYEKLKGSPEDNEQKQLFVEQHKHYLDEIIEQISEFSKRVILADANLDKVLSAYNKHRDKPIREQAENIIHLFTLTNLGAPAAFKYFDTTIDRKRYTSTKEVLDATLIHQSITGLYETRIDLSQLGGDGGGGGGGGGGGGTAPLEEEYRLFLEAPIQNVTLLEQWKREIPKVWAEINPPGLASTQAPIHVQLLSTALPVRVRQYPITLEAKRSLRETIRKFRAAGILRPVHSPWNTPLLPVRKSGTSEYRMVQDLREVNKRVETIHPTVPNPYTLLSLLPPDRIWYSVLDLKDAFFCIPLAPESQLIFAFEWADAEEGESGQLTWTRLPQGFKNSPTLFNEALNRDLQGFRLDHPSVSLLQYVDDLLIAADTQAACLSATRDLLMTLAELGYRVSGKKAQLCQEEVTYLGFKIHKGSRSLSNSRTQAILQIPVPKTKRQVREFLGKIGYCRLFIPGFAELAQPLYAATRPGNDPLVWGEKEEEAFQSLKLALTQPPALALPSLDKPFQLFVEETSGAAKGVLTQALGPWKRPVAYLSKRLDPVAAGWPRCLRAIAAAALLTREASKLTFGQDIEITSSHNLESLLRSPPDKWLTNARITQYQVLLLDPPRVRFKQTAALNPATLLPETDDTLPIHHCLDTLDSLTSTRPDLTDQPLAQAEATLFTDGSSYIRDGKRYAGAAVVTLDSVIWAEPLPIGTSAQKAELIALTKALEWSKDKSVNIYTDSRYAFATLHVHGMIYRERGWLTAGGKAIKNAPEILALLTAVWLPKRVAVMHCKGHQKDDAPTSTGNRRADEVAREVAIRPLSTQATISAGKRTADGSEFEKRTADGSEFESPKKKAKVE

SEQ ID NO: 6276 - protein, 2099 aa, synthetic construct
MPAAKRVKLDGGDKKYSIGLDIGTNSVGWAVITDEYKVPSKKFKVLGNTDRHSIKKNLIGALLFDSGETAEATRLKRTARRRYTRRKNRICYLQEIFSNEMAKVDDSFFHRLEESFLVEEDKKHERHPIFGNIVDEVAYHEKYPTIYHLRKKLVDSTDKADLRLIYLALAHMIKFRGHFLIEGDLNPDNSDVDKLFIQLVQTYNQLFEENPINASGVDAKAILSARLSKSRRLENLIAQLPGEKKNGLFGNLIALSLGLTPNFKSNFDLAEDAKLQLSKDTYDDDLDNLLAQIGDQYADLFLAAKNLSDAILLSDILRVNTEITKAPLSASMIKRYDEHHQDLTLLKALVRQQLPEKYKEIFFDQSKNGYAGYIDGGASQEEFYKFIKPILEKMDGTEELLVKLNREDLLRKQRTFDNGSIPHQIHLGELHAILRRQEDFYPFLKDNREKIEKILTFRIPYYVGPLARGNSRFAWMTRKSEETITPWNFEEVVDKGASAQSFIERMTNFDKNLPNEKVLPKHSLLYEYFTVYNELTKVKYVTEGMRKPAFLSGEQKKAIVDLLFKTNRKVTVKQLKEDYFKKIECFDSVEISGVEDRFNASLGTYHDLLKIIKDKDFLDNEENEDILEDIVLTLTLFEDREMIEERLKTYAHLFDDKVMKQLKRRRYTGWGRLSRKLINGIRDKQSGKTILDFLKSDGFANRNFMQLIHDDSLTFKEDIQKAQVSGQGDSLHEHIANLAGSPAIKKGILQTVKVVDELVKVMGRHKPENIVIEMARENQTTQKGQKNSRERMKRIEEGIKELGSQILKEHPVENTQLQNEKLYLYYLQNGRDMYVDQELDINRLSDYDVDHIVPQSFLKDDSIDNKVLTRSDKARGKSDNVPSEEVVKKMKNYWRQLLNAKLITQRKFDNLTKAERGGLSELDKAGFIKRQLVETRQITKHVAQILDSRMNTKYDENDKLIREVKVITLKSKLVSDFRKDFQFYKVREINNYHHAHDAYLNAVVGTALIKKYPKLESEFVYGDYKVYDVRKMIAKSEQEIGKATAKYFFYSNIMNFFKTEITLANGEIRKRPLIETNGETGEIVWDKGRDFATVRKVLSMPQVNIVKKTEVQTGGFSKESILPKRNSDKLIARKKDWDPKKYGGFDSPTVAYSVLVVAKVEKGKSKKLKSVKELLGITIMERSSFEKNPIDFLEAKGYKEVKKDLIIKLPKYSLFELENGRKRMLASAGELQKGNELALPSKYVNFLYLASHYEKLKGSPEDNEQKQLFVEQHKHYLDEIIEQISEFSKRVILADANLDKVLSAYNKHRDKPIREQAENIIHLFTLTNLGAPAAFKYFDTTIDRKRYTSTKEVLDATLIHQSITGLYETRIDLSQLGGDGGGGGGGGGGGGTVSLQDEHRLFDIPVTTSLPDVWLQDFPQAWAETGGLGRAKCQAPIIIDLKPTAVPVSIKQYPMSLEAHMGIRQHIIKFLELGVLRPCRSPWNTPLLPVKKPGTQDYRPVQDLREINKRTVDIHPTVPNPYNLLSTLKPDYSWYTVLDLKDAFFCLPLAPQSQELFAFEWKDPERGISGQLTWTRLPQGFKNSPTLFDEALHRDLTDFRTQHPEVTLLQYVDDLLLAAPTKKACTQGTRHLLQELGEKGYRASAKKAQICQTKVTYLGYILSEGKRWLTPGRIETVARIPPPRNPREVREFLGTAGFCRLWIPGFAELAAPLYALTKESTPFTWQTEHQLAFEALKKALLSAPALGLPDTSKPFTLFLDERQGIAKGVLTQKLGPWKRPVAYLSKKLDPVAAGWPPCLRIMAATAMLVKDSAKLTLGQPLTVITPHTLEAIVRQPPDRWITNARLTHYQALLLDTDRVQFGPPVTLNPATLLPVPENQPSPHDCRQVLAETHGTREDLKDQELPDADHTWYTDGSSYLDSGTRRAGAAVVDGHNTIWAQSLPPGTSAQKAELIALTKALELSKGKKANIYTDSRYAFATAHTHGSIYERRGLLTSEGKEIKNKAEIIALLKALFLPQEVAIIHCPGHQKGQDPVAVGNRQADRVARQAAMAEVLTLATEPDNTSHITAGKRTADGSEFEKRTADGSEFESPKKKAKVE

SEQ ID NO: 6277 - protein, 2091 aa, synthetic construct
MPAAKRVKLDGGDKKYSIGLDIGTNSVGWAVITDEYKVPSKKFKVLGNTDRHSIKKNLIGALLFDSGETAEATRLKRTARRRYTRRKNRICYLQEIFSNEMAKVDDSFFHRLEESFLVEEDKKHERHPIFGNIVDEVAYHEKYPTIYHLRKKLVDSTDKADLRLIYLALAHMIKFRGHFLIEGDLNPDNSDVDKLFIQLVQTYNQLFEENPINASGVDAKAILSARLSKSRRLENLIAQLPGEKKNGLFGNLIALSLGLTPNFKSNFDLAEDAKLQLSKDTYDDDLDNLLAQIGDQYADLFLAAKNLSDAILLSDILRVNTEITKAPLSASMIKRYDEHHQDLTLLKALVRQQLPEKYKEIFFDQSKNGYAGYIDGGASQEEFYKFIKPILEKMDGTEELLVKLNREDLLRKQRTFDNGSIPHQIHLGELHAILRRQEDFYPFLKDNREKIEKILTFRIPYYVGPLARGNSRFAWMTRKSEETITPWNFEEVVDKGASAQSFIERMTNFDKNLPNEKVLPKHSLLYEYFTVYNELTKVKYVTEGMRKPAFLSGEQKKAIVDLLFKTNRKVTVKQLKEDYFKKIECFDSVEISGVEDRFNASLGTYHDLLKIIKDKDFLDNEENEDILEDIVLTLTLFEDREMIEERLKTYAHLFDDKVMKQLKRRRYTGWGRLSRKLINGIRDKQSGKTILDFLKSDGFANRNFMQLIHDDSLTFKEDIQKAQVSGQGDSLHEHIANLAGSPAIKKGILQTVKVVDELVKVMGRHKPENIVIEMARENQTTQKGQKNSRERMKRIEEGIKELGSQILKEHPVENTQLQNEKLYLYYLQNGRDMYVDQELDINRLSDYDVDHIVPQSFLKDDSIDNKVLTRSDKARGKSDNVPSEEVVKKMKNYWRQLLNAKLITQRKFDNLTKAERGGLSELDKAGFIKRQLVETRQITKHVAQILDSRMNTKYDENDKLIREVKVITLKSKLVSDFRKDFQFYKVREINNYHHAHDAYLNAVVGTALIKKYPKLESEFVYGDYKVYDVRKMIAKSEQEIGKATAKYFFYSNIMNFFKTEITLANGEIRKRPLIETNGETGEIVWDKGRDFATVRKVLSMPQVNIVKKTEVQTGGFSKESILPKRNSDKLIARKKDWDPKKYGGFDSPTVAYSVLVVAKVEKGKSKKLKSVKELLGITIMERSSFEKNPIDFLEAKGYKEVKKDLIIKLPKYSLFELENGRKRMLASAGELQKGNELALPSKYVNFLYLASHYEKLKGSPEDNEQKQLFVEQHKHYLDEIIEQISEFSKRVILADANLDKVLSAYNKHRDKPIREQAENIIHLFTLTNLGAPAAFKYFDTTIDRKRYTSTKEVLDATLIHQSITGLYETRIDLSQLGGDGGGGGGGGGGGGVLNLEEEYRLHEKPVPSSIDPSWLQLFPTVWAERAGMGLANQVPPVVVELRSGASPVAVRQYPMSKEAREGIRPHIQKFLDLGVLVPCRSPWNTPLLPVKKPGTNDYRPVQDLREINKRVQDIHPTVPNPYNLLSSLPPSYTWYSVLDLKDAFFCLRLHPNSQPLFAFEWKDPEKGNTGQLTWTRLPQGFKNSPTLFNEALHRDLAPFRALNPQVVLLQYVDDLLVAAPTYEDCKKGTQKLLQELSKLGYRVSAKKAQLCQREVTYLGYLLKEGKRWLTPARKATVMKIPVPTTPRQVREFLGTAGFCRLWIPGFASLAAPLYPLTKPSIPFIWTEEHQQAFDHIKKALLSAPALALPDLTKPFTLYIDERAGVARGVLTQTLGPWRRPVAYLSKKLDPVASGWPTCLKAVAAVALLLKDADKLTLGQNVTVIASHSLESIVRQPPDRWMTNARMTHYQSLLLNERVSFAPPAVLNPATLLPVESEATPVHRCSEILAEETGTRRDLEDQPLPGVPTWYTDGSSFITEGKRRAGAPIVDGKRTVWASSLPEGTSAQKAELVALTQALRLAEGKNINIYTDSRYAFATAHIHGAIYKQRGWLTSAGKDIKNKEEILALLEAIHLPRRVAIIHCPGHQRGSNPVATGNRRADEAAKQAALSTRVLAGTTKPAGKRTADGSEFEKRTADGSEFESPKKKAKVE

SEQ ID NO: 6278 - protein, 2124 aa, synthetic construct
MPAAKRVKLDGGDKKYSIGLDIGTNSVGWAVITDEYKVPSKKFKVLGNTDRHSIKKNLIGALLFDSGETAEATRLKRTARRRYTRRKNRICYLQEIFSNEMAKVDDSFFHRLEESFLVEEDKKHERHPIFGNIVDEVAYHEKYPTIYHLRKKLVDSTDKADLRLIYLALAHMIKFRGHFLIEGDLNPDNSDVDKLFIQLVQTYNQLFEENPINASGVDAKAILSARLSKSRRLENLIAQLPGEKKNGLFGNLIALSLGLTPNFKSNFDLAEDAKLQLSKDTYDDDLDNLLAQIGDQYADLFLAAKNLSDAILLSDILRVNTEITKAPLSASMIKRYDEHHQDLTLLKALVRQQLPEKYKEIFFDQSKNGYAGYIDGGASQEEFYKFIKPILEKMDGTEELLVKLNREDLLRKQRTFDNGSIPHQIHLGELHAILRRQEDFYPFLKDNREKIEKILTFRIPYYVGPLARGNSRFAWMTRKSEETITPWNFEEVVDKGASAQSFIERMTNFDKNLPNEKVLPKHSLLYEYFTVYNELTKVKYVTEGMRKPAFLSGEQKKAIVDLLFKTNRKVTVKQLKEDYFKKIECFDSVEISGVEDRFNASLGTYHDLLKIIKDKDFLDNEENEDILEDIVLTLTLFEDREMIEERLKTYAHLFDDKVMKQLKRRRYTGWGRLSRKLINGIRDKQSGKTILDFLKSDGFANRNFMQLIHDDSLTFKEDIQKAQVSGQGDSLHEHIANLAGSPAIKKGILQTVKVVDELVKVMGRHKPENIVIEMARENQTTQKGQKNSRERMKRIEEGIKELGSQILKEHPVENTQLQNEKLYLYYLQNGRDMYVDQELDINRLSDYDVDHIVPQSFLKDDSIDNKVLTRSDKARGKSDNVPSEEVVKKMKNYWRQLLNAKLITQRKFDNLTKAERGGLSELDKAGFIKRQLVETRQITKHVAQILDSRMNTKYDENDKLIREVKVITLKSKLVSDFRKDFQFYKVREINNYHHAHDAYLNAVVGTALIKKYPKLESEFVYGDYKVYDVRKMIAKSEQEIGKATAKYFFYSNIMNFFKTEITLANGEIRKRPLIETNGETGEIVWDKGRDFATVRKVLSMPQVNIVKKTEVQTGGFSKESILPKRNSDKLIARKKDWDPKKYGGFDSPTVAYSVLVVAKVEKGKSKKLKSVKELLGITIMERSSFEKNPIDFLEAKGYKEVKKDLIIKLPKYSLFELENGRKRMLASAGELQKGNELALPSKYVNFLYLASHYEKLKGSPEDNEQKQLFVEQHKHYLDEIIEQISEFSKRVILADANLDKVLSAYNKHRDKPIREQAENIIHLFTLTNLGAPAAFKYFDTTIDRKRYTSTKEVLDATLIHQSITGLYETRIDLSQLGGDGGGGGGGGGGGGLLGRDLLTKLKAQIQFSTEGPQVTWEDRPAMCLVLNLEEEYRLHEKPVPPSIDPSWLQLFPMVWAEKAGMGLANQVPPVVVELKSDASPVAVRQYPMSKEAREGIRPHIQRFLDLGILVPCQSPWNTPLLPVKKPGTNDYRPVQDLREVNKRVQDIHPTVPNPYNLLSSLPPSHTWYSVLDLKDAFFCLKLHPNSQPLFAFEWRDPEKGNTGQLTWTRLPQGFKNSPTLFNEALHRDLASFRALNPQVVMLQYVDDLLVAAPTYRDCKEGTRRLLQELSKLGYRVSAKKAQLCREEVTYLGYLLKGGKRWLTPARKATVMKIPTPTTPRQVREFLGTAGFCRLWIPGFASLAAPLYPLTRPKVPFTWTEAHQEAFGRIKEALLSAPALALPDLTKPFALYVDEKEGVARGVLTQTLGPWRRPVAYLSKKLDPVASGWPTCLKAIAAVALLLKDADKLTLGQNVLVIAPHNLESIVRQPPDRWMTNARMTHYQSLLLNERVSFAPPAILNPATLLPVESDDTPIHICSEILAEETGTRPDLRDQPLPGVPAWYTDGSSFIMDGRRQAGAAIVDNKRTVWASNLPEGTSAQKAELIALTQALRLAEGKSINIYTDSRYAFATAHVHGAIYKQRGWLTSAGKDIKNKEEILALLEAIHLPKRVAIIHCPGHQRGTDPVATGNRKADEAAKQAAQSTRILTETTKNAGKRTADGSEFEKRTADGSEFESPKKKAKVE

SEQ ID NO: 6279 - protein, 2124 aa, synthetic construct
MPAAKRVKLDGGDKKYSIGLDIGTNSVGWAVITDEYKVPSKKFKVLGNTDRHSIKKNLIGALLFDSGETAEATRLKRTARRRYTRRKNRICYLQEIFSNEMAKVDDSFFHRLEESFLVEEDKKHERHPIFGNIVDEVAYHEKYPTIYHLRKKLVDSTDKADLRLIYLALAHMIKFRGHFLIEGDLNPDNSDVDKLFIQLVQTYNQLFEENPINASGVDAKAILSARLSKSRRLENLIAQLPGEKKNGLFGNLIALSLGLTPNFKSNFDLAEDAKLQLSKDTYDDDLDNLLAQIGDQYADLFLAAKNLSDAILLSDILRVNTEITKAPLSASMIKRYDEHHQDLTLLKALVRQQLPEKYKEIFFDQSKNGYAGYIDGGASQEEFYKFIKPILEKMDGTEELLVKLNREDLLRKQRTFDNGSIPHQIHLGELHAILRRQEDFYPFLKDNREKIEKILTFRIPYYVGPLARGNSRFAWMTRKSEETITPWNFEEVVDKGASAQSFIERMTNFDKNLPNEKVLPKHSLLYEYFTVYNELTKVKYVTEGMRKPAFLSGEQKKAIVDLLFKTNRKVTVKQLKEDYFKKIECFDSVEISGVEDRFNASLGTYHDLLKIIKDKDFLDNEENEDILEDIVLTLTLFEDREMIEERLKTYAHLFDDKVMKQLKRRRYTGWGRLSRKLINGIRDKQSGKTILDFLKSDGFANRNFMQLIHDDSLTFKEDIQKAQVSGQGDSLHEHIANLAGSPAIKKGILQTVKVVDELVKVMGRHKPENIVIEMARENQTTQKGQKNSRERMKRIEEGIKELGSQILKEHPVENTQLQNEKLYLYYLQNGRDMYVDQELDINRLSDYDVDHIVPQSFLKDDSIDNKVLTRSDKARGKSDNVPSEEVVKKMKNYWRQLLNAKLITQRKFDNLTKAERGGLSELDKAGFIKRQLVETRQITKHVAQILDSRMNTKYDENDKLIREVKVITLKSKLVSDFRKDFQFYKVREINNYHHAHDAYLNAVVGTALIKKYPKLESEFVYGDYKVYDVRKMIAKSEQEIGKATAKYFFYSNIMNFFKTEITLANGEIRKRPLIETNGETGEIVWDKGRDFATVRKVLSMPQVNIVKKTEVQTGGFSKESILPKRNSDKLIARKKDWDPKKYGGFDSPTVAYSVLVVAKVEKGKSKKLKSVKELLGITIMERSSFEKNPIDFLEAKGYKEVKKDLIIKLPKYSLFELENGRKRMLASAGELQKGNELALPSKYVNFLYLASHYEKLKGSPEDNEQKQLFVEQHKHYLDEIIEQISEFSKRVILADANLDKVLSAYNKHRDKPIREQAENIIHLFTLTNLGAPAAFKYFDTTIDRKRYTSTKEVLDATLIHQSITGLYETRIDLSQLGGDGGGGGGGGGGGGLLGRDLLTKLKAQIQFSTEGPQVTWEDRPAMCLVLNLEEEYRLHEKPVPPSIDPSWLQLFPMVWAEKAGMGLANQVPPVVVELKSDASPVAVRQYPMSKEAREGIRPHIQRFLDLGILVPCQSPWNTPLLPVKKPGTNDYRPVQDLREVNKRVQDIHPTVPNPYNLLSSLPPSHTWYSVLDLKDAFFCLKLHPNSQPLFAFEWRDPEKGNTGQLTWTRLPQGFKNSPTLFNEALHRDLASFRALNPQVVMLQYVDDLLVAAPTYRDCKEGTRRLLQELSKLGYRVSAKKAQLCREEVTYLGYLLKGGKRWLTPARKATVMKIPTPTTPRQVREFLGKAGFCRLFIPGFASLAAPLYPLTRPKVPFTWTEAHQEAFGRIKEALLSAPALALPDLTKPFALYVDEKEGVARGVLTQTLGPWRRPVAYLSKKLDPVASGWPTCLKAIAAVALLLKDADKLTLGQNVLVIAPHNLESIVRQPPDRWMTNARMTHYQSLLLNERVSFAPPAILNPATLLPVESDDTPIHICSEILAEETGTRPDLRDQPLPGVPAWYTDGSSFIMDGRRQAGAAIVDNKRTVWASNLPEGTSAQKAELIALTQALRLAEGKSINIYTDSRYAFATAHVHGAIYKQRGWLTSAGKDIKNKEEILALLEAIHLPKRVAIIHCPGHQRGTDPVATGNRKADEAAKQAAQSTRILTETTKNAGKRTADGSEFEKRTADGSEFESPKKKAKVE

SEQ ID NO: 6280 - protein, 2093 aa, synthetic construct
MPAAKRVKLDGGDKKYSIGLDIGTNSVGWAVITDEYKVPSKKFKVLGNTDRHSIKKNLIGALLFDSGETAEATRLKRTARRRYTRRKNRICYLQEIFSNEMAKVDDSFFHRLEESFLVEEDKKHERHPIFGNIVDEVAYHEKYPTIYHLRKKLVDSTDKADLRLIYLALAHMIKFRGHFLIEGDLNPDNSDVDKLFIQLVQTYNQLFEENPINASGVDAKAILSARLSKSRRLENLIAQLPGEKKNGLFGNLIALSLGLTPNFKSNFDLAEDAKLQLSKDTYDDDLDNLLAQIGDQYADLFLAAKNLSDAILLSDILRVNTEITKAPLSASMIKRYDEHHQDLTLLKALVRQQLPEKYKEIFFDQSKNGYAGYIDGGASQEEFYKFIKPILEKMDGTEELLVKLNREDLLRKQRTFDNGSIPHQIHLGELHAILRRQEDFYPFLKDNREKIEKILTFRIPYYVGPLARGNSRFAWMTRKSEETITPWNFEEVVDKGASAQSFIERMTNFDKNLPNEKVLPKHSLLYEYFTVYNELTKVKYVTEGMRKPAFLSGEQKKAIVDLLFKTNRKVTVKQLKEDYFKKIECFDSVEISGVEDRFNASLGTYHDLLKIIKDKDFLDNEENEDILEDIVLTLTLFEDREMIEERLKTYAHLFDDKVMKQLKRRRYTGWGRLSRKLINGIRDKQSGKTILDFLKSDGFANRNFMQLIHDDSLTFKEDIQKAQVSGQGDSLHEHIANLAGSPAIKKGILQTVKVVDELVKVMGRHKPENIVIEMARENQTTQKGQKNSRERMKRIEEGIKELGSQILKEHPVENTQLQNEKLYLYYLQNGRDMYVDQELDINRLSDYDVDHIVPQSFLKDDSIDNKVLTRSDKARGKSDNVPSEEVVKKMKNYWRQLLNAKLITQRKFDNLTKAERGGLSELDKAGFIKRQLVETRQITKHVAQILDSRMNTKYDENDKLIREVKVITLKSKLVSDFRKDFQFYKVREINNYHHAHDAYLNAVVGTALIKKYPKLESEFVYGDYKVYDVRKMIAKSEQEIGKATAKYFFYSNIMNFFKTEITLANGEIRKRPLIETNGETGEIVWDKGRDFATVRKVLSMPQVNIVKKTEVQTGGFSKESILPKRNSDKLIARKKDWDPKKYGGFDSPTVAYSVLVVAKVEKGKSKKLKSVKELLGITIMERSSFEKNPIDFLEAKGYKEVKKDLIIKLPKYSLFELENGRKRMLASAGELQKGNELALPSKYVNFLYLASHYEKLKGSPEDNEQKQLFVEQHKHYLDEIIEQISEFSKRVILADANLDKVLSAYNKHRDKPIREQAENIIHLFTLTNLGAPAAFKYFDTTIDRKRYTSTKEVLDATLIHQSITGLYETRIDLSQLGGDGGGGGGGGGGGGTLNLEDEYRLYETSAEPEVSPGSTWLSDFPQAWAETGGMGLAVRQAPLIIPLKATSTPVSIKQYPMSQEAKLGIKPHIQRLLDQGILVPCQSPWNTPLLPVKKPGTNDYRPVQDLREVNKRVEDIHPTVPNPYNLLSGLPPSHRWYTVLDLKDAFFCLRLHPTSQPLFAFEWRDPGMGISGQLTWTRLPQGFKNSPTLFNEALHRDLADFRIQHPDLILLQYVDDILLAATSELDCQQGTRALLLTLGNLGYRASAKKAQLCQKQVKYLGYLLKEGQRWLTEARKETVMGQPTPKTPRQLREFLGKAGFCRLFIPGFAEMAAPLYPLTKPGTLFNWGPDQQKAYQEIKQALLTAPALGLPDLTKPFELFVDEKQGYAKGVLTQKLGPWRRPVAYLSKKLDPVAAGWPPCLRMVAAIAVLRKDAGKLTMGQPLVILAPHAVEALVKQPPDRWLSNARMTHYQAMLLDTDRVQFGPVVALNPATLLPLPEEGAPHDCLEILAETHGTRPDLTDQPIPDADHTWYTDGSSFLQEGQRKAGAAVTTETEVIWARALPAGTSAQRAELIALTQALKMAEGKRLNVYTDSRYAFATAHIHGEIYRRRGWLTSEGREIKNKSEILALLKALFLPKRLSIIHCLGHQKGDSAEARGNRLADQAAREAAIKTPPDTSTLLAGKRTADGSEFEKRTADGSEFESPKKKAKVE

SEQ ID NO: 6281 - protein, 2093 aa, synthetic construct
MPAAKRVKLDGGDKKYSIGLDIGTNSVGWAVITDEYKVPSKKFKVLGNTDRHSIKKNLIGALLFDSGETAEATRLKRTARRRYTRRKNRICYLQEIFSNEMAKVDDSFFHRLEESFLVEEDKKHERHPIFGNIVDEVAYHEKYPTIYHLRKKLVDSTDKADLRLIYLALAHMIKFRGHFLIEGDLNPDNSDVDKLFIQLVQTYNQLFEENPINASGVDAKAILSARLSKSRRLENLIAQLPGEKKNGLFGNLIALSLGLTPNFKSNFDLAEDAKLQLSKDTYDDDLDNLLAQIGDQYADLFLAAKNLSDAILLSDILRVNTEITKAPLSASMIKRYDEHHQDLTLLKALVRQQLPEKYKEIFFDQSKNGYAGYIDGGASQEEFYKFIKPILEKMDGTEELLVKLNREDLLRKQRTFDNGSIPHQIHLGELHAILRRQEDFYPFLKDNREKIEKILTFRIPYYVGPLARGNSRFAWMTRKSEETITPWNFEEVVDKGASAQSFIERMTNFDKNLPNEKVLPKHSLLYEYFTVYNELTKVKYVTEGMRKPAFLSGEQKKAIVDLLFKTNRKVTVKQLKEDYFKKIECFDSVEISGVEDRFNASLGTYHDLLKIIKDKDFLDNEENEDILEDIVLTLTLFEDREMIEERLKTYAHLFDDKVMKQLKRRRYTGWGRLSRKLINGIRDKQSGKTILDFLKSDGFANRNFMQLIHDDSLTFKEDIQKAQVSGQGDSLHEHIANLAGSPAIKKGILQTVKVVDELVKVMGRHKPENIVIEMARENQTTQKGQKNSRERMKRIEEGIKELGSQILKEHPVENTQLQNEKLYLYYLQNGRDMYVDQELDINRLSDYDVDHIVPQSFLKDDSIDNKVLTRSDKARGKSDNVPSEEVVKKMKNYWRQLLNAKLITQRKFDNLTKAERGGLSELDKAGFIKRQLVETRQITKHVAQILDSRMNTKYDENDKLIREVKVITLKSKLVSDFRKDFQFYKVREINNYHHAHDAYLNAVVGTALIKKYPKLESEFVYGDYKVYDVRKMIAKSEQEIGKATAKYFFYSNIMNFFKTEITLANGEIRKRPLIETNGETGEIVWDKGRDFATVRKVLSMPQVNIVKKTEVQTGGFSKESILPKRNSDKLIARKKDWDPKKYGGFDSPTVAYSVLVVAKVEKGKSKKLKSVKELLGITIMERSSFEKNPIDFLEAKGYKEVKKDLIIKLPKYSLFELENGRKRMLASAGELQKGNELALPSKYVNFLYLASHYEKLKGSPEDNEQKQLFVEQHKHYLDEIIEQISEFSKRVILADANLDKVLSAYNKHRDKPIREQAENIIHLFTLTNLGAPAAFKYFDTTIDRKRYTSTKEVLDATLIHQSITGLYETRIDLSQLGGDGGGGGGGGGGGGLGIEDEYRLHETSTEPDVSLGSTWLSDFPQAWAETGGMGLAVRQAPLIIPLKATSTPVSIQQYPMSHEARLGIKPHIQRLLDQGILVPCQSPWNTPLLPVKKPGTNDYRPVQDLREVNKRVEDIHPTVPNPYNLLSGLPPSHQWYTVLDLKDAFFCLRLHPTSQPLFAFEWRDPGMGISGQLTWTRLPQGFKNSPTLFNEALHRDLADFRIQHPDLILLQYVDDILLAATSELDCQQGTRALLQTLGDLGYRASAKKAQICQKQVKYLGYLLREGQRWLTEARKETVMGQPVPKTPRQLREFLGKAGFCRLFIPGFAEMAAPLYPLTKPGTLFSWGPDQQKAYQEIKQALLTAPALGLPDLTKPFELFVDEKQGYAKGVLTQKLGPWRRPVAYLSKKLDPVAAGWPPCLRMVAAIAVLTKDAGKLTMGQPLVILAPHAVEALVKQPPDRWLSNARMTHYQAMLLDTDRVQFGPVVALNPATLLPLPEEGAPHDCLEILAETHGTRPDLTDQPIPDADHTWYTDGSSFLQEGQRKAGAAVTTETEVIWAGALPAGTSAQRAELIALTQALKMAEGKRLNVYTDSRYAFATAHIHGEIYRRRGWLTSEGREIKNKSEILALLKALFLPKRLSIIHCLGHQKGDSAEARGNRLADQAAREAAIKTPPDTSTLLIAGKRTADGSEFEKRTADGSEFESPKKKAKVE

SEQ ID NO: 6282 - protein, 2093 aa, synthetic construct; identical to SEQ ID NO: 6281

SEQ ID NO: 6283 - protein, 2093 aa, synthetic construct
MPAAKRVKLDGGDKKYSIGLDIGTNSVGWAVITDEYKVPSKKFKVLGNTDRHSIKKNLIGALLFDSGETAEATRLKRTARRRYTRRKNRICYLQEIFSNEMAKVDDSFFHRLEESFLVEEDKKHERHPIFGNIVDEVAYHEKYPTIYHLRKKLVDSTDKADLRLIYLALAHMIKFRGHFLIEGDLNPDNSDVDKLFIQLVQTYNQLFEENPINASGVDAKAILSARLSKSRRLENLIAQLPGEKKNGLFGNLIALSLGLTPNFKSNFDLAEDAKLQLSKDTYDDDLDNLLAQIGDQYADLFLAAKNLSDAILLSDILRVNTEITKAPLSASMIKRYDEHHQDLTLLKALVRQQLPEKYKEIFFDQSKNGYAGYIDGGASQEEFYKFIKPILEKMDGTEELLVKLNREDLLRKQRTFDNGSIPHQIHLGELHAILRRQEDFYPFLKDNREKIEKILTFRIPYYVGPLARGNSRFAWMTRKSEETITPWNFEEVVDKGASAQSFIERMTNFDKNLPNEKVLPKHSLLYEYFTVYNELTKVKYVTEGMRKPAFLSGEQKKAIVDLLFKTNRKVTVKQLKEDYFKKIECFDSVEISGVEDRFNASLGTYHDLLKIIKDKDFLDNEENEDILEDIVLTLTLFEDREMIEERLKTYAHLFDDKVMKQLKRRRYTGWGRLSRKLINGIRDKQSGKTILDFLKSDGFANRNFMQLIHDDSLTFKEDIQKAQVSGQGDSLHEHIANLAGSPAIKKGILQTVKVVDELVKVMGRHKPENIVIEMARENQTTQKGQKNSRERMKRIEEGIKELGSQILKEHPVENTQLQNEKLYLYYLQNGRDMYVDQELDINRLSDYDVDHIVPQSFLKDDSIDNKVLTRSDKARGKSDNVPSEEVVKKMKNYWRQLLNAKLITQRKFDNLTKAERGGLSELDKAGFIKRQLVETRQITKHVAQILDSRMNTKYDENDKLIREVKVITLKSKLVSDFRKDFQFYKVREINNYHHAHDAYLNAVVGTALIKKYPKLESEFVYGDYKVYDVRKMIAKSEQEIGKATAKYFFYSNIMNFFKTEITLANGEIRKRPLIETNGETGEIVWDKGRDFATVRKVLSMPQVNIVKKTEVQTGGFSKESILPKRNSDKLIARKKDWDPKKYGGFDSPTVAYSVLVVAKVEKGKSKKLKSVKELLGITIMERSSFEKNPIDFLEAKGYKEVKKDLIIKLPKYSLFELENGRKRMLASAGELQKGNELALPSKYVNFLYLASHYEKLKGSPEDNEQKQLFVEQHKHYLDEIIEQISEFSKRVILADANLDKVLSAYNKHRDKPIREQAENIIHLFTLTNLGAPAAFKYFDTTIDRKRYTSTKEVLDATLIHQSITGLYETRIDLSQLGGDGGGGGGGGGGGGTLNIEDEYRLHETSKEPDVSLGSTWLSDFPQAWAETGGMGLAVRQAPLIIPLKATSTPVSIKQYPMSQEARLGIKPHIQRLLDQGILVPCQSPWNTPLLPVKKPGTNDYRPVQDLREVNKRVEDIHPTVPNPYNLLSGLPPSHQWYTVLDLKDAFFCLRLHPTSQPLFAFEWRDPEMGISGQLTWTRLPQGFKNSPTLFNEALHRDLAGFRIQHPDLILLQYVDDLLLAATSELDCQQGTRALLQTLGDLGYRASAKKAQICQKQVKYLGYLLKEGQRWLTEARKETVMGQPIPKTPRQLREFLGTAGFCRLWIPGFAEMAAPLYPLTKPGTLFNWGPDQQKAFQEIKQALLTAPALGLPDLTKPFELFVDEKQGYAKGVLTQKLGPWRRPVAYLSKKLDPVAAGWPPCLRMVAAIAVLTKDAGKLTMGQPLVILAPHAVEALVKQPPDRWLSNARMTHYQALLLDTDRVQFGPVVALNPATLLPLPEEGLQHDCLDILAEAHGTRSDLMDQPLPDADHTWYTDGSSFLQEGQRKAGAAVTTETEVIWARALPAGTSAQRAELIALTQALKMAEGKKLNVYTDSRYAFATAHIHGEIYRRRGWLTSEGKEIKNKDEILALLKALFLPKRLSIIHCPGHQKGNSAEARGNRMADQAAREVATRETPETSTLLAGKRTADGSEFEKRTADGSEFESPKKKAKVE

SEQ ID NO: 6284 - protein, 2093 aa, synthetic construct
MPAAKRVKLDGGDKKYSIGLDIGTNSVGWAVITDEYKVPSKKFKVLGNTDRHSIKKNLIGALLFDSGETAEATRLKRTARRRYTRRKNRICYLQEIFSNEMAKVDDSFFHRLEESFLVEEDKKHERHPIFGNIVDEVAYHEKYPTIYHLRKKLVDSTDKADLRLIYLALAHMIKFRGHFLIEGDLNPDNSDVDKLFIQLVQTYNQLFEENPINASGVDAKAILSARLSKSRRLENLIAQLPGEKKNGLFGNLIALSLGLTPNFKSNFDLAEDAKLQLSKDTYDDDLDNLLAQIGDQYADLFLAAKNLSDAILLSDILRVNTEITKAPLSASMIKRYDEHHQDLTLLKALVRQQLPEKYKEIFFDQSKNGYAGYIDGGASQEEFYKFIKPILEKMDGTEELLVKLNREDLLRKQRTFDNGSIPHQIHLGELHAILRRQEDFYPFLKDNREKIEKILTFRIPYYVGPLARGNSRFAWMTRKSEETITPWNFEEVVDKGASAQSFIERMTNFDKNLPNEKVLPKHSLLYEYFTVYNELTKVKYVTEGMRKPAFLSGEQKKAIVDLLFKTNRKVTVKQLKEDYFKKIECFDSVEISGVEDRFNASLGTYHDLLKIIKDKDFLDNEENEDILEDIVLTLTLFEDREMIEERLKTYAHLFDDKVMKQLKRRRYTGWGRLSRKLINGIRDKQSGKTILDFLKSDGFANRNFMQLIHDDSLTFKEDIQKAQVSGQGDSLHEHIANLAGSPAIKKGILQTVKVVDELVKVMGRHKPENIVIEMARENQTTQKGQKNSRERMKRIEEGIKELGSQILKEHPVENTQLQNEKLYLYYLQNGRDMYVDQELDINRLSDYDVDHIVPQSFLKDDSIDNKVLTRSDKARGKSDNVPSEEVVKKMKNYWRQLLNAKLITQRKFDNLTKAERGGLSELDKAGFIKRQLVETRQITKHVAQILDSRMNTKYDENDKLIREVKVITLKSKLVSDFRKDFQFYKVREINNYHHAHDAYLNAVVGTALIKKYPKLESEFVYGDYKVYDVRKMIAKSEQEIGKATAKYFFYSNIMNFFKTEITLANGEIRKRPLIETNGETGEIVWDKGRDFATVRKVLSMPQVNIVKKTEVQTGGFSKESILPKRNSDKLIARKKDWDPKKYGGFDSPTVAYSVLVVAKVEKGKSKKLKSVKELLGITIMERSSFEKNPIDFLEAKGYKEVKKDLIIKLPKYSLFELENGRKRMLASAGELQKGNELALPSKYVNFLYLASHYEKLKGSPEDNEQKQLFVEQHKHYLDEIIEQISEFSKRVILADANLDKVLSAYNKHRDKPIREQAENIIHLFTLTNLGAPAAFKYFDTTIDRKRYTSTKEVLDATLIHQSITGLYETRIDLSQLGGDGGGGGGGGGGGGTLNIEDEHRLHETSKEPDVSLGSTWLSDFPQAWAETGGMGLAVRQAPLIIPLKATSTPVSIKQYPMSQEARLGIKPHIQRLLDQGILVPCQSPWNTPLLPVKKPGTNDYRPVQDLREVNKRVEDIHPTVPNPYNLLSGLPPSHQWYTVLDLKDAFFCLRLHPTSQPLFAFEWRDPEMGISGQLTWTRLPQGFKNSPTLFNEALHRDLADFRIQHPDLILLQYVDDLLLAATSELDCQQGTRALLQTLGNLGYRASAKKAQICQKQVKYLGYLLKEGQRWLTEARKETVMGQPTPKTPRQLREFLGKAGFCRLFIPGFAEMAAPLYPLTKPGTLFNWGPDQQKAYQEIKQALLTAPALGLPDLTKPFELFVDEKQGYAKGVLTQKLGPWRRPVAYLSKKLDPVAAGWPPCLRMVAAIAVLTKDAGKLTMGQPLVILAPHAVEALVKQPPDRWLSNARMTHYQALLLDTDRVQFGPVVALNPATLLPLPEEGLQHNCLDILAEAHGTRPDLTDQPLPDADHTWYTDGSSLLQEGQRKAGAAVTTETEVIWAKALPAGTSAQRAELIALTQALKMAEGKKLNVYTDSRYAFATAHIHGEIYRRRGWLTSEGKEIKNKDEILALLKALFLPKRLSIIHCPGHQKGHSAEARGNRMADQAARKAAITETPDTSTLLAGKRTADGSEFEKRTADGSEFESPKKKAKVE

SEQ ID NO: 6285 - protein, 2093 aa, synthetic construct; identical to SEQ ID NO: 6284

SEQ ID NO: 6286 - protein, 2091 aa, synthetic construct
MPAAKRVKLDGGDKKYSIGLDIGTNSVGWAVITDEYKVPSKKFKVLGNTDRHSIKKNLIGALLFDSGETAEATRLKRTARRRYTRRKNRICYLQEIFSNEMAKVDDSFFHRLEESFLVEEDKKHERHPIFGNIVDEVAYHEKYPTIYHLRKKLVDSTDKADLRLIYLALAHMIKFRGHFLIEGDLNPDNSDVDKLFIQLVQTYNQLFEENPINASGVDAKAILSARLSKSRRLENLIAQLPGEKKNGLFGNLIALSLGLTPNFKSNFDLAEDAKLQLSKDTYDDDLDNLLAQIGDQYADLFLAAKNLSDAILLSDILRVNTEITKAPLSASMIKRYDEHHQDLTLLKALVRQQLPEKYKEIFFDQSKNGYAGYIDGGASQEEFYKFIKPILEKMDGTEELLVKLNREDLLRKQRTFDNGSIPHQIHLGELHAILRRQEDFYPFLKDNREKIEKILTFRIPYYVGPLARGNSRFAWMTRKSEETITPWNFEEVVDKGASAQSFIERMTNFDKNLPNEKVLPKHSLLYEYFTVYNELTKVKYVTEGMRKPAFLSGEQKKAIVDLLFKTNRKVTVKQLKEDYFKKIECFDSVEISGVEDRFNASLGTYHDLLKIIKDKDFLDNEENEDILEDIVLTLTLFEDREMIEERLKTYAHLFDDKVMKQLKRRRYTGWGRLSRKLINGIRDKQSGKTILDFLKSDGFANRNFMQLIHDDSLTFKEDIQKAQVSGQGDSLHEHIANLAGSPAIKKGILQTVKVVDELVKVMGRHKPENIVIEMARENQTTQKGQKNSRERMKRIEEGIKELGSQILKEHPVENTQLQNEKLYLYYLQNGRDMYVDQELDINRLSDYDVDHIVPQSFLKDDSIDNKVLTRSDKARGKSDNVPSEEVVKKMKNYWRQLLNAKLITQRKFDNLTKAERGGLSELDKAGFIKRQLVETRQITKHVAQILDSRMNTKYDENDKLIREVKVITLKSKLVSDFRKDFQFYKVREINNYHHAHDAYLNAVVGTALIKKYPKLESEFVYGDYKVYDVRKMIAKSEQEIGKATAKYFFYSNIMNFFKTEITLANGEIRKRPLIETNGETGEIVWDKGRDFATVRKVLSMPQVNIVKKTEVQTGGFSKESILPKRNSDKLIARKKDWDPKKYGGFDSPTVAYSVLVVAKVEKGKSKKLKSVKELLGITIMERSSFEKNPIDFLEAKGYKEVKKDLIIKLPKYSLFELENGRKRMLASAGELQKGNELALPSKYVNFLYLASHYEKLKGSPEDNEQKQLFVEQHKHYLDEIIEQISEFSKRVILADANLDKVLSAYNKHRDKPIREQAENIIHLFTLTNLGAPAAFKYFDTTIDRKRYTSTKEVLDATLIHQSITGLYETRIDLSQLGGDGGGGGGGGGGGGVLNLEEEYRLHEKPVPSSIDPSWLQLFPTVWAERAGMGLANQVPPVVVELRSGASPVAVRQYPMSKEAREGIRPHIQRFLDLGVLVPCQSPWNTPLLPVKKPGTNDYRPVQDLREINKRVQDIHPTVPNPYNLLSSLPPSHTWYSVLDLKDAFFCLKLHPNSQPLFAFEWRDPEKGNTGQLTWTRLPQGFKNSPTLFNEALHRDLAPFRALNPQVVLLQYVDDLLVAAPTYRDCKEGTQKLLQELSKLGYRVSAKKAQLCQKEVTYLGYLLKEGKRWLTPARKATVMKIPPPTTPRQVREFLGKAGFCRLFIPGFASLAAPLYPLTKPSIPFIWTEEHQKAFDRIKEALLSAPALALPDLTKPFTLYVDERAGVARGVLTQTLGPWRRPVAYLSKKLDPVASGWPTCLKAVAAVALLLKDADKLTLGQNVTVIASHSLESIVRQPPDRWMTNARMTHYQSLLLNERVSFAPPAVLNPATLLPVESEATPVHRCSEILAEETGTRRDLKDQPLPGVPAWYTDGSSFIAEGKRRAGAAIVDGKRTVWASSLPEGTSAQKAELVALTQALRLAEGKDINIYTDSRYAFATAHIHGAIYKQRGWLTSAGKDIKNKEEILALLEAIHLPKRVAIIHCPGHQKGNDPVATGNRRADEAAKQAALSTRVLAETTKPAGKRTADGSEFEKRTADGSEFESPKKKAKVE

SEQ ID NO: 6287 - protein, 2093 aa, synthetic construct
MPAAKRVKLDGGDKKYSIGLDIGTNSVGWAVITDEYKVPSKKFKVLGNTDRHSIKKNLIGALLFDSGETAEATRLKRTARRRYTRRKNRICYLQEIFSNEMAKVDDSFFHRLEESFLVEEDKKHERHPIFGNIVDEVAYHEKYPTIYHLRKKLVDSTDKADLRLIYLALAHMIKFRGHFLIEGDLNPDNSDVDKLFIQLVQTYNQLFEENPINASGVDAKAILSARLSKSRRLENLIAQLPGEKKNGLFGNLIALSLGLTPNFKSNFDLAEDAKLQLSKDTYDDDLDNLLAQIGDQYADLFLAAKNLSDAILLSDILRVNTEITKAPLSASMIKRYDEHHQDLTLLKALVRQQLPEKYKEIFFDQSKNGYAGYIDGGASQEEFYKFIKPILEKMDGTEELLVKLNREDLLRKQRTFDNGSIPHQIHLGELHAILRRQEDFYPFLKDNREKIEKILTFRIPYYVGPLARGNSRFAWMTRKSEETITPWNFEEVVDKGASAQSFIERMTNFDKNLPNEKVLPKHSLLYEYFTVYNELTKVKYVTEGMRKPAFLSGEQKKAIVDLLFKTNRKVTVKQLKEDYFKKIECFDSVEISGVEDRFNASLGTYHDLLKIIKDKDFLDNEENEDILEDIVLTLTLFEDREMIEERLKTYAHLFDDKVMKQLKRRRYTGWGRLSRKLINGIRDKQSGKTILDFLKSDGFANRNFMQLIHDDSLTFKEDIQKAQVSGQGDSLHEHIANLAGSPAIKKGILQTVKVVDELVKVMGRHKPENIVIEMARENQTTQKGQKNSRERMKRIEEGIKELGSQILKEHPVENTQLQNEKLYLYYLQNGRDMYVDQELDINRLSDYDVDHIVPQSFLKDDSIDNKVLTRSDKARGKSDNVPSEEVVKKMKNYWRQLLNAKLITQRKFDNLTKAERGGLSELDKAGFIKRQLVETRQITKHVAQILDSRMNTKYDENDKLIREVKVITLKSKLVSDFRKDFQFYKVREINNYHHAHDAYLNAVVGTALIKKYPKLESEFVYGDYKVYDVRKMIAKSEQEIGKATAKYFFYSNIMNFFKTEITLANGEIRKRPLIETNGETGEIVWDKGRDFATVRKVLSMPQVNIVKKTEVQTGGFSKESILPKRNSDKLIARKKDWDPKKYGGFDSPTVAYSVLVVAKVEKGKSKKLKSVKELLGITIMERSSFEKNPIDFLEAKGYKEVKKDLIIKLPKYSLFELENGRKRMLASAGELQKGNELALPSKYVNFLYLASHYEKLKGSPEDNEQKQLFVEQHKHYLDEIIEQISEFSKRVILADANLDKVLSAYNKHRDKPIREQAENIIHLFTLTNLGAPAAFKYFDTTIDRKRYTSTKEVLDATLIHQSITGLYETRIDLSQLGGDGGGGGGGGGGGGTLNIEDEYRLHETSKEPDVPLGSTWLSDFPQAWAETGGMGLAVRQAPLIIPLKATSTPVSIKQYPMSQEARLGIKPHIQRLLDQGILVPCQSPWNTPLLPVKKPGTNDYRPVQDLREVNKRVEDIHPTVPNPYNLLSGLPPSHQWYTVLDLKDAFFCLRLHPTSQPLFAFEWRDPEMGISGQLTWTRLPQGFKNSPTLFNEALHRDLADFRIQHPDLILLQYVDDLLLAATSEQDCQRGTRALLQTLGNLGYRASAKKAQICQKQVKYLGYLLKEGQRWLTEARKETVMGQPTPKTPRQLREFLGTAGFCRLWIPGFAEMAAPLYPLTKPGTLFNWGPDQQKAYQEIKQALLTAPALGLPDLTKPFELFVDEKQGYAKGVLTQKLGPWRRPVAYLSKKLDPVAAGWPPCLRMVAAIAVLTKDAGKLTMGQPLVILAPHAVEALVKQPPDRWLSNARMTHYQAMLLDTDRVQFGPVVALNPATLLPLPEKEAPHDCLEILAETHGTRPDLTDQPIPDADYTWYTDGSSFLQEGQRRAGAAVTTETEVIWARALPAGTSAQRAELIALTQALKMAEGKKLNVYTDSRYAFATAHVHGEIYRRRGWLTSEGREIKNKNEILALLKALFLPKRLSIIHCPGHQKGNSAEARGNRMADQAAREAAMKAVLETSTLLAGKRTADGSEFEKRTADGSEFESPKKKAKVE

SEQ ID NO: 6288 - protein, 2093 aa, synthetic construct
MPAAKRVKLDGGDKKYSIGLDIGTNSVGWAVITDEYKVPSKKFKVLGNTDRHSIKKNLIGALLFDSGETAEATRLKRTARRRYTRRKNRICYLQEIFSNEMAKVDDSFFHRLEESFLVEEDKKHERHPIFGNIVDEVAYHEKYPTIYHLRKKLVDSTDKADLRLIYLALAHMIKFRGHFLIEGDLNPDNSDVDKLFIQLVQTYNQLFEENPINASGVDAKAILSARLSKSRRLENLIAQLPGEKKNGLFGNLIALSLGLTPNFKSNFDLAEDAKLQLSKDTYDDDLDNLLAQIGDQYADLFLAAKNLSDAILLSDILRVNTEITKAPLSASMIKRYDEHHQDLTLLKALVRQQLPEKYKEIFFDQSKNGYAGYIDGGASQEEFYKFIKPILEKMDGTEELLVKLNREDLLRKQRTFDNGSIPHQIHLGELHAILRRQEDFYPFLKDNREKIEKILTFRIPYYVGPLARGNSRFAWMTRKSEETITPWNFEEVVDKGASAQSFIERMTNFDKNLPNEKVLPKHSLLYEYFTVYNELTKVKYVTEGMRKPAFLSGEQKKAIVDLLFKTNRKVTVKQLKEDYFKKIECFDSVEISGVEDRFNASLGTYHDLLKIIKDKDFLDNEENEDILEDIVLTLTLFEDREMIEERLKTYAHLFDDKVMKQLKRRRYTGWGRLSRKLINGIRDKQSGKTILDFLKSDGFANRNFMQLIHDDSLTFKEDIQKAQVSGQGDSLHEHIANLAGSPAIKKGILQTVKVVDELVKVMGRHKPENIVIEMARENQTTQKGQKNSRERMKRIEEGIKELGSQILKEHPVENTQLQNEKLYLYYLQNGRDMYVDQELDINRLSDYDVDHIVPQSFLKDDSIDNKVLTRSDKARGKSDNVPSEEVVKKMKNYWRQLLNAKLITQRKFDNLTKAERGGLSELDKAGFIKRQLVETRQITKHVAQILDSRMNTKYDENDKLIREVKVITLKSKLVSDFRKDFQFYKVREINNYHHAHDAYLNAVVGTALIKKYPKLESEFVYGDYKVYDVRKMIAKSEQEIGKATAKYFFYSNIMNFFKTEITLANGEIRKRPLIETNGETGEIVWDKGRDFATVRKVLSMPQVNIVKKTEVQTGGFSKESILPKRNSDKLIARKKDWDPKKYGGFDSPTVAYSVLVVAKVEKGKSKKLKSVKELLGITIMERSSFEKNPIDFLEAKGYKEVKKDLIIKLPKYSLFELENGRKRMLASAGELQKGNELALPSKYVNFLYLASHYEKLKGSPEDNEQKQLFVEQHKHYLDEIIEQISEFSKRVILADANLDKVLSAYNKHRDKPIREQAENIIHLFTLTNLGAPAAFKYFDTTIDRKRYTSTKEVLDATLIHQSITGLYETRIDLSQLGGDGGGGGGGGGGGGTLNIEDEYRLHETSKEPDVPLGSTWLSDFPQAWAETGGMGLAVRQAPLIIPLKATSTPVSIKQYPMSQEARLGIKPHIQRLLDQGILVPCQSPWNTPLLPVKKPGTNDYRPVQDLREVNKRVEDIHPTVPNPYNLLSGLPPSHQWYTVLDLKDAFFCLRLHPTSQPLFAFEWRDPEMGISGQLTWTRLPQGFKNSPTLFNEALHRDLADFRIQHPDLILLQYVDDLLLAATSEQDCQRGTRALLQTLGNLGYRASAKKAQICQKQVKYLGYLLKEGQRWLTEARKETVMGQPTPKTPRQLREFLGKAGFCRLFIPGFAEMAAPLYPLTKPGTLFNWGPDQQKAYQEIKQALLTAPALGLPDLTKPFELFVDEKQGYAKGVLTQKLGPWRRPVAYLSKKLDPVAAGWPPCLRMVAAIAVLTKDAGKLTMGQPLVILAPHAVEALVKQPPDRWLSNARMTHYQAMLLDTDRVQFGPVVALNPATLLPLPEKEAPHDCLEILAETHGTRPDLTDQPIPDADYTWYTDGSSFLQEGQRRAGAAVTTETEVIWARALPAGTSAQRAELIALTQALKMAEGKKLNVYTDSRYAFATAHVHGEIYRRRGWLTSEGREIKNKNEILALLKALFLPKRLSIIHCPGHQKGNSAEARGNRMADQAAREAAMKAVLETSTLLAGKRTADGSEFEKRTADGSEFESPKKKAKVE

SEQ ID NO: 6289 - protein, 2090 aa, synthetic construct
MPAAKRVKLDGGDKKYSIGLDIGTNSVGWAVITDEYKVPSKKFKVLGNTDRHSIKKNLIGALLFDSGETAEATRLKRTARRRYTRRKNRICYLQEIFSNEMAKVDDSFFHRLEESFLVEEDKKHERHPIFGNIVDEVAYHEKYPTIYHLRKKLVDSTDKADLRLIYLALAHMIKFRGHFLIEGDLNPDNSDVDKLFIQLVQTYNQLFEENPINASGVDAKAILSARLSKSRRLENLIAQLPGEKKNGLFGNLIALSLGLTPNFKSNFDLAEDAKLQLSKDTYDDDLDNLLAQIGDQYADLFLAAKNLSDAILLSDILRVNTEITKAPLSASMIKRYDEHHQDLTLLKALVRQQLPEKYKEIFFDQSKNGYAGYIDGGASQEEFYKFIKPILEKMDGTEELLVKLNREDLLRKQRTFDNGSIPHQIHLGELHAILRRQEDFYPFLKDNREKIEKILTFRIPYYVGPLARGNSRFAWMTRKSEETITPWNFEEVVDKGASAQSFIERMTNFDKNLPNEKVLPKHSLLYEYFTVYNELTKVKYVTEGMRKPAFLSGEQKKAIVDLLFKTNRKVTVKQLKEDYFKKIECFDSVEISGVEDRFNASLGTYHDLLKIIKDKDFLDNEENEDILEDIVLTLTLFEDREMIEERLKTYAHLFDDKVMKQLKRRRYTGWGRLSRKLINGIRDKQSGKTILDFLKSDGFANRNFMQLIHDDSLTFKEDIQKAQVSGQGDSLHEHIANLAGSPAIKKGILQTVKVVDELVKVMGRHKPENIVIEMARENQTTQKGQKNSRERMKRIEEGIKELGSQILKEHPVENTQLQNEKLYLYYLQNGRDMYVDQELDINRLSDYDVDHIVPQSFLKDDSIDNKVLTRSDKARGKSDNVPSEEVVKKMKNYWRQLLNAKLITQRKFDNLTKAERGGLSELDKAGFIKRQLVETRQITKHVAQILDSRMNTKYDENDKLIREVKVITLKSKLVSDFRKDFQFYKVREINNYHHAHDAYLNAVVGTALIKKYPKLESEFVYGDYKVYDVRKMIAKSEQEIGKATAKYFFYSNIMNFFKTEITLANGEIRKRPLIETNGETGEIVWDKGRDFATVRKVLSMPQVNIVKKTEVQTGGFSKESILPKRNSDKLIARKKDWDPKKYGGFDSPTVAYSVLVVAKVEKGKSKKLKSVKELLGITIMERSSFEKNPIDFLEAKGYKEVKKDLIIKLPKYSLFELENGRKRMLASAGELQKGNELALPSKYVNFLYLASHYEKLKGSPEDNEQKQLFVEQHKHYLDEIIEQISEFSKRVILADANLDKVLSAYNKHRDKPIREQAENIIHLFTLTNLGAPAAFKYFDTTIDRKRYTSTKEVLDATLIHQSITGLYETRIDLSQLGGDGGGSSGGTAPLEEEYRLFLEAPIQNVTLLEQWKREIPKVWAEINPPGLASTQAPIHVQLLSTALPVRVRQYPITLEAKRSLRETIRKFRAAGILRPVHSPWNTPLLPVRKSGTSEYRMVQDLREVNKRVETIHPTVPNPYTLLSLLPPDRIWYSVLDLKDAFFCIPLAPESQLIFAFEWADAEEGESGQLTWTRLPQGFKNSPTLFNEALNRDLQGFRLDHPSVSLLQYVDDLLIAADTQAACLSATRDLLMTLAELGYRVSGKKAQLCQEEVTYLGFKIHKGSRSLSNSRTQAILQIPVPKTKRQVREFLGTIGYCRLWIPGFAELAQPLYAATRPGNDPLVWGEKEEEAFQSLKLALTQPPALALPSLDKPFQLFVEETSGAAKGVLTQALGPWKRPVAYLSKRLDPVAAGWPRCLRAIAAAALLTREASKLTFGQDIEITSSHNLESLLRSPPDKWLTNARITQYQVLLLDPPRVRFKQTAALNPATLLPETDDTLPIHHCLDTLDSLTSTRPDLTDQPLAQAEATLFTDGSSYIRDGKRYAGAAVVTLDSVIWAEPLPIGTSAQKAELIALTKALEWSKDKSVNIYTDSRYAFATLHVHGMIYRERGWLTAGGKAIKNAPEILALLTAVWLPKRVAVMHCKGHQKDDAPTSTGNRRADEVAREVAIRPLSTQATISAGKRTADGSEFEKRTADGSEFESPKKKAKVE

SEQ ID NO: 6290 - protein, 2210 aa, synthetic construct
MPAAKRVKLDGGDKKYSIGLDIGTNSVGWAVITDEYKVPSKKFKVLGNTDRHSIKKNLIGALLFDSGETAEATRLKRTARRRYTRRKNRICYLQEIFSNEMAKVDDSFFHRLEESFLVEEDKKHERHPIFGNIVDEVAYHEKYPTIYHLRKKLVDSTDKADLRLIYLALAHMIKFRGHFLIEGDLNPDNSDVDKLFIQLVQTYNQLFEENPINASGVDAKAILSARLSKSRRLENLIAQLPGEKKNGLFGNLIALSLGLTPNFKSNFDLAEDAKLQLSKDTYDDDLDNLLAQIGDQYADLFLAAKNLSDAILLSDILRVNTEITKAPLSASMIKRYDEHHQDLTLLKALVRQQLPEKYKEIFFDQSKNGYAGYIDGGASQEEFYKFIKPILEKMDGTEELLVKLNREDLLRKQRTFDNGSIPHQIHLGELHAILRRQEDFYPFLKDNREKIEKILTFRIPYYVGPLARGNSRFAWMTRKSEETITPWNFEEVVDKGASAQSFIERMTNFDKNLPNEKVLPKHSLLYEYFTVYNELTKVKYVTEGMRKPAFLSGEQKKAIVDLLFKTNRKVTVKQLKEDYFKKIECFDSVEISGVEDRFNASLGTYHDLLKIIKDKDFLDNEENEDILEDIVLTLTLFEDREMIEERLKTYAHLFDDKVMKQLKRRRYTGWGRLSRKLINGIRDKQSGKTILDFLKSDGFANRNFMQLIHDDSLTFKEDIQKAQVSGQGDSLHEHIANLAGSPAIKKGILQTVKVVDELVKVMGRHKPENIVIEMARENQTTQKGQKNSRERMKRIEEGIKELGSQILKEHPVENTQLQNEKLYLYYLQNGRDMYVDQELDINRLSDYDVDHIVPQSFLKDDSIDNKVLTRSDKARGKSDNVPSEEVVKKMKNYWRQLLNAKLITQRKFDNLTKAERGGLSELDKAGFIKRQLVETRQITKHVAQILDSRMNTKYDENDKLIREVKVITLKSKLVSDFRKDFQFYKVREINNYHHAHDAYLNAVVGTALIKKYPKLESEFVYGDYKVYDVRKMIAKSEQEIGKATAKYFFYSNIMNFFKTEITLANGEIRKRPLIETNGETGEIVWDKGRDFATVRKVLSMPQVNIVKKTEVQTGGFSKESILPKRNSDKLIARKKDWDPKKYGGFDSPTVAYSVLVVAKVEKGKSKKLKSVKELLGITIMERSSFEKNPIDFLEAKGYKEVKKDLIIKLPKYSLFELENGRKRMLASAGELQKGNELALPSKYVNFLYLASHYEKLKGSPEDNEQKQLFVEQHKHYLDEIIEQISEFSKRVILADANLDKVLSAYNKHRDKPIREQAENIIHLFTLTNLGAPAAFKYFDTTIDRKRYTSTKEVLDATLIHQSITGLYETRIDLSQLGGDGGGSSGGTLGDQGSRGSDPLPEPRVTLTVEGIPTEFLVNTGAEHSVLTKPMGKMGSKRTVVAGATGSKVYPWTTKRLLKIGQKQVTHSFLVIPECPAPLLGRDLLTKLKAQIQFSTEGPQVTWEDRPAMCLVLNLEEEYRLHEKPVPPSIDPSWLQLFPMVWAEKAGMGLANQVPPVVVELKSDASPVAVRQYPMSKEAREGIRPHIQRFLDLGILVPCQSPWNTPLLPVKKPGTNDYRPVQDLREVNKRVQDIHPTVPNPYNLLSSLPPSHTWYSVLDLKDAFFCLKLHPNSQPLFAFEWRDPEKGNTGQLTWTRLPQGFKNSPTLFNEALHRDLASFRALNPQVVMLQYVDDLLVAAPTYRDCKEGTRRLLQELSKLGYRVSAKKAQLCREEVTYLGYLLKGGKRWLTPARKATVMKIPTPTTPRQVREFLGTAGFCRLWIPGFASLAAPLYPLTRPKVPFTWTEAHQEAFGRIKEALLSAPALALPDLTKPFALYVDEKEGVARGVLTQTLGPWRRPVAYLSKKLDPVASGWPTCLKAIAAVALLLKDADKLTLGQNVLVIAPHNLESIVRQPPDRWMTNARMTHYQSLLLNERVSFAPPAILNPATLLPVESDDTPIHICSEILAEETGTRPDLRDQPLPGVPAWYTDGSSFIMDGRRQAGAAIVDNKRTVWASNLPEGTSAQKAELIALTQALRLAEGKSINIYTDSRYAFATAHVHGAIYKQRGWLTSAGKDIKNKEEILALLEAIHLPKRVAIIHCPGHQRGTDPVATGNRKADEAAKQAAQSTRILTETTKNAGKRTADGSEFEKRTADGSEFESPKKKAKVE

SEQ ID NO: 6291 - protein, 2088 aa, synthetic construct
MPAAKRVKLDGGDKKYSIGLDIGTNSVGWAVITDEYKVPSKKFKVLGNTDRHSIKKNLIGALLFDSGETAEATRLKRTARRRYTRRKNRICYLQEIFSNEMAKVDDSFFHRLEESFLVEEDKKHERHPIFGNIVDEVAYHEKYPTIYHLRKKLVDSTDKADLRLIYLALAHMIKFRGHFLIEGDLNPDNSDVDKLFIQLVQTYNQLFEENPINASGVDAKAILSARLSKSRRLENLIAQLPGEKKNGLFGNLIALSLGLTPNFKSNFDLAEDAKLQLSKDTYDDDLDNLLAQIGDQYADLFLAAKNLSDAILLSDILRVNTEITKAPLSASMIKRYDEHHQDLTLLKALVRQQLPEKYKEIFFDQSKNGYAGYIDGGASQEEFYKFIKPILEKMDGTEELLVKLNREDLLRKQRTFDNGSIPHQIHLGELHAILRRQEDFYPFLKDNREKIEKILTFRIPYYVGPLARGNSRFAWMTRKSEETITPWNFEEVVDKGASAQSFIERMTNFDKNLPNEKVLPKHSLLYEYFTVYNELTKVKYVTEGMRKPAFLSGEQKKAIVDLLFKTNRKVTVKQLKEDYFKKIECFDSVEISGVEDRFNASLGTYHDLLKIIKDKDFLDNEENEDILEDIVLTLTLFEDREMIEERLKTYAHLFDDKVMKQLKRRRYTGWGRLSRKLINGIRDKQSGKTILDFLKSDGFANRNFMQLIHDDSLTFKEDIQKAQVSGQGDSLHEHIANLAGSPAIKKGILQTVKVVDELVKVMGRHKPENIVIEMARENQTTQKGQKNSRERMKRIEEGIKELGSQILKEHPVENTQLQNEKLYLYYLQNGRDMYVDQELDINRLSDYDVDHIVPQSFLKDDSIDNKVLTRSDKARGKSDNVPSEEVVKKMKNYWRQLLNAKLITQRKFDNLTKAERGGLSELDKAGFIKRQLVETRQITKHVAQILDSRMNTKYDENDKLIREVKVITLKSKLVSDFRKDFQFYKVREINNYHHAHDAYLNAVVGTALIKKYPKLESEFVYGDYKVYDVRKMIAKSEQEIGKATAKYFFYSNIMNFFKTEITLANGEIRKRPLIETNGETGEIVWDKGRDFATVRKVLSMPQVNIVKKTEVQTGGFSKESILPKRNSDKLIARKKDWDPKKYGGFDSPTVAYSVLVVAKVEKGKSKKLKSVKELLGITIMERSSFEKNPIDFLEAKGYKEVKKDLIIKLPKYSLFELENGRKRMLASAGELQKGNELALPSKYVNFLYLASHYEKLKGSPEDNEQKQLFVEQHKHYLDEIIEQISEFSKRVILADANLDKVLSAYNKHRDKPIREQAENIIHLFTLTNLGAPAAFKYFDTTIDRKRYTSTKEVLDATLIHQSITGLYETRIDLSQLGGDGGGSSGGTLNLEDEYRLYETSAEPEVSPGSTWLSDFPQAWAETGGMGLAVRQAPLIIPLKATSTPVSIKQYPMSQEAKLGIKPHIQRLLDQGILVPCQSPWNTPLLPVKKPGTNDYRPVQDLREVNKRVEDIHPTVPNPYNLLSGLPPSHRWYTVLDLKDAFFCLRLHPTSQPLFAFEWRDPGMGISGQLTWTRLPQGFKNSPTLFNEALHRDLADFRIQHPDLILLQYVDDILLAATSELDCQQGTRALLLTLGNLGYRASAKKAQLCQKQVKYLGYLLKEGQRWLTEARKETVMGQPTPKTPRQLREFLGKAGFCRLFIPGFAEMAAPLYPLTKPGTLFNWGPDQQKAYQEIKQALLTAPALGLPDLTKPFELFVDEKQGYAKGVLTQKLGPWRRPVAYLSKKLDPVAAGWPPCLRMVAAIAVLRKDAGKLTMGQPLVILAPHAVEALVKQPPDRWLSNARMTHYQAMLLDTDRVQFGPVVALNPATLLPLPEEGAPHDCLEILAETHGTRPDLTDQPIPDADHTWYTDGSSFLQEGQRKAGAAVTTETEVIWARALPAGTSAQRAELIALTQALKMAEGKRLNVYTDSRYAFATAHIHGEIYRRRGWLTSEGREIKNKSEILALLKALFLPKRLSIIHCLGHQKGDSAEARGNRLADQAAREAAIKTPPDTSTLLAGKRTADGSEFEKRTADGSEFESPKKKAKVE

SEQ ID NO: 6292 - protein, 2088 aa, synthetic construct
MPAAKRVKLDGGDKKYSIGLDIGTNSVGWAVITDEYKVPSKKFKVLGNTDRHSIKKNLIGALLFDSGETAEATRLKRTARRRYTRRKNRICYLQEIFSNEMAKVDDSFFHRLEESFLVEEDKKHERHPIFGNIVDEVAYHEKYPTIYHLRKKLVDSTDKADLRLIYLALAHMIKFRGHFLIEGDLNPDNSDVDKLFIQLVQTYNQLFEENPINASGVDAKAILSARLSKSRRLENLIAQLPGEKKNGLFGNLIALSLGLTPNFKSNFDLAEDAKLQLSKDTYDDDLDNLLAQIGDQYADLFLAAKNLSDAILLSDILRVNTEITKAPLSASMIKRYDEHHQDLTLLKALVRQQLPEKYKEIFFDQSKNGYAGYIDGGASQEEFYKFIKPILEKMDGTEELLVKLNREDLLRKQRTFDNGSIPHQIHLGELHAILRRQEDFYPFLKDNREKIEKILTFRIPYYVGPLARGNSRFAWMTRKSEETITPWNFEEVVDKGASAQSFIERMTNFDKNLPNEKVLPKHSLLYEYFTVYNELTKVKYVTEGMRKPAFLSGEQKKAIVDLLFKTNRKVTVKQLKEDYFKKIECFDSVEISGVEDRFNASLGTYHDLLKIIKDKDFLDNEENEDILEDIVLTLTLFEDREMIEERLKTYAHLFDDKVMKQLKRRRYTGWGRLSRKLINGIRDKQSGKTILDFLKSDGFANRNFMQLIHDDSLTFKEDIQKAQVSGQGDSLHEHIANLAGSPAIKKGILQTVKVVDELVKVMGRHKPENIVIEMARENQTTQKGQKNSRERMKRIEEGIKELGSQILKEHPVENTQLQNEKLYLYYLQNGRDMYVDQELDINRLSDYDVDHIVPQSFLKDDSIDNKVLTRSDKARGKSDNVPSEEVVKKMKNYWRQLLNAKLITQRKFDNLTKAERGGLSELDKAGFIKRQLVETRQITKHVAQILDSRMNTKYDENDKLIREVKVITLKSKLVSDFRKDFQFYKVREINNYHHAHDAYLNAVVGTALIKKYPKLESEFVYGDYKVYDVRKMIAKSEQEIGKATAKYFFYSNIMNFFKTEITLANGEIRKRPLIETNGETGEIVWDKGRDFATVRKVLSMPQVNIVKKTEVQTGGFSKESILPKRNSDKLIARKKDWDPKKYGGFDSPTVAYSVLVVAKVEKGKSKKLKSVKELLGITIMERSSFEKNPIDFLEAKGYKEVKKDLIIKLPKYSLFELENGRKRMLASAGELQKGNELALPSKYVNFLYLASHYEKLKGSPEDNEQKQLFVEQHKHYLDEIIEQISEFSKRVILADANLDKVLSAYNKHRDKPIREQAENIIHLFTLTNLGAPAAFKYFDTTIDRKRYTSTKEVLDATLIHQSITGLYETRIDLSQLGGDGGGSSGGTLGIEDEYRLHETSTEPDVSLGSTWLSDFPQAWAETGGMGLAVRQAPLIIPLKATSTPVSIQQYPMSHEARLGIKPHIQRLLDQGILVPCQSPWNTPLLPVKKPGTNDYRPVQDLREVNKRVEDIHPTVPNPYNLLSGLPPSHQWYTVLDLKDAFFCLRLHPTSQPLFAFEWRDPGMGISGQLTWTRLPQGFKNSPTLFNEALHRDLADFRIQHPDLILLQYVDDILLAATSELDCQQGTRALLQTLGDLGYRASAKKAQICQKQVKYLGYLLREGQRWLTEARKETVMGQPVPKTPRQLREFLGTAGFCRLWIPGFAEMAAPLYPLTKPGTLFSWGPDQQKAYQEIKQALLTAPALGLPDLTKPFELFVDEKQGYAKGVLTQKLGPWRRPVAYLSKKLDPVAAGWPPCLRMVAAIAVLTKDAGKLTMGQPLVILAPHAVEALVKQPPDRWLSNARMTHYQAMLLDTDRVQFGPVVALNPATLLPLPEEGAPHDCLEILAETHGTRPDLTDQPIPDADHTWYTDGSSFLQEGQRKAGAAVTTETEVIWAGALPAGTSAQRAELIALTQALKMAEGKRLNVYTDSRYAFATAHIHGEIYRRRGWLTSEGREIKNKSEILALLKALFLPKRLSIIHCLGHQKGDSAEARGNRLADQAAREAAIKTPPDTSTLLAGKRTADGSEFEKRTADGSEFESPKKKAKVE

SEQ ID NO: 6293 - protein, 2080 aa, synthetic construct
MPAAKRVKLDGGDKKYSIGLDIGTNSVGWAVITDEYKVPSKKFKVLGNTDRHSIKKNLIGALLFDSGETAEATRLKRTARRRYTRRKNRICYLQEIFSNEMAKVDDSFFHRLEESFLVEEDKKHERHPIFGNIVDEVAYHEKYPTIYHLRKKLVDSTDKADLRLIYLALAHMIKFRGHFLIEGDLNPDNSDVDKLFIQLVQTYNQLFEENPINASGVDAKAILSARLSKSRRLENLIAQLPGEKKNGLFGNLIALSLGLTPNFKSNFDLAEDAKLQLSKDTYDDDLDNLLAQIGDQYADLFLAAKNLSDAILLSDILRVNTEITKAPLSASMIKRYDEHHQDLTLLKALVRQQLPEKYKEIFFDQSKNGYAGYIDGGASQEEFYKFIKPILEKMDGTEELLVKLNREDLLRKQRTFDNGSIPHQIHLGELHAILRRQEDFYPFLKDNREKIEKILTFRIPYYVGPLARGNSRFAWMTRKSEETITPWNFEEVVDKGASAQSFIERMTNFDKNLPNEKVLPKHSLLYEYFTVYNELTKVKYVTEGMRKPAFLSGEQKKAIVDLLFKTNRKVTVKQLKEDYFKKIECFDSVEISGVEDRFNASLGTYHDLLKIIKDKDFLDNEENEDILEDIVLTLTLFEDREMIEERLKTYAHLFDDKVMKQLKRRRYTGWGRLSRKLINGIRDKQSGKTILDFLKSDGFANRNFMQLIHDDSLTFKEDIQKAQVSGQGDSLHEHIANLAGSPAIKKGILQTVKVVDELVKVMGRHKPENIVIEMARENQTTQKGQKNSRERMKRIEEGIKELGSQILKEHPVENTQLQNEKLYLYYLQNGRDMYVDQELDINRLSDYDVDHIVPQSFLKDDSIDNKVLTRSDKARGKSDNVPSEEVVKKMKNYWRQLLNAKLITQRKFDNLTKAERGGLSELDKAGFIKRQLVETRQITKHVAQILDSRMNTKYDENDKLIREVKVITLKSKLVSDFRKDFQFYKVREINNYHHAHDAYLNAVVGTALIKKYPKLESEFVYGDYKVYDVRKMIAKSEQEIGKATAKYFFYSNIMNFFKTEITLANGEIRKRPLIETNGETGEIVWDKGRDFATVRKVLSMPQVNIVKKTEVQTGGFSKESILPKRNSDKLIARKKDWDPKKYGGFDSPTVAYSVLVVAKVEKGKSKKLKSVKELLGITIMERSSFEKNPIDFLEAKGYKEVKKDLIIKLPKYSLFELENGRKRMLASAGELQKGNELALPSKYVNFLYLASHYEKLKGSPEDNEQKQLFVEQHKHYLDEIIEQISEFSKRVILADANLDKVLSAYNKHRDKPIREQAENIIHLFTLTNLGAPAAFKYFDTTIDRKRYTSTKEVLDATLIHQSITGLYETRIDLSQLGGDGGGSSGGLDDEYRLYSPLVKPDQNIQFWLEQFPQAWAETAGMGLAKQVPPQVIQLKASATPVSVRQYPLSKEAQEGIRPHVQRLIQQGILVPVQSPWNTPLLPVRKPGTNDYRPVQDLREVNKRVQDIHPTVPNPYNLLCALPPQRSWYTVLDLKDAFFCLRLHPTSQPLFAFEWRDPGTGRTGQLTWTRLPQGFKNSPTIFNEALHRDLANFRIQHPQVTLLQYVDDLLLAGATKQDCLEGTKALLLELSDLGYRASAKKAQICRREVTYLGYSLRDGQRWLTEARKKTVVQIPAPTTAKQVREFLGKAGFCRLFIPGFATLAAPLYPLTKPKGEFSWAPEHQKAFDAIKKALLSAPALALPDVTKPFTLYVDERKGVARGVLTQTLGPWRRPVAYLSKKLDPVASGWPVCLKAIAAVAILVKDADKLTLGQNITVIAPHALENIVRQPPDRWMTNARMTHYQSLLLTERVTFAPPAALNPATLLPEETDEPVTHDCHQLLIEETGVRKDLTDIPLTGEVLTWFTDGSSYVVEGKRMAGAAVVDGTRTIWASSLPEGTSAQKAELMALTQALRLAEGKSINIYTDSRYAFATAHVHGAIYKQRGWLTSAGREIKNKEEILSLLEALHLPKRLAIIHCPGHQKAKDPISRGNQMADRVAKQAAQGVNLLPAGKRTADGSEFEKRTADGSEFESPKKKAKVE

SEQ ID NO: 6294 - protein, 2080 aa, synthetic construct; identical to SEQ ID NO: 6293

SEQ ID NO: 6295 - protein, 2168 aa, synthetic construct
MPAAKRVKLDGGDKKYSIGLDIGTNSVGWAVITDEYKVPSKKFKVLGNTDRHSIKKNLIGALLFDSGETAEATRLKRTARRRYTRRKNRICYLQEIFSNEMAKVDDSFFHRLEESFLVEEDKKHERHPIFGNIVDEVAYHEKYPTIYHLRKKLVDSTDKADLRLIYLALAHMIKFRGHFLIEGDLNPDNSDVDKLFIQLVQTYNQLFEENPINASGVDAKAILSARLSKSRRLENLIAQLPGEKKNGLFGNLIALSLGLTPNFKSNFDLAEDAKLQLSKDTYDDDLDNLLAQIGDQYADLFLAAKNLSDAILLSDILRVNTEITKAPLSASMIKRYDEHHQDLTLLKALVRQQLPEKYKEIFFDQSKNGYAGYIDGGASQEEFYKFIKPILEKMDGTEELLVKLNREDLLRKQRTFDNGSIPHQIHLGELHAILRRQEDFYPFLKDNREKIEKILTFRIPYYVGPLARGNSRFAWMTRKSEETITPWNFEEVVDKGASAQSFIERMTNFDKNLPNEKVLPKHSLLYEYFTVYNELTKVKYVTEGMRKPAFLSGEQKKAIVDLLFKTNRKVTVKQLKEDYFKKIECFDSVEISGVEDRFNASLGTYHDLLKIIKDKDFLDNEENEDILEDIVLTLTLFEDREMIEERLKTYAHLFDDKVMKQLKRRRYTGWGRLSRKLINGIRDKQSGKTILDFLKSDGFANRNFMQLIHDDSLTFKEDIQKAQVSGQGDSLHEHIANLAGSPAIKKGILQTVKVVDELVKVMGRHKPENIVIEMARENQTTQKGQKNSRERMKRIEEGIKELGSQILKEHPVENTQLQNEKLYLYYLQNGRDMYVDQELDINRLSDYDVDHIVPQSFLKDDSIDNKVLTRSDKARGKSDNVPSEEVVKKMKNYWRQLLNAKLITQRKFDNLTKAERGGLSELDKAGFIKRQLVETRQITKHVAQILDSRMNTKYDENDKLIREVKVITLKSKLVSDFRKDFQFYKVREINNYHHAHDAYLNAVVGTALIKKYPKLESEFVYGDYKVYDVRKMIAKSEQEIGKATAKYFFYSNIMNFFKTEITLANGEIRKRPLIETNGETGEIVWDKGRDFATVRKVLSMPQVNIVKKTEVQTGGFSKESILPKRNSDKLIARKKDWDPKKYGGFDSPTVAYSVLVVAKVEKGKSKKLKSVKELLGITIMERSSFEKNPIDFLEAKGYKEVKKDLIIKLPKYSLFELENGRKRMLASAGELQKGNELALPSKYVNFLYLASHYEKLKGSPEDNEQKQLFVEQHKHYLDEIIEQISEFSKRVILADANLDKVLSAYNKHRDKPIREQAENIIHLFTLTNLGAPAAFKYFDTTIDRKRYTSTKEVLDATLIHQSITGLYETRIDLSQLGGDGGGSSGGMDPLQLLQPLEAEIKGTKLKAHWNSGATITCVPQAFLEEEVPIKNIWIKTIHGEKEQPVYYLTFKIQGRKVEAEVISSPYDYILVSPSDIPWLMKKPLQLTTLVPLQEYEERLLKQTMLTGSYKEKLQSLFLKYDALWQHWENQVGHRRIKPHHIATGTVNPRPQKQYPINPKAKASIQTVINDLLKQGVLIQQNSIMNTPVYPVPKPDGKWRMVLDYREVNKTIPLIAAQNQHSAGILSSIFRGKYKTTLDLSNGFWAHSITPESYWLTAFTWLGQQYCWTRLPQGFLNSPALFNADVVDLLKEVPNVQVYVDDIYISHDDPREHLEQLEKVFSLLLNAGYVVSLKKSEIAQHEVEFLGFNITKEGRGLTETFKQKLLNITPPRDLKQLQSILGLLNFARNFIPNFSELVKPLYNIIATAPGKYITWTTDNSQQLQNIISMLNSAENLEERNPEVRLIMKVNTSPSAGYIRFYNEFAKRPIMYLNYVYTKAEVKFTNTEKLLTTIHKGLIKALDLGMGQEILVYSPIVSMTKIQKTPLPERKALPIRWITWMSYLEDPRIQFHYDKTLPELQQVPTVTDDIIAKIKHPSEFSMVFYTDGSAIKHPNVNKSHNAGMGIAQVQFKPEFTVINTWSIPLGDHTAQLAEVAAVEFACKKALKIDGPVLIVTDSFYVAESVNKELPYWQSNGFFNNKKKPLKHVSKWKSIADCIQLKPDIIIIHEKGHQPTASTFHTEGNNLADKLATQGSYVVNAGKRTADGSEFEKRTADGSEFESPKKKAKVE

SEQ ID NO: 6296 - protein, 2079 aa, synthetic construct
MPAAKRVKLDGGDKKYSIGLDIGTNSVGWAVITDEYKVPSKKFKVLGNTDRHSIKKNLIGALLFDSGETAEATRLKRTARRRYTRRKNRICYLQEIFSNEMAKVDDSFFHRLEESFLVEEDKKHERHPIFGNIVDEVAYHEKYPTIYHLRKKLVDSTDKADLRLIYLALAHMIKFRGHFLIEGDLNPDNSDVDKLFIQLVQTYNQLFEENPINASGVDAKAILSARLSKSRRLENLIAQLPGEKKNGLFGNLIALSLGLTPNFKSNFDLAEDAKLQLSKDTYDDDLDNLLAQIGDQYADLFLAAKNLSDAILLSDILRVNTEITKAPLSASMIKRYDEHHQDLTLLKALVRQQLPEKYKEIFFDQSKNGYAGYIDGGASQEEFYKFIKPILEKMDGTEELLVKLNREDLLRKQRTFDNGSIPHQIHLGELHAILRRQEDFYPFLKDNREKIEKILTFRIPYYVGPLARGNSRFAWMTRKSEETITPWNFEEVVDKGASAQSFIERMTNFDKNLPNEKVLPKHSLLYEYFTVYNELTKVKYVTEGMRKPAFLSGEQKKAIVDLLFKTNRKVTVKQLKEDYFKKIECFDSVEISGVEDRFNASLGTYHDLLKIIKDKDFLDNEENEDILEDIVLTLTLFEDREMIEERLKTYAHLFDDKVMKQLKRRRYTGWGRLSRKLINGIRDKQSGKTILDFLKSDGFANRNFMQLIHDDSLTFKEDIQKAQVSGQGDSLHEHIANLAGSPAIKKGILQTVKVVDELVKVMGRHKPENIVIEMARENQTTQKGQKNSRERMKRIEEGIKELGSQILKEHPVENTQLQNEKLYLYYLQNGRDMYVDQELDINRLSDYDVDHIVPQSFLKDDSIDNKVLTRSDKARGKSDNVPSEEVVKKMKNYWRQLLNAKLITQRKFDNLTKAERGGLSELDKAGFIKRQLVETRQITKHVAQILDSRMNTKYDENDKLIREVKVITLKSKLVSDFRKDFQFYKVREINNYHHAHDAYLNAVVGTALIKKYPKLESEFVYGDYKVYDVRKMIAKSEQEIGKATAKYFFYSNIMNFFKTEITLANGEIRKRPLIETNGETGEIVWDKGRDFATVRKVLSMPQVNIVKKTEVQTGGFSKESILPKRNSDKLIARKKDWDPKKYGGFDSPTVAYSVLVVAKVEKGKSKKLKSVKELLGITIMERSSFEKNPIDFLEAKGYKEVKKDLIIKLPKYSLFELENGRKRMLASAGELQKGNELALPSKYVNFLYLASHYEKLKGSPEDNEQKQLFVEQHKHYLDEIIEQISEFSKRVILADANLDKVLSAYNKHRDKPIREQAENIIHLFTLTNLGAPAAFKYFDTTIDRKRYTSTKEVLDATLIHQSITGLYETRIDLSQLGGDGGGSSGGVPWLTQQPLQLTILVPLQEYQDRILNKTALPEEQKQQLKALFTKYDNLWQHWENQVGHRKIRPHNIATGDYPPRPQKQYPINPKAKPSIQIVIDDLLKQGVLTPQNSTMNTPVYPVPKPDGRWRMVLDYREVNKTIPLTAAQNQHSAGILATIVRQKYKTTLDLANGFWAHPITPDSYWLTAFTWQGKQYCWTRLPQGFLNSPALFTADAVDLLKEVPNVQVYVDDIYLSHDNPHEHIQQLEKVFQILLQAGYVVSLKKSEIGQRTVEFLGFNITKEGRGLTDTFKTKLLNVTPPKDLKQLQSILGLLNFARNFIPNFAELVQTLYNLIASSKGKYIEWTEDNTKQLNKVIEALNTASNLEERLPDQRLVIKVNTSPSAGYVRYYNESGKKPIMYLNYVFSKAELKFSMLEKLLTTMHKALIKAMDLAMGQEILVYSPIVSMTKIQKTPLPERKALPIRWITWMTYLEDPRIQFHYDKTLPELKHIPDVYTSSIPPLKHPSQYEGVFCTDGSAIKSPDPTKSNNAGMGIVHAIYNPEYKILNQWSIPLGHHTAQMAEIAAVEFACKKALKVPGPVLVITDSFYVAESANKELPYWKSNGFVNNKKEPLKHISKWKSIAECLSIKPDITIQHEKGHQPINTSIHTEGNALADKLATQGSYVVNAGKRTADGSEFEKRTADGSEFESPKKKAKVE

SEQ ID NO: 6297 - protein, 2088 aa, synthetic construct
MPAAKRVKLDGGDKKYSIGLDIGTNSVGWAVITDEYKVPSKKFKVLGNTDRHSIKKNLIGALLFDSGETAEATRLKRTARRRYTRRKNRICYLQEIFSNEMAKVDDSFFHRLEESFLVEEDKKHERHPIFGNIVDEVAYHEKYPTIYHLRKKLVDSTDKADLRLIYLALAHMIKFRGHFLIEGDLNPDNSDVDKLFIQLVQTYNQLFEENPINASGVDAKAILSARLSKSRRLENLIAQLPGEKKNGLFGNLIALSLGLTPNFKSNFDLAEDAKLQLSKDTYDDDLDNLLAQIGDQYADLFLAAKNLSDAILLSDILRVNTEITKAPLSASMIKRYDEHHQDLTLLKALVRQQLPEKYKEIFFDQSKNGYAGYIDGGASQEEFYKFIKPILEKMDGTEELLVKLNREDLLRKQRTFDNGSIPHQIHLGELHAILRRQEDFYPFLKDNREKIEKILTFRIPYYVGPLARGNSRFAWMTRKSEETITPWNFEEVVDKGASAQSFIERMTNFDKNLPNEKVLPKHSLLYEYFTVYNELTKVKYVTEGMRKPAFLSGEQKKAIVDLLFKTNRKVTVKQLKEDYFKKIECFDSVEISGVEDRFNASLGTYHDLLKIIKDKDFLDNEENEDILEDIVLTLTLFEDREMIEERLKTYAHLFDDKVMKQLKRRRYTGWGRLSRKLINGIRDKQSGKTILDFLKSDGFANRNFMQLIHDDSLTFKEDIQKAQVSGQGDSLHEHIANLAGSPAIKKGILQTVKVVDELVKVMGRHKPENIVIEMARENQTTQKGQKNSRERMKRIEEGIKELGSQILKEHPVENTQLQNEKLYLYYLQNGRDMYVDQELDINRLSDYDVDHIVPQSFLKDDSIDNKVLTRSDKARGKSDNVPSEEVVKKMKNYWRQLLNAKLITQRKFDNLTKAERGGLSELDKAGFIKRQLVETRQITKHVAQILDSRMNTKYDENDKLIREVKVITLKSKLVSDFRKDFQFYKVREINNYHHAHDAYLNAVVGTALIKKYPKLESEFVYGDYKVYDVRKMIAKSEQEIGKATAKYFFYSNIMNFFKTEITLANGEIRKRPLIETNGETGEIVWDKGRDFATVRKVLSMPQVNIVKKTEVQTGGFSKESILPKRNSDKLIARKKDWDPKKYGGFDSPTVAYSVLVVAKVEKGKSKKLKSVKELLGITIMERSSFEKNPIDFLEAKGYKEVKKDLIIKLPKYSLFELENGRKRMLASAGELQKGNELALPSKYVNFLYLASHYEKLKGSPEDNEQKQLFVEQHKHYLDEIIEQISEFSKRVILADANLDKVLSAYNKHRDKPIREQAENIIHLFTLTNLGAPAAFKYFDTTIDRKRYTSTKEVLDATLIHQSITGLYETRIDLSQLGGDGGGSSGGTLNIEDEYRLHETSKEPDVPLGSTWLSDFPQAWAETGGMGLAVRQAPLIIPLKATSTPVSIKQYPMSQEARLGIKPHIQRLLDQGILVPCQSPWNTPLLPVKKPGTNDYRPVQDLREVNKRVEDIHPTVPNPYNLLSGLPPSHQWYTVLDLKDAFFCLRLHPTSQPLFAFEWRDPEMGISGQLTWTRLPQGFKNSPTLFNEALHRDLADFRIQHPDLILLQYVDDLLLAATSEQDCQRGTRALLQTLGNLGYRASAKKAQICQKQVKYLGYLLKEGQRWLTEARKETVMGQPTPKTPRQLREFLGTAGFCRLWIPGFAEMAAPLYPLTKPGTLFNWGPDQQKAYQEIKQALLTAPALGLPDLTKPFELFVDEKQGYAKGVLTQKLGPWRRPVAYLSKKLDPVAAGWPPCLRMVAAIAVLTKDAGKLTMGQPLVILAPHAVEALVKQPPDRWLSNARMTHYQAMLLDTDRVQFGPVVALNPATLLPLPEKEAPHDCLEILAETHGTRPDLTDQPIPDADYTWYTDGSSFLQEGQRRAGAAVTTETEVIWARALPAGTSAQRAELIALTQALKMAEGKKLNVYTDSRYAFATAHVHGEIYRRRGWLTSEGREIKNKNEILALLKALFLPKRLSIIHCPGHQKGNSAEARGNRMADQAAREAAMKAVLETSTLLAGKRTADGSEFEKRTADGSEFESPKKKAKVE

SEQ ID NO: 6298 - protein, 2089 aa, synthetic construct
MPAAKRVKLDGGDKKYSIGLDIGTNSVGWAVITDEYKVPSKKFKVLGNTDRHSIKKNLIGALLFDSGETAEATRLKRTARRRYTRRKNRICYLQEIFSNEMAKVDDSFFHRLEESFLVEEDKKHERHPIFGNIVDEVAYHEKYPTIYHLRKKLVDSTDKADLRLIYLALAHMIKFRGHFLIEGDLNPDNSDVDKLFIQLVQTYNQLFEENPINASGVDAKAILSARLSKSRRLENLIAQLPGEKKNGLFGNLIALSLGLTPNFKSNFDLAEDAKLQLSKDTYDDDLDNLLAQIGDQYADLFLAAKNLSDAILLSDILRVNTEITKAPLSASMIKRYDEHHQDLTLLKALVRQQLPEKYKEIFFDQSKNGYAGYIDGGASQEEFYKFIKPILEKMDGTEELLVKLNREDLLRKQRTFDNGSIPHQIHLGELHAILRRQEDFYPFLKDNREKIEKILTFRIPYYVGPLARGNSRFAWMTRKSEETITPWNFEEVVDKGASAQSFIERMTNFDKNLPNEKVLPKHSLLYEYFTVYNELTKVKYVTEGMRKPAFLSGEQKKAIVDLLFKTNRKVTVKQLKEDYFKKIECFDSVEISGVEDRFNASLGTYHDLLKIIKDKDFLDNEENEDILEDIVLTLTLFEDREMIEERLKTYAHLFDDKVMKQLKRRRYTGWGRLSRKLINGIRDKQSGKTILDFLKSDGFANRNFMQLIHDDSLTFKEDIQKAQVSGQGDSLHEHIANLAGSPAIKKGILQTVKVVDELVKVMGRHKPENIVIEMARENQTTQKGQKNSRERMKRIEEGIKELGSQILKEHPVENTQLQNEKLYLYYLQNGRDMYVDQELDINRLSDYDVDHIVPQSFLKDDSIDNKVLTRSDKARGKSDNVPSEEVVKKMKNYWRQLLNAKLITQRKFDNLTKAERGGLSELDKAGFIKRQLVETRQITKHVAQILDSRMNTKYDENDKLIREVKVITLKSKLVSDFRKDFQFYKVREINNYHHAHDAYLNAVVGTALIKKYPKLESEFVYGDYKVYDVRKMIAKSEQEIGKATAKYFFYSNIMNFFKTEITLANGEIRKRPLIETNGETGEIVWDKGRDFATVRKVLSMPQVNIVKKTEVQTGGFSKESILPKRNSDKLIARKKDWDPKKYGGFDSPTVAYSVLVVAKVEKGKSKKLKSVKELLGITIMERSSFEKNPIDFLEAKGYKEVKKDLIIKLPKYSLFELENGRKRMLASAGELQKGNELALPSKYVNFLYLASHYEKLKGSPEDNEQKQLFVEQHKHYLDEIIEQISEFSKRVILADANLDKVLSAYNKHRDKPIREQAENIIHLFTLTNLGAPAAFKYFDTTIDRKRYTSTKEVLDATLIHQSITGLYETRIDLSQLGGDGGGSSGSSGGVLNLEEEYRLHEKPVPSSIDPSWLQLFPTVWAERAGMGLANQVPPVVVELRSGASPVAVRQYPMSKEAREGIRPHIQKFLDLGVLVPCRSPWNTPLLPVKKPGTNDYRPVQDLREINKRVQDIHPTVPNPYNLLSSLPPSYTWYSVLDLKDAFFCLRLHPNSQPLFAFEWKDPEKGNTGQLTWTRLPQGFKNSPTLFDEALHRDLAPFRALNPQVVLLQYVDDLLVAAPTYEDCKKGTQKLLQELSKLGYRVSAKKAQLCQREVTYLGYLLKEGKRWLTPARKATVMKIPVPTTPRQVREFLGTAGFCRLWIPGFASLAAPLYPLTKESIPFIWTEEHQQAFDHIKKALLSAPALALPDLTKPFTLYIDERAGVARGVLTQTLGPWRRPVAYLSKKLDPVASGWPTCLKAVAAVALLLKDADKLTLGQNVTVIASHSLESIVRQPPDRWMTNARMTHYQSLLLNERVSFAPPAVLNPATLLPVESEATPVHRCSEILAEETGTRRDLEDQPLPGVPTWYTDGSSFITEGKRRAGAPIVDGKRTVWASSLPEGTSAQKAELVALTQALRLAEGKNINIYTDSRYAFATAHIHGAIYKQRGLLTSAGKDIKNKEEILALLEAIHLPRRVAIIHCPGHQRGSNPVATGNRRADEAAKQAALSTRVLAGTTKPAGKRTADGSEFEKRTADGSEFESPKKKAKVE

SEQ ID NO: 6299 - protein, 2213 aa, synthetic construct
MPAAKRVKLDGGDKKYSIGLDIGTNSVGWAVITDEYKVPSKKFKVLGNTDRHSIKKNLIGALLFDSGETAEATRLKRTARRRYTRRKNRICYLQEIFSNEMAKVDDSFFHRLEESFLVEEDKKHERHPIFGNIVDEVAYHEKYPTIYHLRKKLVDSTDKADLRLIYLALAHMIKFRGHFLIEGDLNPDNSDVDKLFIQLVQTYNQLFEENPINASGVDAKAILSARLSKSRRLENLIAQLPGEKKNGLFGNLIALSLGLTPNFKSNFDLAEDAKLQLSKDTYDDDLDNLLAQIGDQYADLFLAAKNLSDAILLSDILRVNTEITKAPLSASMIKRYDEHHQDLTLLKALVRQQLPEKYKEIFFDQSKNGYAGYIDGGASQEEFYKFIKPILEKMDGTEELLVKLNREDLLRKQRTFDNGSIPHQIHLGELHAILRRQEDFYPFLKDNREKIEKILTFRIPYYVGPLARGNSRFAWMTRKSEETITPWNFEEVVDKGASAQSFIERMTNFDKNLPNEKVLPKHSLLYEYFTVYNELTKVKYVTEGMRKPAFLSGEQKKAIVDLLFKTNRKVTVKQLKEDYFKKIECFDSVEISGVEDRFNASLGTYHDLLKIIKDKDFLDNEENEDILEDIVLTLTLFEDREMIEERLKTYAHLFDDKVMKQLKRRRYTGWGRLSRKLINGIRDKQSGKTILDFLKSDGFANRNFMQLIHDDSLTFKEDIQKAQVSGQGDSLHEHIANLAGSPAIKKGILQTVKVVDELVKVMGRHKPENIVIEMARENQTTQKGQKNSRERMKRIEEGIKELGSQILKEHPVENTQLQNEKLYLYYLQNGRDMYVDQELDINRLSDYDVDHIVPQSFLKDDSIDNKVLTRSDKARGKSDNVPSEEVVKKMKNYWRQLLNAKLITQRKFDNLTKAERGGLSELDKAGFIKRQLVETRQITKHVAQILDSRMNTKYDENDKLIREVKVITLKSKLVSDFRKDFQFYKVREINNYHHAHDAYLNAVVGTALIKKYPKLESEFVYGDYKVYDVRKMIAKSEQEIGKATAKYFFYSNIMNFFKTEITLANGEIRKRPLIETNGETGEIVWDKGRDFATVRKVLSMPQVNIVKKTEVQTGGFSKESILPKRNSDKLIARKKDWDPKKYGGFDSPTVAYSVLVVAKVEKGKSKKLKSVKELLGITIMERSSFEKNPIDFLEAKGYKEVKKDLIIKLPKYSLFELENGRKRMLASAGELQKGNELALPSKYVNFLYLASHYEKLKGSPEDNEQKQLFVEQHKHYLDEIIEQISEFSKRVILADANLDKVLSAYNKHRDKPIREQAENIIHLFTLTNLGAPAAFKYFDTTIDRKRYTSTKEVLDATLIHQSITGLYETRIDLSQLGGDGGGSSGSSGGTLGDQGSRGSDPLPEPRVTLTVEGIPTEFLVNTGAEHSVLTKPMGKMGSKRTVVAGATGSKVYPWTTKRLLKIGQKQVTHSFLVIPECPAPLLGRDLLTKLKAQIQFSTEGPQVTWEDRPAMCLVLNLEEEYRLHEKPVPPSIDPSWLQLFPMVWAEKAGMGLANQVPPVVVELKSDASPVAVRQYPMSKEAREGIRPHIQRFLDLGILVPCQSPWNTPLLPVKKPGTNDYRPVQDLREVNKRVQDIHPTVPNPYNLLSSLPPSHTWYSVLDLKDAFFCLKLHPNSQPLFAFEWRDPEKGNTGQLTWTRLPQGFKNSPTLFNEALHRDLASFRALNPQVVMLQYVDDLLVAAPTYRDCKEGTRRLLQELSKLGYRVSAKKAQLCREEVTYLGYLLKGGKRWLTPARKATVMKIPTPTTPRQVREFLGTAGFCRLWIPGFASLAAPLYPLTRPKVPFTWTEAHQEAFGRIKEALLSAPALALPDLTKPFALYVDEKEGVARGVLTQTLGPWRRPVAYLSKKLDPVASGWPTCLKAIAAVALLLKDADKLTLGQNVLVIAPHNLESIVRQPPDRWMTNARMTHYQSLLLNERVSFAPPAILNPATLLPVESDDTPIHICSEILAEETGTRPDLRDQPLPGVPAWYTDGSSFIMDGRRQAGAAIVDNKRTVWASNLPEGTSAQKAELIALTQALRLAEGKSINIYTDSRYAFATAHVHGAIYKQRGWLTSAGKDIKNKEEILALLEAIHLPKRVAIIHCPGHQRGTDPVATGNRKADEAAKQAAQSTRILTETTKNAGKRTADGSEFEKRTADGSEFESPKKKAKVE

SEQ ID NO: 6300 - protein, 2091 aa, synthetic construct
MPAAKRVKLDGGDKKYSIGLDIGTNSVGWAVITDEYKVPSKKFKVLGNTDRHSIKKNLIGALLFDSGETAEATRLKRTARRRYTRRKNRICYLQEIFSNEMAKVDDSFFHRLEESFLVEEDKKHERHPIFGNIVDEVAYHEKYPTIYHLRKKLVDSTDKADLRLIYLALAHMIKFRGHFLIEGDLNPDNSDVDKLFIQLVQTYNQLFEENPINASGVDAKAILSARLSKSRRLENLIAQLPGEKKNGLFGNLIALSLGLTPNFKSNFDLAEDAKLQLSKDTYDDDLDNLLAQIGDQYADLFLAAKNLSDAILLSDILRVNTEITKAPLSASMIKRYDEHHQDLTLLKALVRQQLPEKYKEIFFDQSKNGYAGYIDGGASQEEFYKFIKPILEKMDGTEELLVKLNREDLLRKQRTFDNGSIPHQIHLGELHAILRRQEDFYPFLKDNREKIEKILTFRIPYYVGPLARGNSRFAWMTRKSEETITPWNFEEVVDKGASAQSFIERMTNFDKNLPNEKVLPKHSLLYEYFTVYNELTKVKYVTEGMRKPAFLSGEQKKAIVDLLFKTNRKVTVKQLKEDYFKKIECFDSVEISGVEDRFNASLGTYHDLLKIIKDKDFLDNEENEDILEDIVLTLTLFEDREMIEERLKTYAHLFDDKVMKQLKRRRYTGWGRLSRKLINGIRDKQSGKTILDFLKSDGFANRNFMQLIHDDSLTFKEDIQKAQVSGQGDSLHEHIANLAGSPAIKKGILQTVKVVDELVKVMGRHKPENIVIEMARENQTTQKGQKNSRERMKRIEEGIKELGSQILKEHPVENTQLQNEKLYLYYLQNGRDMYVDQELDINRLSDYDVDHIVPQSFLKDDSIDNKVLTRSDKARGKSDNVPSEEVVKKMKNYWRQLLNAKLITQRKFDNLTKAERGGLSELDKAGFIKRQLVETRQITKHVAQILDSRMNTKYDENDKLIREVKVITLKSKLVSDFRKDFQFYKVREINNYHHAHDAYLNAVVGTALIKKYPKLESEFVYGDYKVYDVRKMIAKSEQEIGKATAKYFFYSNIMNFFKTEITLANGEIRKRPLIETNGETGEIVWDKGRDFATVRKVLSMPQVNIVKKTEVQTGGFSKESILPKRNSDKLIARKKDWDPKKYGGFDSPTVAYSVLVVAKVEKGKSKKLKSVKELLGITIMERSSFEKNPIDFLEAKGYKEVKKDLIIKLPKYSLFELENGRKRMLASAGELQKGNELALPSKYVNFLYLASHYEKLKGSPEDNEQKQLFVEQHKHYLDEIIEQISEFSKRVILADANLDKVLSAYNKHRDKPIREQAENIIHLFTLTNLGAPAAFKYFDTTIDRKRYTSTKEVLDATLIHQSITGLYETRIDLSQLGGDGGGSSGSSGGTLGIEDEYRLHETSTEPDVSLGSTWLSDFPQAWAETGGMGLAVRQAPLIIPLKATSTPVSIQQYPMSHEARLGIKPHIQRLLDQGILVPCQSPWNTPLLPVKKPGTNDYRPVQDLREVNKRVEDIHPTVPNPYNLLSGLPPSHQWYTVLDLKDAFFCLRLHPTSQPLFAFEWRDPGMGISGQLTWTRLPQGFKNSPTLFNEALHRDLADFRIQHPDLILLQYVDDILLAATSELDCQQGTRALLQTLGDLGYRASAKKAQICQKQVKYLGYLLREGQRWLTEARKETVMGQPVPKTPRQLREFLGTAGFCRLWIPGFAEMAAPLYPLTKPGTLFSWGPDQQKAYQEIKQALLTAPALGLPDLTKPFELFVDEKQGYAKGVLTQKLGPWRRPVAYLSKKLDPVAAGWPPCLRMVAAIAVLTKDAGKLTMGQPLVILAPHAVEALVKQPPDRWLSNARMTHYQAMLLDTDRVQFGPVVALNPATLLPLPEEGAPHDCLEILAETHGTRPDLTDQPIPDADHTWYTDGSSFLQEGQRKAGAAVTTETEVIWAGALPAGTSAQRAELIALTQALKMAEGKRLNVYTDSRYAFATAHIHGEIYRRRGWLTSEGREIKNKSEILALLKALFLPKRLSIIHCLGHQKGDSAEARGNRLADQAAREAAIKTPPDTSTLLAGKRTADGSEFEKRTADGSEFESPKKKAKVE

SEQ ID NO: 6301 - protein, 2091 aa, synthetic construct
MPAAKRVKLDGGDKKYSIGLDIGTNSVGWAVITDEYKVPSKKFKVLGNTDRHSIKKNLIGALLFDSGETAEATRLKRTARRRYTRRKNRICYLQEIFSNEMAKVDDSFFHRLEESFLVEEDKKHERHPIFGNIVDEVAYHEKYPTIYHLRKKLVDSTDKADLRLIYLALAHMIKFRGHFLIEGDLNPDNSDVDKLFIQLVQTYNQLFEENPINASGVDAKAILSARLSKSRRLENLIAQLPGEKKNGLFGNLIALSLGLTPNFKSNFDLAEDAKLQLSKDTYDDDLDNLLAQIGDQYADLFLAAKNLSDAILLSDILRVNTEITKAPLSASMIKRYDEHHQDLTLLKALVRQQLPEKYKEIFFDQSKNGYAGYIDGGASQEEFYKFIKPILEKMDGTEELLVKLNREDLLRKQRTFDNGSIPHQIHLGELHAILRRQEDFYPFLKDNREKIEKILTFRIPYYVGPLARGNSRFAWMTRKSEETITPWNFEEVVDKGASAQSFIERMTNFDKNLPNEKVLPKHSLLYEYFTVYNELTKVKYVTEGMRKPAFLSGEQKKAIVDLLFKTNRKVTVKQLKEDYFKKIECFDSVEISGVEDRFNASLGTYHDLLKIIKDKDFLDNEENEDILEDIVLTLTLFEDREMIEERLKTYAHLFDDKVMKQLKRRRYTGWGRLSRKLINGIRDKQSGKTILDFLKSDGFANRNFMQLIHDDSLTFKEDIQKAQVSGQGDSLHEHIANLAGSPAIKKGILQTVKVVDELVKVMGRHKPENIVIEMARENQTTQKGQKNSRERMKRIEEGIKELGSQILKEHPVENTQLQNEKLYLYYLQNGRDMYVDQELDINRLSDYDVDHIVPQSFLKDDSIDNKVLTRSDKARGKSDNVPSEEVVKKMKNYWRQLLNAKLITQRKFDNLTKAERGGLSELDKAGFIKRQLVETRQITKHVAQILDSRMNTKYDENDKLIREVKVITLKSKLVSDFRKDFQFYKVREINNYHHAHDAYLNAVVGTALIKKYPKLESEFVYGDYKVYDVRKMIAKSEQEIGKATAKYFFYSNIMNFFKTEITLANGEIRKRPLIETNGETGEIVWDKGRDFATVRKVLSMPQVNIVKKTEVQTGGFSKESILPKRNSDKLIARKKDWDPKKYGGFDSPTVAYSVLVVAKVEKGKSKKLKSVKELLGITIMERSSFEKNPIDFLEAKGYKEVKKDLIIKLPKYSLFELENGRKRMLASAGELQKGNELALPSKYVNFLYLASHYEKLKGSPEDNEQKQLFVEQHKHYLDEIIEQISEFSKRVILADANLDKVLSAYNKHRDKPIREQAENIIHLFTLTNLGAPAAFKYFDTTIDRKRYTSTKEVLDATLIHQSITGLYETRIDLSQLGGDGGGSSGSSGGTLNIEDEHRLHETSKEPDVSLGSTWLSDFPQAWAETGGMGLAVRQAPLIIPLKATSTPVSIKQYPMSQEARLGIKPHIQRLLDQGILVPCQSPWNTPLLPVKKPGTNDYRPVQDLREVNKRVEDIHPTVPNPYNLLSGLPPSHQWYTVLDLKDAFFCLRLHPTSQPLFAFEWRDPEMGISGQLTWTRLPQGFKNSPTLFDEALHRDLADFRIQHPDLILLQYVDDLLLAATSELDCQQGTRALLQTLGNLGYRASAKKAQICQKQVKYLGYLLKEGQRWLTEARKETVMGQPTPKTPRQLREFLGTAGFCRLWIPGFAEMAAPLYPLTKTGTLFNWGPDQQKAYQEIKQALLTAPALGLPDLTKPFELFVDEKQGYAKGVLTQKLGPWRRPVAYLSKKLDPVAAGWPPCLRMVAAIAVLTKDAGKLTMGQPLVILAPHAVEALVKQPPDRWLSNARMTHYQALLLDTDRVQFGPVVALNPATLLPLPEEGLQHNCLDILAEAHGTRPDLTDQPLPDADHTWYTDGSSLLQEGQRKAGAAVTTETEVIWAKALPAGTSAQRAELIALTQALKMAEGKKLNVYTDSRYAFATAHIHGEIYRRRGLLTSEGKEIKNKDEILALLKALFLPKRLSIIHCPGHQKGHSAEARGNRMADQAARKAAITETPDTSTLLAGKRTADGSEFEKRTADGSEFESPKKKAKVE

SEQ ID NO: 6302 - protein, 2089 aa, synthetic construct
MPAAKRVKLDGGDKKYSIGLDIGTNSVGWAVITDEYKVPSKKFKVLGNTDRHSIKKNLIGALLFDSGETAEATRLKRTARRRYTRRKNRICYLQEIFSNEMAKVDDSFFHRLEESFLVEEDKKHERHPIFGNIVDEVAYHEKYPTIYHLRKKLVDSTDKADLRLIYLALAHMIKFRGHFLIEGDLNPDNSDVDKLFIQLVQTYNQLFEENPINASGVDAKAILSARLSKSRRLENLIAQLPGEKKNGLFGNLIALSLGLTPNFKSNFDLAEDAKLQLSKDTYDDDLDNLLAQIGDQYADLFLAAKNLSDAILLSDILRVNTEITKAPLSASMIKRYDEHHQDLTLLKALVRQQLPEKYKEIFFDQSKNGYAGYIDGGASQEEFYKFIKPILEKMDGTEELLVKLNREDLLRKQRTFDNGSIPHQIHLGELHAILRRQEDFYPFLKDNREKIEKILTFRIPYYVGPLARGNSRFAWMTRKSEETITPWNFEEVVDKGASAQSFIERMTNFDKNLPNEKVLPKHSLLYEYFTVYNELTKVKYVTEGMRKPAFLSGEQKKAIVDLLFKTNRKVTVKQLKEDYFKKIECFDSVEISGVEDRFNASLGTYHDLLKIIKDKDFLDNEENEDILEDIVLTLTLFEDREMIEERLKTYAHLFDDKVMKQLKRRRYTGWGRLSRKLINGIRDKQSGKTILDFLKSDGFANRNFMQLIHDDSLTFKEDIQKAQVSGQGDSLHEHIANLAGSPAIKKGILQTVKVVDELVKVMGRHKPENIVIEMARENQTTQKGQKNSRERMKRIEEGIKELGSQILKEHPVENTQLQNEKLYLYYLQNGRDMYVDQELDINRLSDYDVDHIVPQSFLKDDSIDNKVLTRSDKARGKSDNVPSEEVVKKMKNYWRQLLNAKLITQRKFDNLTKAERGGLSELDKAGFIKRQLVETRQITKHVAQILDSRMNTKYDENDKLIREVKVITLKSKLVSDFRKDFQFYKVREINNYHHAHDAYLNAVVGTALIKKYPKLESEFVYGDYKVYDVRKMIAKSEQEIGKATAKYFFYSNIMNFFKTEITLANGEIRKRPLIETNGETGEIVWDKGRDFATVRKVLSMPQVNIVKKTEVQTGGFSKESILPKRNSDKLIARKKDWDPKKYGGFDSPTVAYSVLVVAKVEKGKSKKLKSVKELLGITIMERSSFEKNPIDFLEAKGYKEVKKDLIIKLPKYSLFELENGRKRMLASAGELQKGNELALPSKYVNFLYLASHYEKLKGSPEDNEQKQLFVEQHKHYLDEIIEQISEFSKRVILADANLDKVLSAYNKHRDKPIREQAENIIHLFTLTNLGAPAAFKYFDTTIDRKRYTSTKEVLDATLIHQSITGLYETRIDLSQLGGDGGGSSGSSGGVLNLEEEYRLHEKPVPSSIDPSWLQLFPTVWAERAGMGLANQVPPVVVELRSGASPVAVRQYPMSKEAREGIRPHIQRFLDLGVLVPCQSPWNTPLLPVKKPGTNDYRPVQDLREINKRVQDIHPTVPNPYNLLSSLPPSHTWYSVLDLKDAFFCLKLHPNSQPLFAFEWRDPEKGNTGQLTWTRLPQGFKNSPTLFNEALHRDLAPFRALNPQVVLLQYVDDLLVAAPTYRDCKEGTQKLLQELSKLGYRVSAKKAQLCQKEVTYLGYLLKEGKRWLTPARKATVMKIPPPTTPRQVREFLGTAGFCRLWIPGFASLAAPLYPLTKPSIPFIWTEEHQKAFDRIKEALLSAPALALPDLTKPFTLYVDERAGVARGVLTQTLGPWRRPVAYLSKKLDPVASGWPTCLKAVAAVALLLKDADKLTLGQNVTVIASHSLESIVRQPPDRWMTNARMTHYQSLLLNERVSFAPPAVLNPATLLPVESEATPVHRCSEILAEETGTRRDLKDQPLPGVPAWYTDGSSFIAEGKRRAGAAIVDGKRTVWASSLPEGTSAQKAELVALTQALRLAEGKDINIYTDSRYAFATAHIHGAIYKQRGWLTSAGKDIKNKEEILALLEAIHLPKRVAIIHCPGHQKGNDPVATGNRRADEAAKQAALSTRVLAETTKPAGKRTADGSEFEKRTADGSEFESPKKKAKVE

SEQ ID NO: 6303 - protein, 2091 aa, synthetic construct
MPAAKRVKLDGGDKKYSIGLDIGTNSVGWAVITDEYKVPSKKFKVLGNTDRHSIKKNLIGALLFDSGETAEATRLKRTARRRYTRRKNRICYLQEIFSNEMAKVDDSFFHRLEESFLVEEDKKHERHPIFGNIVDEVAYHEKYPTIYHLRKKLVDSTDKADLRLIYLALAHMIKFRGHFLIEGDLNPDNSDVDKLFIQLVQTYNQLFEENPINASGVDAKAILSARLSKSRRLENLIAQLPGEKKNGLFGNLIALSLGLTPNFKSNFDLAEDAKLQLSKDTYDDDLDNLLAQIGDQYADLFLAAKNLSDAILLSDILRVNTEITKAPLSASMIKRYDEHHQDLTLLKALVRQQLPEKYKEIFFDQSKNGYAGYIDGGASQEEFYKFIKPILEKMDGTEELLVKLNREDLLRKQRTFDNGSIPHQIHLGELHAILRRQEDFYPFLKDNREKIEKILTFRIPYYVGPLARGNSRFAWMTRKSEETITPWNFEEVVDKGASAQSFIERMTNFDKNLPNEKVLPKHSLLYEYFTVYNELTKVKYVTEGMRKPAFLSGEQKKAIVDLLFKTNRKVTVKQLKEDYFKKIECFDSVEISGVEDRFNASLGTYHDLLKIIKDKDFLDNEENEDILEDIVLTLTLFEDREMIEERLKTYAHLFDDKVMKQLKRRRYTGWGRLSRKLINGIRDKQSGKTILDFLKSDGFANRNFMQLIHDDSLTFKEDIQKAQVSGQGDSLHEHIANLAGSPAIKKGILQTVKVVDELVKVMGRHKPENIVIEMARENQTTQKGQKNSRERMKRIEEGIKELGSQILKEHPVENTQLQNEKLYLYYLQNGRDMYVDQELDINRLSDYDVDHIVPQSFLKDDSIDNKVLTRSDKARGKSDNVPSEEVVKKMKNYWRQLLNAKLITQRKFDNLTKAERGGLSELDKAGFIKRQLVETRQITKHVAQILDSRMNTKYDENDKLIREVKVITLKSKLVSDFRKDFQFYKVREINNYHHAHDAYLNAVVGTALIKKYPKLESEFVYGDYKVYDVRKMIAKSEQEIGKATAKYFFYSNIMNFFKTEITLANGEIRKRPLIETNGETGEIVWDKGRDFATVRKVLSMPQVNIVKKTEVQTGGFSKESILPKRNSDKLIARKKDWDPKKYGGFDSPTVAYSVLVVAKVEKGKSKKLKSVKELLGITIMERSSFEKNPIDFLEAKGYKEVKKDLIIKLPKYSLFELENGRKRMLASAGELQKGNELALPSKYVNFLYLASHYEKLKGSPEDNEQKQLFVEQHKHYLDEIIEQISEFSKRVILADANLDKVLSAYNKHRDKPIREQAENIIHLFTLTNLGAPAAFKYFDTTIDRKRYTSTKEVLDATLIHQSITGLYETRIDLSQLGGDGGGSSGSSGGTLNIEDEYRLHETSKEPDVPLGSTWLSDFPQAWAETGGMGLAVRQAPLIIPLKATSTPVSIKQYPMSQEARLGIKPHIQRLLDQGILVPCQSPWNTPLLPVKKPGTNDYRPVQDLREVNKRVEDIHPTVPNPYNLLSGLPPSHQWYTVLDLKDAFFCLRLHPTSQPLFAFEWRDPEMGISGQLTWTRLPQGFKNSPTLFNEALHRDLADFRIQHPDLILLQYVDDLLLAATSEQDCQRGTRALLQTLGNLGYRASAKKAQICQKQVKYLGYLLKEGQRWLTEARKETVMGQPTPKTPRQLREFLGTAGFCRLWIPGFAEMAAPLYPLTKPGTLFNWGPDQQKAYQEIKQALLTAPALGLPDLTKPFELFVDEKQGYAKGVLTQKLGPWRRPVAYLSKKLDPVAAGWPPCLRMVAAIAVLTKDAGKLTMGQPLVILAPHAVEALVKQPPDRWLSNARMTHYQAMLLDTDRVQFGPVVALNPATLLPLPEKEAPHDCLEILAETHGTRPDLTDQPIPDADYTWYTDGSSFLQEGQRRAGAAVTTETEVIWARALPAGTSAQRAELIALTQALKMAEGKKLNVYTDSRYAFATAHVHGEIYRRRGWLTSEGREIKNKNEILALLKALFLPKRLSIIHCPGHQKGNSAEARGNRMADQAAREAAMKAVLETSTLLAGKRTADGSEFEKRTADGSEFESPKKKAKVE

SEQ ID NO: 6304 - protein, 2096 aa, synthetic construct
MPAAKRVKLDGGDKKYSIGLDIGTNSVGWAVITDEYKVPSKKFKVLGNTDRHSIKKNLIGALLFDSGETAEATRLKRTARRRYTRRKNRICYLQEIFSNEMAKVDDSFFHRLEESFLVEEDKKHERHPIFGNIVDEVAYHEKYPTIYHLRKKLVDSTDKADLRLIYLALAHMIKFRGHFLIEGDLNPDNSDVDKLFIQLVQTYNQLFEENPINASGVDAKAILSARLSKSRRLENLIAQLPGEKKNGLFGNLIALSLGLTPNFKSNFDLAEDAKLQLSKDTYDDDLDNLLAQIGDQYADLFLAAKNLSDAILLSDILRVNTEITKAPLSASMIKRYDEHHQDLTLLKALVRQQLPEKYKEIFFDQSKNGYAGYIDGGASQEEFYKFIKPILEKMDGTEELLVKLNREDLLRKQRTFDNGSIPHQIHLGELHAILRRQEDFYPFLKDNREKIEKILTFRIPYYVGPLARGNSRFAWMTRKSEETITPWNFEEVVDKGASAQSFIERMTNFDKNLPNEKVLPKHSLLYEYFTVYNELTKVKYVTEGMRKPAFLSGEQKKAIVDLLFKTNRKVTVKQLKEDYFKKIECFDSVEISGVEDRFNASLGTYHDLLKIIKDKDFLDNEENEDILEDIVLTLTLFEDREMIEERLKTYAHLFDDKVMKQLKRRRYTGWGRLSRKLINGIRDKQSGKTILDFLKSDGFANRNFMQLIHDDSLTFKEDIQKAQVSGQGDSLHEHIANLAGSPAIKKGILQTVKVVDELVKVMGRHKPENIVIEMARENQTTQKGQKNSRERMKRIEEGIKELGSQILKEHPVENTQLQNEKLYLYYLQNGRDMYVDQELDINRLSDYDVDHIVPQSFLKDDSIDNKVLTRSDKARGKSDNVPSEEVVKKMKNYWRQLLNAKLITQRKFDNLTKAERGGLSELDKAGFIKRQLVETRQITKHVAQILDSRMNTKYDENDKLIREVKVITLKSKLVSDFRKDFQFYKVREINNYHHAHDAYLNAVVGTALIKKYPKLESEFVYGDYKVYDVRKMIAKSEQEIGKATAKYFFYSNIMNFFKTEITLANGEIRKRPLIETNGETGEIVWDKGRDFATVRKVLSMPQVNIVKKTEVQTGGFSKESILPKRNSDKLIARKKDWDPKKYGGFDSPTVAYSVLVVAKVEKGKSKKLKSVKELLGITIMERSSFEKNPIDFLEAKGYKEVKKDLIIKLPKYSLFELENGRKRMLASAGELQKGNELALPSKYVNFLYLASHYEKLKGSPEDNEQKQLFVEQHKHYLDEIIEQISEFSKRVILADANLDKVLSAYNKHRDKPIREQAENIIHLFTLTNLGAPAAFKYFDTTIDRKRYTSTKEVLDATLIHQSITGLYETRIDLSQLGGDGGGSSGSSGSSGGTAPLEEEYRLFLEAPIQNVTLLEQWKREIPKVWAEINPPGLASTQAPIHVQLLSTALPVRVRQYPITLEAKRSLRETIRKFRAAGILRPVHSPWNTPLLPVRKSGTSEYRMVQDLREVNKRVETIHPTVPNPYTLLSLLPPDRIWYSVLDLKDAFFCIPLAPESQLIFAFEWADAEEGESGQLTWTRLPQGFKNSPTLFNEALNRDLQGFRLDHPSVSLLQYVDDLLIAADTQAACLSATRDLLMTLAELGYRVSGKKAQLCQEEVTYLGFKIHKGSRSLSNSRTQAILQIPVPKTKRQVREFLGTIGYCRLWIPGFAELAQPLYAATRPGNDPLVWGEKEEEAFQSLKLALTQPPALALPSLDKPFQLFVEETSGAAKGVLTQALGPWKRPVAYLSKRLDPVAAGWPRCLRAIAAAALLTREASKLTFGQDIEITSSHNLESLLRSPPDKWLTNARITQYQVLLLDPPRVRFKQTAALNPATLLPETDDTLPIHHCLDTLDSLTSTRPDLTDQPLAQAEATLFTDGSSYIRDGKRYAGAAVVTLDSVIWAEPLPIGTSAQKAELIALTKALEWSKDKSVNIYTDSRYAFATLHVHGMIYRERGWLTAGGKAIKNAPEILALLTAVWLPKRVAVMHCKGHQKDDAPTSTGNRRADEVAREVAIRPLSTQATISAGKRTADGSEFEKRTADGSEFESPKKKAKVE

SEQ ID NO: 6305 - protein, 2096 aa, synthetic construct
MPAAKRVKLDGGDKKYSIGLDIGTNSVGWAVITDEYKVPSKKFKVLGNTDRHSIKKNLIGALLFDSGETAEATRLKRTARRRYTRRKNRICYLQEIFSNEMAKVDDSFFHRLEESFLVEEDKKHERHPIFGNIVDEVAYHEKYPTIYHLRKKLVDSTDKADLRLIYLALAHMIKFRGHFLIEGDLNPDNSDVDKLFIQLVQTYNQLFEENPINASGVDAKAILSARLSKSRRLENLIAQLPGEKKNGLFGNLIALSLGLTPNFKSNFDLAEDAKLQLSKDTYDDDLDNLLAQIGDQYADLFLAAKNLSDAILLSDILRVNTEITKAPLSASMIKRYDEHHQDLTLLKALVRQQLPEKYKEIFFDQSKNGYAGYIDGGASQEEFYKFIKPILEKMDGTEELLVKLNREDLLRKQRTFDNGSIPHQIHLGELHAILRRQEDFYPFLKDNREKIEKILTFRIPYYVGPLARGNSRFAWMTRKSEETITPWNFEEVVDKGASAQSFIERMTNFDKNLPNEKVLPKHSLLYEYFTVYNELTKVKYVTEGMRKPAFLSGEQKKAIVDLLFKTNRKVTVKQLKEDYFKKIECFDSVEISGVEDRFNASLGTYHDLLKIIKDKDFLDNEENEDILEDIVLTLTLFEDREMIEERLKTYAHLFDDKVMKQLKRRRYTGWGRLSRKLINGIRDKQSGKTILDFLKSDGFANRNFMQLIHDDSLTFKEDIQKAQVSGQGDSLHEHIANLAGSPAIKKGILQTVKVVDELVKVMGRHKPENIVIEMARENQTTQKGQKNSRERMKRIEEGIKELGSQILKEHPVENTQLQNEKLYLYYLQNGRDMYVDQELDINRLSDYDVDHIVPQSFLKDDSIDNKVLTRSDKARGKSDNVPSEEVVKKMKNYWRQLLNAKLITQRKFDNLTKAERGGLSELDKAGFIKRQLVETRQITKHVAQILDSRMNTKYDENDKLIREVKVITLKSKLVSDFRKDFQFYKVREINNYHHAHDAYLNAVVGTALIKKYPKLESEFVYGDYKVYDVRKMIAKSEQEIGKATAKYFFYSNIMNFFKTEITLANGEIRKRPLIETNGETGEIVWDKGRDFATVRKVLSMPQVNIVKKTEVQTGGFSKESILPKRNSDKLIARKKDWDPKKYGGFDSPTVAYSVLVVAKVEKGKSKKLKSVKELLGITIMERSSFEKNPIDFLEAKGYKEVKKDLIIKLPKYSLFELENGRKRMLASAGELQKGNELALPSKYVNFLYLASHYEKLKGSPEDNEQKQLFVEQHKHYLDEIIEQISEFSKRVILADANLDKVLSAYNKHRDKPIREQAENIIHLFTLTNLGAPAAFKYFDTTIDRKRYTSTKEVLDATLIHQSITGLYETRIDLSQLGGDGGGSSGSSGSSGGTAPLEEEYRLFLEAPIQNVTLLEQWKREIPKVWAEINPPGLASTQAPIHVQLLSTALPVRVRQYPITLEAKRSLRETIRKFRAAGILRPVHSPWNTPLLPVRKSGTSEYRMVQDLREVNKRVETIHPTVPNPYTLLSLLPPDRIWYSVLDLKDAFFCIPLAPESQLIFAFEWADAEEGESGQLTWTRLPQGFKNSPTLFNEALNRDLQGFRLDHPSVSLLQYVDDLLIAADTQAACLSATRDLLMTLAELGYRVSGKKAQLCQEEVTYLGFKIHKGSRSLSNSRTQAILQIPVPKTKRQVREFLGKIGYCRLFIPGFAELAQPLYAATRPGNDPLVWGEKEEEAFQSLKLALTQPPALALPSLDKPFQLFVEETSGAAKGVLTQALGPWKRPVAYLSKRLDPVAAGWPRCLRAIAAAALLTREASKLTFGQDIEITSSHNLESLLRSPPDKWLTNARITQYQVLLLDPPRVRFKQTAALNPATLLPETDDTLPIHHCLDTLDSLTSTRPDLTDQPLAQAEATLFTDGSSYIRDGKRYAGAAVVTLDSVIWAEPLPIGTSAQKAELIALTKALEWSKDKSVNIYTDSRYAFATLHVHGMIYRERGWLTAGGKAIKNAPEILALLTAVWLPKRVAVMHCKGHQKDDAPTSTGNRRADEVAREVAIRPLSTQATISAGKRTADGSEFEKRTADGSEFESPKKKAKVE

SEQ ID NO: 6306 - protein, 2085 aa, synthetic construct
MPAAKRVKLDGGDKKYSIGLDIGTNSVGWAVITDEYKVPSKKFKVLGNTDRHSIKKNLIGALLFDSGETAEATRLKRTARRRYTRRKNRICYLQEIFSNEMAKVDDSFFHRLEESFLVEEDKKHERHPIFGNIVDEVAYHEKYPTIYHLRKKLVDSTDKADLRLIYLALAHMIKFRGHFLIEGDLNPDNSDVDKLFIQLVQTYNQLFEENPINASGVDAKAILSARLSKSRRLENLIAQLPGEKKNGLFGNLIALSLGLTPNFKSNFDLAEDAKLQLSKDTYDDDLDNLLAQIGDQYADLFLAAKNLSDAILLSDILRVNTEITKAPLSASMIKRYDEHHQDLTLLKALVRQQLPEKYKEIFFDQSKNGYAGYIDGGASQEEFYKFIKPILEKMDGTEELLVKLNREDLLRKQRTFDNGSIPHQIHLGELHAILRRQEDFYPFLKDNREKIEKILTFRIPYYVGPLARGNSRFAWMTRKSEETITPWNFEEVVDKGASAQSFIERMTNFDKNLPNEKVLPKHSLLYEYFTVYNELTKVKYVTEGMRKPAFLSGEQKKAIVDLLFKTNRKVTVKQLKEDYFKKIECFDSVEISGVEDRFNASLGTYHDLLKIIKDKDFLDNEENEDILEDIVLTLTLFEDREMIEERLKTYAHLFDDKVMKQLKRRRYTGWGRLSRKLINGIRDKQSGKTILDFLKSDGFANRNFMQLIHDDSLTFKEDIQKAQVSGQGDSLHEHIANLAGSPAIKKGILQTVKVVDELVKVMGRHKPENIVIEMARENQTTQKGQKNSRERMKRIEEGIKELGSQILKEHPVENTQLQNEKLYLYYLQNGRDMYVDQELDINRLSDYDVDHIVPQSFLKDDSIDNKVLTRSDKARGKSDNVPSEEVVKKMKNYWRQLLNAKLITQRKFDNLTKAERGGLSELDKAGFIKRQLVETRQITKHVAQILDSRMNTKYDENDKLIREVKVITLKSKLVSDFRKDFQFYKVREINNYHHAHDAYLNAVVGTALIKKYPKLESEFVYGDYKVYDVRKMIAKSEQEIGKATAKYFFYSNIMNFFKTEITLANGEIRKRPLIETNGETGEIVWDKGRDFATVRKVLSMPQVNIVKKTEVQTGGFSKESILPKRNSDKLIARKKDWDPKKYGGFDSPTVAYSVLVVAKVEKGKSKKLKSVKELLGITIMERSSFEKNPIDFLEAKGYKEVKKDLIIKLPKYSLFELENGRKRMLASAGELQKGNELALPSKYVNFLYLASHYEKLKGSPEDNEQKQLFVEQHKHYLDEIIEQISEFSKRVILADANLDKVLSAYNKHRDKPIREQAENIIHLFTLTNLGAPAAFKYFDTTIDRKRYTSTKEVLDATLIHQSITGLYETRIDLSQLGGDGGGSSGSSGSSGGVPWILKKPLELTIKLDLEEQQGTLLNNSILSKKGKEELKQLFEKYSALWQSWENQVGHRRIRPHKIATGTVKPTPQKQYHINPKAKPDIQIVINDLLKQGVLIQKESTMNTPVYPVPKPNGRWRMVLDYRAVNKVTPLIAVQNQHSYGILGSLFKGRYKTTIDLSNGFWAHPIVPEDYWITAFTWQGKQYCWTVLPQGFLNSPGLFTGDVVDLLQGIPNVEVYVDDVYISHDSEKEHLEYLDILFNRLKEAGYIISLKKSNIANSIVDFLGFQITNEGRGLTDTFKEKLENITAPTTLKQLQSILGLLNFARNFIPDFTELIAPLYALIPKSTKNYVPWQIEHSTTLETLITKLNGAEYLQGRKGDKTLIMKVNASYTTGYIRYYNEGEKKPISYVSIVFSKTELKFTELEKLLTTVHKGLLKALDLSMGQNIHVYSPIVSMQNIQKTPQTAKKALASRWLSWLSYLEDPRIRFFYDPQMPALKDLPAVDTGKDNKKHPSNFQHIFYTDGSAITSPTKEGHLNAGMGIVYFINKDGNLQKQQEWSISLGNHTAQFAEIAAFEFALKKCLPLGGNILVVTDSNYVAKAYNEELDVWASNGFVNNRKKPLKHISKWKSVADLKRLRPDVVVTHEPGHQKLDSSPHAYGNNLADQLATQASFKVHAGKRTADGSEFEKRTADGSEFESPKKKAKVE

SEQ ID NO: 6307 - protein, 2125 aa, synthetic construct
MPAAKRVKLDGGDKKYSIGLDIGTNSVGWAVITDEYKVPSKKFKVLGNTDRHSIKKNLIGALLFDSGETAEATRLKRTARRRYTRRKNRICYLQEIFSNEMAKVDDSFFHRLEESFLVEEDKKHERHPIFGNIVDEVAYHEKYPTIYHLRKKLVDSTDKADLRLIYLALAHMIKFRGHFLIEGDLNPDNSDVDKLFIQLVQTYNQLFEENPINASGVDAKAILSARLSKSRRLENLIAQLPGEKKNGLFGNLIALSLGLTPNFKSNFDLAEDAKLQLSKDTYDDDLDNLLAQIGDQYADLFLAAKNLSDAILLSDILRVNTEITKAPLSASMIKRYDEHHQDLTLLKALVRQQLPEKYKEIFFDQSKNGYAGYIDGGASQEEFYKFIKPILEKMDGTEELLVKLNREDLLRKQRTFDNGSIPHQIHLGELHAILRRQEDFYPFLKDNREKIEKILTFRIPYYVGPLARGNSRFAWMTRKSEETITPWNFEEVVDKGASAQSFIERMTNFDKNLPNEKVLPKHSLLYEYFTVYNELTKVKYVTEGMRKPAFLSGEQKKAIVDLLFKTNRKVTVKQLKEDYFKKIECFDSVEISGVEDRFNASLGTYHDLLKIIKDKDFLDNEENEDILEDIVLTLTLFEDREMIEERLKTYAHLFDDKVMKQLKRRRYTGWGRLSRKLINGIRDKQSGKTILDFLKSDGFANRNFMQLIHDDSLTFKEDIQKAQVSGQGDSLHEHIANLAGSPAIKKGILQTVKVVDELVKVMGRHKPENIVIEMARENQTTQKGQKNSRERMKRIEEGIKELGSQILKEHPVENTQLQNEKLYLYYLQNGRDMYVDQELDINRLSDYDVDHIVPQSFLKDDSIDNKVLTRSDKARGKSDNVPSEEVVKKMKNYWRQLLNAKLITQRKFDNLTKAERGGLSELDKAGFIKRQLVETRQITKHVAQILDSRMNTKYDENDKLIREVKVITLKSKLVSDFRKDFQFYKVREINNYHHAHDAYLNAVVGTALIKKYPKLESEFVYGDYKVYDVRKMIAKSEQEIGKATAKYFFYSNIMNFFKTEITLANGEIRKRPLIETNGETGEIVWDKGRDFATVRKVLSMPQVNIVKKTEVQTGGFSKESILPKRNSDKLIARKKDWDPKKYGGFDSPTVAYSVLVVAKVEKGKSKKLKSVKELLGITIMERSSFEKNPIDFLEAKGYKEVKKDLIIKLPKYSLFELENGRKRMLASAGELQKGNELALPSKYVNFLYLASHYEKLKGSPEDNEQKQLFVEQHKHYLDEIIEQISEFSKRVILADANLDKVLSAYNKHRDKPIREQAENIIHLFTLTNLGAPAAFKYFDTTIDRKRYTSTKEVLDATLIHQSITGLYETRIDLSQLGGDGGGSSGSSGSSGGLLGRDLLTKLKAQIQFSTEGPQVTWEDRPAMCLVLNLEEEYRLHEKPVPPSIDPSWLQLFPMVWAEKAGMGLANQVPPVVVELKSDASPVAVRQYPMSKEAREGIRPHIQRFLDLGILVPCQSPWNTPLLPVKKPGTNDYRPVQDLREVNKRVQDIHPTVPNPYNLLSSLPPSHTWYSVLDLKDAFFCLKLHPNSQPLFAFEWRDPEKGNTGQLTWTRLPQGFKNSPTLFNEALHRDLASFRALNPQVVMLQYVDDLLVAAPTYRDCKEGTRRLLQELSKLGYRVSAKKAQLCREEVTYLGYLLKGGKRWLTPARKATVMKIPTPTTPRQVREFLGTAGFCRLWIPGFASLAAPLYPLTRPKVPFTWTEAHQEAFGRIKEALLSAPALALPDLTKPFALYVDEKEGVARGVLTQTLGPWRRPVAYLSKKLDPVASGWPTCLKAIAAVALLLKDADKLTLGQNVLVIAPHNLESIVRQPPDRWMTNARMTHYQSLLLNERVSFAPPAILNPATLLPVESDDTPIHICSEILAEETGTRPDLRDQPLPGVPAWYTDGSSFIMDGRRQAGAAIVDNKRTVWASNLPEGTSAQKAELIALTQALRLAEGKSINIYTDSRYAFATAHVHGAIYKQRGWLTSAGKDIKNKEEILALLEAIHLPKRVAIIHCPGHQRGTDPVATGNRKADEAAKQAAQSTRILTETTKNAGKRTADGSEFEKRTADGSEFESPKKKAKVE

SEQ ID NO: 6308 - protein, 2094 aa, synthetic construct
MPAAKRVKLDGGDKKYSIGLDIGTNSVGWAVITDEYKVPSKKFKVLGNTDRHSIKKNLIGALLFDSGETAEATRLKRTARRRYTRRKNRICYLQEIFSNEMAKVDDSFFHRLEESFLVEEDKKHERHPIFGNIVDEVAYHEKYPTIYHLRKKLVDSTDKADLRLIYLALAHMIKFRGHFLIEGDLNPDNSDVDKLFIQLVQTYNQLFEENPINASGVDAKAILSARLSKSRRLENLIAQLPGEKKNGLFGNLIALSLGLTPNFKSNFDLAEDAKLQLSKDTYDDDLDNLLAQIGDQYADLFLAAKNLSDAILLSDILRVNTEITKAPLSASMIKRYDEHHQDLTLLKALVRQQLPEKYKEIFFDQSKNGYAGYIDGGASQEEFYKFIKPILEKMDGTEELLVKLNREDLLRKQRTFDNGSIPHQIHLGELHAILRRQEDFYPFLKDNREKIEKILTFRIPYYVGPLARGNSRFAWMTRKSEETITPWNFEEVVDKGASAQSFIERMTNFDKNLPNEKVLPKHSLLYEYFTVYNELTKVKYVTEGMRKPAFLSGEQKKAIVDLLFKTNRKVTVKQLKEDYFKKIECFDSVEISGVEDRFNASLGTYHDLLKIIKDKDFLDNEENEDILEDIVLTLTLFEDREMIEERLKTYAHLFDDKVMKQLKRRRYTGWGRLSRKLINGIRDKQSGKTILDFLKSDGFANRNFMQLIHDDSLTFKEDIQKAQVSGQGDSLHEHIANLAGSPAIKKGILQTVKVVDELVKVMGRHKPENIVIEMARENQTTQKGQKNSRERMKRIEEGIKELGSQILKEHPVENTQLQNEKLYLYYLQNGRDMYVDQELDINRLSDYDVDHIVPQSFLKDDSIDNKVLTRSDKARGKSDNVPSEEVVKKMKNYWRQLLNAKLITQRKFDNLTKAERGGLSELDKAGFIKRQLVETRQITKHVAQILDSRMNTKYDENDKLIREVKVITLKSKLVSDFRKDFQFYKVREINNYHHAHDAYLNAVVGTALIKKYPKLESEFVYGDYKVYDVRKMIAKSEQEIGKATAKYFFYSNIMNFFKTEITLANGEIRKRPLIETNGETGEIVWDKGRDFATVRKVLSMPQVNIVKKTEVQTGGFSKESILPKRNSDKLIARKKDWDPKKYGGFDSPTVAYSVLVVAKVEKGKSKKLKSVKELLGITIMERSSFEKNPIDFLEAKGYKEVKKDLIIKLPKYSLFELENGRKRMLASAGELQKGNELALPSKYVNFLYLASHYEKLKGSPEDNEQKQLFVEQHKHYLDEIIEQISEFSKRVILADANLDKVLSAYNKHRDKPIREQAENIIHLFTLTNLGAPAAFKYFDTTIDRKRYTSTKEVLDATLIHQSITGLYETRIDLSQLGGDGGGSSGSSGSSGGTLNLEDEYRLYETSAEPEVSPGSTWLSDFPQAWAETGGMGLAVRQAPLIIPLKATSTPVSIKQYPMSQEAKLGIKPHIQRLLDQGILVPCQSPWNTPLLPVKKPGTNDYRPVQDLREVNKRVEDIHPTVPNPYNLLSGLPPSHRWYTVLDLKDAFFCLRLHPTSQPLFAFEWRDPGMGISGQLTWTRLPQGFKNSPTLFNEALHRDLADFRIQHPDLILLQYVDDILLAATSELDCQQGTRALLLTLGNLGYRASAKKAQLCQKQVKYLGYLLKEGQRWLTEARKETVMGQPTPKTPRQLREFLGTAGFCRLWIPGFAEMAAPLYPLTKPGTLFNWGPDQQKAYQEIKQALLTAPALGLPDLTKPFELFVDEKQGYAKGVLTQKLGPWRRPVAYLSKKLDPVAAGWPPCLRMVAAIAVLRKDAGKLTMGQPLVILAPHAVEALVKQPPDRWLSNARMTHYQAMLLDTDRVQFGPVVALNPATLLPLPEEGAPHDCLEILAETHGTRPDLTDQPIPDADHTWYTDGSSFLQEGQRKAGAAVTTETEVIWARALPAGTSAQRAELIALTQALKMAEGKRLNVYTDSRYAFATAHIHGEIYRRRGWLTSEGREIKNKSEILALLKALFLPKRLSIIHCLGHQKGDSAEARGNRLADQAAREAAIKTPPDTSTLLAGKRTADGSEFEKRTADGSEFESPKKKAKVE

SEQ ID NO: 6309 - protein, 2094 aa, synthetic construct
MPAAKRVKLDGGDKKYSIGLDIGTNSVGWAVITDEYKVPSKKFKVLGNTDRHSIKKNLIGALLFDSGETAEATRLKRTARRRYTRRKNRICYLQEIFSNEMAKVDDSFFHRLEESFLVEEDKKHERHPIFGNIVDEVAYHEKYPTIYHLRKKLVDSTDKADLRLIYLALAHMIKFRGHFLIEGDLNPDNSDVDKLFIQLVQTYNQLFEENPINASGVDAKAILSARLSKSRRLENLIAQLPGEKKNGLFGNLIALSLGLTPNFKSNFDLAEDAKLQLSKDTYDDDLDNLLAQIGDQYADLFLAAKNLSDAILLSDILRVNTEITKAPLSASMIKRYDEHHQDLTLLKALVRQQLPEKYKEIFFDQSKNGYAGYIDGGASQEEFYKFIKPILEKMDGTEELLVKLNREDLLRKQRTFDNGSIPHQIHLGELHAILRRQEDFYPFLKDNREKIEKILTFRIPYYVGPLARGNSRFAWMTRKSEETITPWNFEEVVDKGASAQSFIERMTNFDKNLPNEKVLPKHSLLYEYFTVYNELTKVKYVTEGMRKPAFLSGEQKKAIVDLLFKTNRKVTVKQLKEDYFKKIECFDSVEISGVEDRFNASLGTYHDLLKIIKDKDFLDNEENEDILEDIVLTLTLFEDREMIEERLKTYAHLFDDKVMKQLKRRRYTGWGRLSRKLINGIRDKQSGKTILDFLKSDGFANRNFMQLIHDDSLTFKEDIQKAQVSGQGDSLHEHIANLAGSPAIKKGILQTVKVVDELVKVMGRHKPENIVIEMARENQTTQKGQKNSRERMKRIEEGIKELGSQILKEHPVENTQLQNEKLYLYYLQNGRDMYVDQELDINRLSDYDVDHIVPQSFLKDDSIDNKVLTRSDKARGKSDNVPSEEVVKKMKNYWRQLLNAKLITQRKFDNLTKAERGGLSELDKAGFIKRQLVETRQITKHVAQILDSRMNTKYDENDKLIREVKVITLKSKLVSDFRKDFQFYKVREINNYHHAHDAYLNAVVGTALIKKYPKLESEFVYGDYKVYDVRKMIAKSEQEIGKATAKYFFYSNIMNFFKTEITLANGEIRKRPLIETNGETGEIVWDKGRDFATVRKVLSMPQVNIVKKTEVQTGGFSKESILPKRNSDKLIARKKDWDPKKYGGFDSPTVAYSVLVVAKVEKGKSKKLKSVKELLGITIMERSSFEKNPIDFLEAKGYKEVKKDLIIKLPKYSLFELENGRKRMLASAGELQKGNELALPSKYVNFLYLASHYEKLKGSPEDNEQKQLFVEQHKHYLDEIIEQISEFSKRVILADANLDKVLSAYNKHRDKPIREQAENIIHLFTLTNLGAPAAFKYFDTTIDRKRYTSTKEVLDATLIHQSITGLYETRIDLSQLGGDGGGSSGSSGSSGGTLGIEDEYRLHETSTEPDVSLGSTWLSDFPQAWAETGGMGLAVRQAPLIIPLKATSTPVSIQQYPMSHEARLGIKPHIQRLLDQGILVPCQSPWNTPLLPVKKPGTNDYRPVQDLREVNKRVEDIHPTVPNPYNLLSGLPPSHQWYTVLDLKDAFFCLRLHPTSQPLFAFEWRDPGMGISGQLTWTRLPQGFKNSPTLFDEALHRDLADFRIQHPDLILLQYVDDILLAATSELDCQQGTRALLQTLGDLGYRASAKKAQICQKQVKYLGYLLREGQRWLTEARKETVMGQPVPKTPRQLREFLGTAGFCRLWIPGFAEMAAPLYPLTKTGTLFSWGPDQQKAYQEIKQALLTAPALGLPDLTKPFELFVDEKQGYAKGVLTQKLGPWRRPVAYLSKKLDPVAAGWPPCLRMVAAIAVLTKDAGKLTMGQPLVILAPHAVEALVKQPPDRWLSNARMTHYQAMLLDTDRVQFGPVVALNPATLLPLPEEGAPHDCLEILAETHGTRPDLTDQPIPDADHTWYTDGSSFLQEGQRKAGAAVTTETEVIWAGALPAGTSAQRAELIALTQALKMAEGKRLNVYTDSRYAFATAHIHGEIYRRRGLLTSEGREIKNKSEILALLKALFLPKRLSIIHCLGHQKGDSAEARGNRLADQAAREAAIKTPPDTSTLLAGKRTADGSEFEKRTADGSEFESPKKKAKVE

SEQ ID NO: 6310 - protein, 2094 aa, synthetic construct
MPAAKRVKLDGGDKKYSIGLDIGTNSVGWAVITDEYKVPSKKFKVLGNTDRHSIKKNLIGALLFDSGETAEATRLKRTARRRYTRRKNRICYLQEIFSNEMAKVDDSFFHRLEESFLVEEDKKHERHPIFGNIVDEVAYHEKYPTIYHLRKKLVDSTDKADLRLIYLALAHMIKFRGHFLIEGDLNPDNSDVDKLFIQLVQTYNQLFEENPINASGVDAKAILSARLSKSRRLENLIAQLPGEKKNGLFGNLIALSLGLTPNFKSNFDLAEDAKLQLSKDTYDDDLDNLLAQIGDQYADLFLAAKNLSDAILLSDILRVNTEITKAPLSASMIKRYDEHHQDLTLLKALVRQQLPEKYKEIFFDQSKNGYAGYIDGGASQEEFYKFIKPILEKMDGTEELLVKLNREDLLRKQRTFDNGSIPHQIHLGELHAILRRQEDFYPFLKDNREKIEKILTFRIPYYVGPLARGNSRFAWMTRKSEETITPWNFEEVVDKGASAQSFIERMTNFDKNLPNEKVLPKHSLLYEYFTVYNELTKVKYVTEGMRKPAFLSGEQKKAIVDLLFKTNRKVTVKQLKEDYFKKIECFDSVEISGVEDRFNASLGTYHDLLKIIKDKDFLDNEENEDILEDIVLTLTLFEDREMIEERLKTYAHLFDDKVMKQLKRRRYTGWGRLSRKLINGIRDKQSGKTILDFLKSDGFANRNFMQLIHDDSLTFKEDIQKAQVSGQGDSLHEHIANLAGSPAIKKGILQTVKVVDELVKVMGRHKPENIVIEMARENQTTQKGQKNSRERMKRIEEGIKELGSQILKEHPVENTQLQNEKLYLYYLQNGRDMYVDQELDINRLSDYDVDHIVPQSFLKDDSIDNKVLTRSDKARGKSDNVPSEEVVKKMKNYWRQLLNAKLITQRKFDNLTKAERGGLSELDKAGFIKRQLVETRQITKHVAQILDSRMNTKYDENDKLIREVKVITLKSKLVSDFRKDFQFYKVREINNYHHAHDAYLNAVVGTALIKKYPKLESEFVYGDYKVYDVRKMIAKSEQEIGKATAKYFFYSNIMNFFKTEITLANGEIRKRPLIETNGETGEIVWDKGRDFATVRKVLSMPQVNIVKKTEVQTGGFSKESILPKRNSDKLIARKKDWDPKKYGGFDSPTVAYSVLVVAKVEKGKSKKLKSVKELLGITIMERSSFEKNPIDFLEAKGYKEVKKDLIIKLPKYSLFELENGRKRMLASAGELQKGNELALPSKYVNFLYLASHYEKLKGSPEDNEQKQLFVEQHKHYLDEIIEQISEFSKRVILADANLDKVLSAYNKHRDKPIREQAENIIHLFTLTNLGAPAAFKYFDTTIDRKRYTSTKEVLDATLIHQSITGLYETRIDLSQLGGDGGGSSGSSGSSGGTLNIEDEYRLHETSKEPDVSLGSTWLSDFPQAWAETGGMGLAVRQAPLIIPLKATSTPVSIKQYPMSQEARLGIKPHIQRLLDQGILVPCQSPWNTPLLPVKKPGTNDYRPVQDLREVNKRVEDIHPTVPNPYNLLSGLPPSHQWYTVLDLKDAFFCLRLHPTSQPLFAFEWRDPEMGISGQLTWTRLPQGFKNSPTLFNEALHRDLAGFRIQHPDLILLQYVDDLLLAATSELDCQQGTRALLQTLGDLGYRASAKKAQICQKQVKYLGYLLKEGQRWLTEARKETVMGQPIPKTPRQLREFLGTAGFCRLWIPGFAEMAAPLYPLTKPGTLFNWGPDQQKAFQEIKQALLTAPALGLPDLTKPFELFVDEKQGYAKGVLTQKLGPWRRPVAYLSKKLDPVAAGWPPCLRMVAAIAVLTKDAGKLTMGQPLVILAPHAVEALVKQPPDRWLSNARMTHYQALLLDTDRVQFGPVVALNPATLLPLPEEGLQHDCLDILAEAHGTRSDLMDQPLPDADHTWYTDGSSFLQEGQRKAGAAVTTETEVIWARALPAGTSAQRAELIALTQALKMAEGKKLNVYTDSRYAFATAHIHGEIYRRRGWLTSEGKEIKNKDEILALLKALFLPKRLSIIHCPGHQKGNSAEARGNRMADQAAREVATRETPETSTLLAGKRTADGSEFEKRTADGSEFESPKKKAKVE

SEQ ID NO: 6311 - protein, 2094 aa, synthetic construct; identical to SEQ ID NO: 4505

SEQ ID NO: 6312 - protein, 2094 aa, synthetic construct; identical to SEQ ID NO: 4505

SEQ ID NO: 6313 - protein, 2088 aa, synthetic construct
MPAAKRVKLDGGDKKYSIGLDIGTNSVGWAVITDEYKVPSKKFKVLGNTDRHSIKKNLIGALLFDSGETAEATRLKRTARRRYTRRKNRICYLQEIFSNEMAKVDDSFFHRLEESFLVEEDKKHERHPIFGNIVDEVAYHEKYPTIYHLRKKLVDSTDKADLRLIYLALAHMIKFRGHFLIEGDLNPDNSDVDKLFIQLVQTYNQLFEENPINASGVDAKAILSARLSKSRRLENLIAQLPGEKKNGLFGNLIALSLGLTPNFKSNFDLAEDAKLQLSKDTYDDDLDNLLAQIGDQYADLFLAAKNLSDAILLSDILRVNTEITKAPLSASMIKRYDEHHQDLTLLKALVRQQLPEKYKEIFFDQSKNGYAGYIDGGASQEEFYKFIKPILEKMDGTEELLVKLNREDLLRKQRTFDNGSIPHQIHLGELHAILRRQEDFYPFLKDNREKIEKILTFRIPYYVGPLARGNSRFAWMTRKSEETITPWNFEEVVDKGASAQSFIERMTNFDKNLPNEKVLPKHSLLYEYFTVYNELTKVKYVTEGMRKPAFLSGEQKKAIVDLLFKTNRKVTVKQLKEDYFKKIECFDSVEISGVEDRFNASLGTYHDLLKIIKDKDFLDNEENEDILEDIVLTLTLFEDREMIEERLKTYAHLFDDKVMKQLKRRRYTGWGRLSRKLINGIRDKQSGKTILDFLKSDGFANRNFMQLIHDDSLTFKEDIQKAQVSGQGDSLHEHIANLAGSPAIKKGILQTVKVVDELVKVMGRHKPENIVIEMARENQTTQKGQKNSRERMKRIEEGIKELGSQILKEHPVENTQLQNEKLYLYYLQNGRDMYVDQELDINRLSDYDVDHIVPQSFLKDDSIDNKVLTRSDKARGKSDNVPSEEVVKKMKNYWRQLLNAKLITQRKFDNLTKAERGGLSELDKAGFIKRQLVETRQITKHVAQILDSRMNTKYDENDKLIREVKVITLKSKLVSDFRKDFQFYKVREINNYHHAHDAYLNAVVGTALIKKYPKLESEFVYGDYKVYDVRKMIAKSEQEIGKATAKYFFYSNIMNFFKTEITLANGEIRKRPLIETNGETGEIVWDKGRDFATVRKVLSMPQVNIVKKTEVQTGGFSKESILPKRNSDKLIARKKDWDPKKYGGFDSPTVAYSVLVVAKVEKGKSKKLKSVKELLGITIMERSSFEKNPIDFLEAKGYKEVKKDLIIKLPKYSLFELENGRKRMLASAGELQKGNELALPSKYVNFLYLASHYEKLKGSPEDNEQKQLFVEQHKHYLDEIIEQISEFSKRVILADANLDKVLSAYNKHRDKPIREQAENIIHLFTLTNLGAPAAFKYFDTTIDRKRYTSTKEVLDATLIHQSITGLYETRIDLSQLGGDGGGSSGSSGSSGGTLQLDDEYRLYSPLVKPDQNIQFWLEQFPQAWAETAGMGLAKQVPPQVIQLKASATPVSVRQYPLSKEAQEGIRPHVQRLIQQGILVPVQSPWNTPLLPVRKPGTNDYRPVQDLREVNKRVQDIHPTVPNPYNLLCALPPQRSWYTVLDLKDAFFCLRLHPTSQPLFAFEWRDPGTGRTGQLTWTRLPQGFKNSPTIFDEALHRDLANFRIQHPQVTLLQYVDDLLLAGATKQDCLEGTKALLLELSDLGYRASAKKAQICRREVTYLGYSLRDGQRWLTEARKKTVVQIPAPTTAKQVREFLGTAGFCRLWIPGFATLAAPLYPLTKEKGEFSWAPEHQKAFDAIKKALLSAPALALPDVTKPFTLYVDERKGVARGVLTQTLGPWRRPVAYLSKKLDPVASGWPVCLKAIAAVAILVKDADKLTLGQNITVIAPHALENIVRQPPDRWMTNARMTHYQSLLLTERVTFAPPAALNPATLLPEETDEPVTHDCHQLLIEETGVRKDLTDIPLTGEVLTWFTDGSSYVVEGKRMAGAAVVDGTRTIWASSLPEGTSAQKAELMALTQALRLAEGKSINIYTDSRYAFATAHVHGAIYKQRGLLTSAGREIKNKEEILSLLEALHLPKRLAIIHCPGHQKAKDPISRGNQMADRVAKQAAQGVNLLAGKRTADGSEFEKRTADGSEFESPKKKAKVE

SEQ ID NO: 6314 - protein, 2088 aa, synthetic construct; identical to SEQ ID NO: 6313

SEQ ID NO: 6315 - protein, 2099 aa, synthetic construct
MPAAKRVKLDGGDKKYSIGLDIGTNSVGWAVITDEYKVPSKKFKVLGNTDRHSIKKNLIGALLFDSGETAEATRLKRTARRRYTRRKNRICYLQEIFSNEMAKVDDSFFHRLEESFLVEEDKKHERHPIFGNIVDEVAYHEKYPTIYHLRKKLVDSTDKADLRLIYLALAHMIKFRGHFLIEGDLNPDNSDVDKLFIQLVQTYNQLFEENPINASGVDAKAILSARLSKSRRLENLIAQLPGEKKNGLFGNLIALSLGLTPNFKSNFDLAEDAKLQLSKDTYDDDLDNLLAQIGDQYADLFLAAKNLSDAILLSDILRVNTEITKAPLSASMIKRYDEHHQDLTLLKALVRQQLPEKYKEIFFDQSKNGYAGYIDGGASQEEFYKFIKPILEKMDGTEELLVKLNREDLLRKQRTFDNGSIPHQIHLGELHAILRRQEDFYPFLKDNREKIEKILTFRIPYYVGPLARGNSRFAWMTRKSEETITPWNFEEVVDKGASAQSFIERMTNFDKNLPNEKVLPKHSLLYEYFTVYNELTKVKYVTEGMRKPAFLSGEQKKAIVDLLFKTNRKVTVKQLKEDYFKKIECFDSVEISGVEDRFNASLGTYHDLLKIIKDKDFLDNEENEDILEDIVLTLTLFEDREMIEERLKTYAHLFDDKVMKQLKRRRYTGWGRLSRKLINGIRDKQSGKTILDFLKSDGFANRNFMQLIHDDSLTFKEDIQKAQVSGQGDSLHEHIANLAGSPAIKKGILQTVKVVDELVKVMGRHKPENIVIEMARENQTTQKGQKNSRERMKRIEEGIKELGSQILKEHPVENTQLQNEKLYLYYLQNGRDMYVDQELDINRLSDYDVDHIVPQSFLKDDSIDNKVLTRSDKARGKSDNVPSEEVVKKMKNYWRQLLNAKLITQRKFDNLTKAERGGLSELDKAGFIKRQLVETRQITKHVAQILDSRMNTKYDENDKLIREVKVITLKSKLVSDFRKDFQFYKVREINNYHHAHDAYLNAVVGTALIKKYPKLESEFVYGDYKVYDVRKMIAKSEQEIGKATAKYFFYSNIMNFFKTEITLANGEIRKRPLIETNGETGEIVWDKGRDFATVRKVLSMPQVNIVKKTEVQTGGFSKESILPKRNSDKLIARKKDWDPKKYGGFDSPTVAYSVLVVAKVEKGKSKKLKSVKELLGITIMERSSFEKNPIDFLEAKGYKEVKKDLIIKLPKYSLFELENGRKRMLASAGELQKGNELALPSKYVNFLYLASHYEKLKGSPEDNEQKQLFVEQHKHYLDEIIEQISEFSKRVILADANLDKVLSAYNKHRDKPIREQAENIIHLFTLTNLGAPAAFKYFDTTIDRKRYTSTKEVLDATLIHQSITGLYETRIDLSQLGGDGGGSSGSSGSSGSSGGTAPLEEEYRLFLEAPIQNVTLLEQWKREIPKVWAEINPPGLASTQAPIHVQLLSTALPVRVRQYPITLEAKRSLRETIRKFRAAGILRPVHSPWNTPLLPVRKSGTSEYRMVQDLREVNKRVETIHPTVPNPYTLLSLLPPDRIWYSVLDLKDAFFCIPLAPESQLIFAFEWADAEEGESGQLTWTRLPQGFKNSPTLFDEALNRDLQGFRLDHPSVSLLQYVDDLLIAADTQAACLSATRDLLMTLAELGYRVSGKKAQLCQEEVTYLGFKIHKGSRSLSNSRTQAILQIPVPKTKRQVREFLGTIGYCRLWIPGFAELAQPLYAATRGGNDPLVWGEKEEEAFQSLKLALTQPPALALPSLDKPFQLFVEETSGAAKGVLTQALGPWKRPVAYLSKRLDPVAAGWPRCLRAIAAAALLTREASKLTFGQDIEITSSHNLESLLRSPPDKWLTNARITQYQVLLLDPPRVRFKQTAALNPATLLPETDDTLPIHHCLDTLDSLTSTRPDLTDQPLAQAEATLFTDGSSYIRDGKRYAGAAVVTLDSVIWAEPLPIGTSAQKAELIALTKALEWSKDKSVNIYTDSRYAFATLHVHGMIYRERGLLTAGGKAIKNAPEILALLTAVWLPKRVAVMHCKGHQKDDAPTSTGNRRADEVAREVAIRPLSTQATISAGKRTADGSEFEKRTADGSEFESPKKKAKVE

SEQ ID NO: 6316 - protein, 2099 aa, synthetic construct
MPAAKRVKLDGGDKKYSIGLDIGTNSVGWAVITDEYKVPSKKFKVLGNTDRHSIKKNLIGALLFDSGETAEATRLKRTARRRYTRRKNRICYLQEIFSNEMAKVDDSFFHRLEESFLVEEDKKHERHPIFGNIVDEVAYHEKYPTIYHLRKKLVDSTDKADLRLIYLALAHMIKFRGHFLIEGDLNPDNSDVDKLFIQLVQTYNQLFEENPINASGVDAKAILSARLSKSRRLENLIAQLPGEKKNGLFGNLIALSLGLTPNFKSNFDLAEDAKLQLSKDTYDDDLDNLLAQIGDQYADLFLAAKNLSDAILLSDILRVNTEITKAPLSASMIKRYDEHHQDLTLLKALVRQQLPEKYKEIFFDQSKNGYAGYIDGGASQEEFYKFIKPILEKMDGTEELLVKLNREDLLRKQRTFDNGSIPHQIHLGELHAILRRQEDFYPFLKDNREKIEKILTFRIPYYVGPLARGNSRFAWMTRKSEETITPWNFEEVVDKGASAQSFIERMTNFDKNLPNEKVLPKHSLLYEYFTVYNELTKVKYVTEGMRKPAFLSGEQKKAIVDLLFKTNRKVTVKQLKEDYFKKIECFDSVEISGVEDRFNASLGTYHDLLKIIKDKDFLDNEENEDILEDIVLTLTLFEDREMIEERLKTYAHLFDDKVMKQLKRRRYTGWGRLSRKLINGIRDKQSGKTILDFLKSDGFANRNFMQLIHDDSLTFKEDIQKAQVSGQGDSLHEHIANLAGSPAIKKGILQTVKVVDELVKVMGRHKPENIVIEMARENQTTQKGQKNSRERMKRIEEGIKELGSQILKEHPVENTQLQNEKLYLYYLQNGRDMYVDQELDINRLSDYDVDHIVPQSFLKDDSIDNKVLTRSDKARGKSDNVPSEEVVKKMKNYWRQLLNAKLITQRKFDNLTKAERGGLSELDKAGFIKRQLVETRQITKHVAQILDSRMNTKYDENDKLIREVKVITLKSKLVSDFRKDFQFYKVREINNYHHAHDAYLNAVVGTALIKKYPKLESEFVYGDYKVYDVRKMIAKSEQEIGKATAKYFFYSNIMNFFKTEITLANGEIRKRPLIETNGETGEIVWDKGRDFATVRKVLSMPQVNIVKKTEVQTGGFSKESILPKRNSDKLIARKKDWDPKKYGGFDSPTVAYSVLVVAKVEKGKSKKLKSVKELLGITIMERSSFEKNPIDFLEAKGYKEVKKDLIIKLPKYSLFELENGRKRMLASAGELQKGNELALPSKYVNFLYLASHYEKLKGSPEDNEQKQLFVEQHKHYLDEIIEQISEFSKRVILADANLDKVLSAYNKHRDKPIREQAENIIHLFTLTNLGAPAAFKYFDTTIDRKRYTSTKEVLDATLIHQSITGLYETRIDLSQLGGDGGGSSGSSGSSGSSGGTAPLEEEYRLFLEAPIQNVTLLEQWKREIPKVWAEINPPGLASTQAPIHVQLLSTALPVRVRQYPITLEAKRSLRETIRKFRAAGILRPVHSPWNTPLLPVRKSGTSEYRMVQDLREVNKRVETIHPTVPNPYTLLSLLPPDRIWYSVLDLKDAFFCIPLAPESQLIFAFEWADAEEGESGQLTWTRLPQGFKNSPTLFNEALNRDLQGFRLDHPSVSLLQYVDDLLIAADTQAACLSATRDLLMTLAELGYRVSGKKAQLCQEEVTYLGFKIHKGSRSLSNSRTQAILQIPVPKTKRQVREFLGTIGYCRLWIPGFAELAQPLYAATRPGNDPLVWGEKEEEAFQSLKLALTQPPALALPSLDKPFQLFVEETSGAAKGVLTQALGPWKRPVAYLSKRLDPVAAGWPRCLRAIAAAALLTREASKLTFGQDIEITSSHNLESLLRSPPDKWLTNARITQYQVLLLDPPRVRFKQTAALNPATLLPETDDTLPIHHCLDTLDSLTSTRPDLTDQPLAQAEATLFTDGSSYIRDGKRYAGAAVVTLDSVIWAEPLPIGTSAQKAELIALTKALEWSKDKSVNIYTDSRYAFATLHVHGMIYRERGWLTAGGKAIKNAPEILALLTAVWLPKRVAVMHCKGHQKDDAPTSTGNRRADEVAREVAIRPLSTQATISAGKRTADGSEFEKRTADGSEFESPKKKAKVE

SEQ ID NO: 6317 - protein, 2103 aa, synthetic construct
MPAAKRVKLDGGDKKYSIGLDIGTNSVGWAVITDEYKVPSKKFKVLGNTDRHSIKKNLIGALLFDSGETAEATRLKRTARRRYTRRKNRICYLQEIFSNEMAKVDDSFFHRLEESFLVEEDKKHERHPIFGNIVDEVAYHEKYPTIYHLRKKLVDSTDKADLRLIYLALAHMIKFRGHFLIEGDLNPDNSDVDKLFIQLVQTYNQLFEENPINASGVDAKAILSARLSKSRRLENLIAQLPGEKKNGLFGNLIALSLGLTPNFKSNFDLAEDAKLQLSKDTYDDDLDNLLAQIGDQYADLFLAAKNLSDAILLSDILRVNTEITKAPLSASMIKRYDEHHQDLTLLKALVRQQLPEKYKEIFFDQSKNGYAGYIDGGASQEEFYKFIKPILEKMDGTEELLVKLNREDLLRKQRTFDNGSIPHQIHLGELHAILRRQEDFYPFLKDNREKIEKILTFRIPYYVGPLARGNSRFAWMTRKSEETITPWNFEEVVDKGASAQSFIERMTNFDKNLPNEKVLPKHSLLYEYFTVYNELTKVKYVTEGMRKPAFLSGEQKKAIVDLLFKTNRKVTVKQLKEDYFKKIECFDSVEISGVEDRFNASLGTYHDLLKIIKDKDFLDNEENEDILEDIVLTLTLFEDREMIEERLKTYAHLFDDKVMKQLKRRRYTGWGRLSRKLINGIRDKQSGKTILDFLKSDGFANRNFMQLIHDDSLTFKEDIQKAQVSGQGDSLHEHIANLAGSPAIKKGILQTVKVVDELVKVMGRHKPENIVIEMARENQTTQKGQKNSRERMKRIEEGIKELGSQILKEHPVENTQLQNEKLYLYYLQNGRDMYVDQELDINRLSDYDVDHIVPQSFLKDDSIDNKVLTRSDKARGKSDNVPSEEVVKKMKNYWRQLLNAKLITQRKFDNLTKAERGGLSELDKAGFIKRQLVETRQITKHVAQILDSRMNTKYDENDKLIREVKVITLKSKLVSDFRKDFQFYKVREINNYHHAHDAYLNAVVGTALIKKYPKLESEFVYGDYKVYDVRKMIAKSEQEIGKATAKYFFYSNIMNFFKTEITLANGEIRKRPLIETNGETGEIVWDKGRDFATVRKVLSMPQVNIVKKTEVQTGGFSKESILPKRNSDKLIARKKDWDPKKYGGFDSPTVAYSVLVVAKVEKGKSKKLKSVKELLGITIMERSSFEKNPIDFLEAKGYKEVKKDLIIKLPKYSLFELENGRKRMLASAGELQKGNELALPSKYVNFLYLASHYEKLKGSPEDNEQKQLFVEQHKHYLDEIIEQISEFSKRVILADANLDKVLSAYNKHRDKPIREQAENIIHLFTLTNLGAPAAFKYFDTTIDRKRYTSTKEVLDATLIHQSITGLYETRIDLSQLGGDGGGSSGSSGSSGSSGGTVSLQDEHRLFDIPVTTSLPDVWLQDFPQAWAETGGLGRAKCQAPIIIDLKPTAVPVSIKQYPMSLEAHMGIRQHIIKFLELGVLRPCRSPWNTPLLPVKKPGTQDYRPVQDLREINKRTVDIHPTVPNPYNLLSTLKPDYSWYTVLDLKDAFFCLPLAPQSQELFAFEWKDPERGISGQLTWTRLPQGFKNSPTLFNEALHRDLTDFRTQHPEVTLLQYVDDLLLAAPTKKACTQGTRHLLQELGEKGYRASAKKAQICQTKVTYLGYILSEGKRWLTPGRIETVARIPPPRNPREVREFLGTAGFCRLWIPGFAELAAPLYALTKPSTPFTWQTEHQLAFEALKKALLSAPALGLPDTSKPFTLFLDERQGIAKGVLTQKLGPWKRPVAYLSKKLDPVAAGWPPCLRIMAATAMLVKDSAKLTLGQPLTVITPHTLEAIVRQPPDRWITNARLTHYQALLLDTDRVQFGPPVTLNPATLLPVPENQPSPHDCRQVLAETHGTREDLKDQELPDADHTWYTDGSSYLDSGTRRAGAAVVDGHNTIWAQSLPPGTSAQKAELIALTKALELSKGKKANIYTDSRYAFATAHTHGSIYERRGWLTSEGKEIKNKAEIIALLKALFLPQEVAIIHCPGHQKGQDPVAVGNRQADRVARQAAMAEVLTLATEPDNTSHITAGKRTADGSEFEKRTADGSEFESPKKKAKVE

SEQ ID NO: 6318 - protein, 2096 aa, synthetic construct
MPAAKRVKLDGGDKKYSIGLDIGTNSVGWAVITDEYKVPSKKFKVLGNTDRHSIKKNLIGALLFDSGETAEATRLKRTARRRYTRRKNRICYLQEIFSNEMAKVDDSFFHRLEESFLVEEDKKHERHPIFGNIVDEVAYHEKYPTIYHLRKKLVDSTDKADLRLIYLALAHMIKFRGHFLIEGDLNPDNSDVDKLFIQLVQTYNQLFEENPINASGVDAKAILSARLSKSRRLENLIAQLPGEKKNGLFGNLIALSLGLTPNFKSNFDLAEDAKLQLSKDTYDDDLDNLLAQIGDQYADLFLAAKNLSDAILLSDILRVNTEITKAPLSASMIKRYDEHHQDLTLLKALVRQQLPEKYKEIFFDQSKNGYAGYIDGGASQEEFYKFIKPILEKMDGTEELLVKLNREDLLRKQRTFDNGSIPHQIHLGELHAILRRQEDFYPFLKDNREKIEKILTFRIPYYVGPLARGNSRFAWMTRKSEETITPWNFEEVVDKGASAQSFIERMTNFDKNLPNEKVLPKHSLLYEYFTVYNELTKVKYVTEGMRKPAFLSGEQKKAIVDLLFKTNRKVTVKQLKEDYFKKIECFDSVEISGVEDRFNASLGTYHDLLKIIKDKDFLDNEENEDILEDIVLTLTLFEDREMIEERLKTYAHLFDDKVMKQLKRRRYTGWGRLSRKLINGIRDKQSGKTILDFLKSDGFANRNFMQLIHDDSLTFKEDIQKAQVSGQGDSLHEHIANLAGSPAIKKGILQTVKVVDELVKVMGRHKPENIVIEMARENQTTQKGQKNSRERMKRIEEGIKELGSQILKEHPVENTQLQNEKLYLYYLQNGRDMYVDQELDINRLSDYDVDHIVPQSFLKDDSIDNKVLTRSDKARGKSDNVPSEEVVKKMKNYWRQLLNAKLITQRKFDNLTKAERGGLSELDKAGFIKRQLVETRQITKHVAQILDSRMNTKYDENDKLIREVKVITLKSKLVSDFRKDFQFYKVREINNYHHAHDAYLNAVVGTALIKKYPKLESEFVYGDYKVYDVRKMIAKSEQEIGKATAKYFFYSNIMNFFKTEITLANGEIRKRPLIETNGETGEIVWDKGRDFATVRKVLSMPQVNIVKKTEVQTGGFSKESILPKRNSDKLIARKKDWDPKKYGGFDSPTVAYSVLVVAKVEKGKSKKLKSVKELLGITIMERSSFEKNPIDFLEAKGYKEVKKDLIIKLPKYSLFELENGRKRMLASAGELQKGNELALPSKYVNFLYLASHYEKLKGSPEDNEQKQLFVEQHKHYLDEIIEQISEFSKRVILADANLDKVLSAYNKHRDKPIREQAENIIHLFTLTNLGAPAAFKYFDTTIDRKRYTSTKEVLDATLIHQSITGLYETRIDLSQLGGDGGGSSGSSGSSGSSGGTLQLEEEYRLFEPESTQKQEMDIWLKNFPQAWAETGGMGTAHCQAPVLIQLKATATPISIRQYPMPHEAYQGIKPHIRRMLDQGILKPCQSPWNTPLLPVKKPGTEDYRPVQDLREVNKRVEDIHPTVPNPYNLLSTLPPSHPWYTVLDLKDAFFCLRLHSESQLLFAFEWRDPEIGLSGQLTWTRLPQGFKNSPTLFNEALHSDLADFRVRYPALVLLQYVDDLLLAAATRTECLEGTKALLETLGNKGYRASAKKAQICLQEVTYLGYSLKDGQRWLTKARKEAILSIPVPKNSRQVREFLGTAGYCRLWIPGFAELAAPLYPLTRPGTLFQWGTEQQLAFEDIKKALLSSPALGLPDITKPFELFIDENSGFAKGVLVQKLGPWKRPVAYLSKKLDTVASGWPPCLRMVAAIAILVKDAGKLTLGQPLTILTSHPVEALVRQPPNKWLSNARMTHYQAMLLDAERVHFGPTVSLNPATLLPLPSGGNHHDCLQILAETHGTRPDLTDQPLPDADLTWYTDGSSFIRNGEREAGAAVTTESEVIWAAPLPPGTSAQRAELIALTQALKMAEGKKLTVYTDSRYAFATTHVHGEIYRRRGWLTSEGKEIKNKNEILALLEALFLPKRLSIIHCPGHQKGDSPQAKGNRLADDTAKKAATETHSSLTVLPAGKRTADGSEFEKRTADGSEFESPKKKAKVE

SEQ ID NO: 6319 - protein, 2219 aa, synthetic construct
MPAAKRVKLDGGDKKYSIGLDIGTNSVGWAVITDEYKVPSKKFKVLGNTDRHSIKKNLIGALLFDSGETAEATRLKRTARRRYTRRKNRICYLQEIFSNEMAKVDDSFFHRLEESFLVEEDKKHERHPIFGNIVDEVAYHEKYPTIYHLRKKLVDSTDKADLRLIYLALAHMIKFRGHFLIEGDLNPDNSDVDKLFIQLVQTYNQLFEENPINASGVDAKAILSARLSKSRRLENLIAQLPGEKKNGLFGNLIALSLGLTPNFKSNFDLAEDAKLQLSKDTYDDDLDNLLAQIGDQYADLFLAAKNLSDAILLSDILRVNTEITKAPLSASMIKRYDEHHQDLTLLKALVRQQLPEKYKEIFFDQSKNGYAGYIDGGASQEEFYKFIKPILEKMDGTEELLVKLNREDLLRKQRTFDNGSIPHQIHLGELHAILRRQEDFYPFLKDNREKIEKILTFRIPYYVGPLARGNSRFAWMTRKSEETITPWNFEEVVDKGASAQSFIERMTNFDKNLPNEKVLPKHSLLYEYFTVYNELTKVKYVTEGMRKPAFLSGEQKKAIVDLLFKTNRKVTVKQLKEDYFKKIECFDSVEISGVEDRFNASLGTYHDLLKIIKDKDFLDNEENEDILEDIVLTLTLFEDREMIEERLKTYAHLFDDKVMKQLKRRRYTGWGRLSRKLINGIRDKQSGKTILDFLKSDGFANRNFMQLIHDDSLTFKEDIQKAQVSGQGDSLHEHIANLAGSPAIKKGILQTVKVVDELVKVMGRHKPENIVIEMARENQTTQKGQKNSRERMKRIEEGIKELGSQILKEHPVENTQLQNEKLYLYYLQNGRDMYVDQELDINRLSDYDVDHIVPQSFLKDDSIDNKVLTRSDKARGKSDNVPSEEVVKKMKNYWRQLLNAKLITQRKFDNLTKAERGGLSELDKAGFIKRQLVETRQITKHVAQILDSRMNTKYDENDKLIREVKVITLKSKLVSDFRKDFQFYKVREINNYHHAHDAYLNAVVGTALIKKYPKLESEFVYGDYKVYDVRKMIAKSEQEIGKATAKYFFYSNIMNFFKTEITLANGEIRKRPLIETNGETGEIVWDKGRDFATVRKVLSMPQVNIVKKTEVQTGGFSKESILPKRNSDKLIARKKDWDPKKYGGFDSPTVAYSVLVVAKVEKGKSKKLKSVKELLGITIMERSSFEKNPIDFLEAKGYKEVKKDLIIKLPKYSLFELENGRKRMLASAGELQKGNELALPSKYVNFLYLASHYEKLKGSPEDNEQKQLFVEQHKHYLDEIIEQISEFSKRVILADANLDKVLSAYNKHRDKPIREQAENIIHLFTLTNLGAPAAFKYFDTTIDRKRYTSTKEVLDATLIHQSITGLYETRIDLSQLGGDGGGSSGSSGSSGSSGGTLGDQGSRGSDPLPEPRVTLTVEGIPTEFLVNTGAEHSVLTKPMGKMGSKRTVVAGATGSKVYPWTTKRLLKIGQKQVTHSFLVIPECPAPLLGRDLLTKLKAQIQFSTEGPQVTWEDRPAMCLVLNLEEEYRLHEKPVPPSIDPSWLQLFPMVWAEKAGMGLANQVPPVVVELKSDASPVAVRQYPMSKEAREGIRPHIQRFLDLGILVPCQSPWNTPLLPVKKPGTNDYRPVQDLREVNKRVQDIHPTVPNPYNLLSSLPPSHTWYSVLDLKDAFFCLKLHPNSQPLFAFEWRDPEKGNTGQLTWTRLPQGFKNSPTLFDEALHRDLASFRALNPQVVMLQYVDDLLVAAPTYRDCKEGTRRLLQELSKLGYRVSAKKAQLCREEVTYLGYLLKGGKRWLTPARKATVMKIPTPTTPRQVREFLGTAGFCRLWIPGFASLAAPLYPLTREKVPFTWTEAHQEAFGRIKEALLSAPALALPDLTKPFALYVDEKEGVARGVLTQTLGPWRRPVAYLSKKLDPVASGWPTCLKAIAAVALLLKDADKLTLGQNVLVIAPHNLESIVRQPPDRWMTNARMTHYQSLLLNERVSFAPPAILNPATLLPVESDDTPIHICSEILAEETGTRPDLRDQPLPGVPAWYTDGSSFIMDGRRQAGAAIVDNKRTVWASNLPEGTSAQKAELIALTQALRLAEGKSINIYTDSRYAFATAHVHGAIYKQRGLLTSAGKDIKNKEEILALLEAIHLPKRVAIIHCPGHQRGTDPVATGNRKADEAAKQAAQSTRILTETTKNAGKRTADGSEFEKRTADGSEFESPKKKAKVE

SEQ ID NO: 6320 - protein, 2128 aa, synthetic construct
MPAAKRVKLDGGDKKYSIGLDIGTNSVGWAVITDEYKVPSKKFKVLGNTDRHSIKKNLIGALLFDSGETAEATRLKRTARRRYTRRKNRICYLQEIFSNEMAKVDDSFFHRLEESFLVEEDKKHERHPIFGNIVDEVAYHEKYPTIYHLRKKLVDSTDKADLRLIYLALAHMIKFRGHFLIEGDLNPDNSDVDKLFIQLVQTYNQLFEENPINASGVDAKAILSARLSKSRRLENLIAQLPGEKKNGLFGNLIALSLGLTPNFKSNFDLAEDAKLQLSKDTYDDDLDNLLAQIGDQYADLFLAAKNLSDAILLSDILRVNTEITKAPLSASMIKRYDEHHQDLTLLKALVRQQLPEKYKEIFFDQSKNGYAGYIDGGASQEEFYKFIKPILEKMDGTEELLVKLNREDLLRKQRTFDNGSIPHQIHLGELHAILRRQEDFYPFLKDNREKIEKILTFRIPYYVGPLARGNSRFAWMTRKSEETITPWNFEEVVDKGASAQSFIERMTNFDKNLPNEKVLPKHSLLYEYFTVYNELTKVKYVTEGMRKPAFLSGEQKKAIVDLLFKTNRKVTVKQLKEDYFKKIECFDSVEISGVEDRFNASLGTYHDLLKIIKDKDFLDNEENEDILEDIVLTLTLFEDREMIEERLKTYAHLFDDKVMKQLKRRRYTGWGRLSRKLINGIRDKQSGKTILDFLKSDGFANRNFMQLIHDDSLTFKEDIQKAQVSGQGDSLHEHIANLAGSPAIKKGILQTVKVVDELVKVMGRHKPENIVIEMARENQTTQKGQKNSRERMKRIEEGIKELGSQILKEHPVENTQLQNEKLYLYYLQNGRDMYVDQELDINRLSDYDVDHIVPQSFLKDDSIDNKVLTRSDKARGKSDNVPSEEVVKKMKNYWRQLLNAKLITQRKFDNLTKAERGGLSELDKAGFIKRQLVETRQITKHVAQILDSRMNTKYDENDKLIREVKVITLKSKLVSDFRKDFQFYKVREINNYHHAHDAYLNAVVGTALIKKYPKLESEFVYGDYKVYDVRKMIAKSEQEIGKATAKYFFYSNIMNFFKTEITLANGEIRKRPLIETNGETGEIVWDKGRDFATVRKVLSMPQVNIVKKTEVQTGGFSKESILPKRNSDKLIARKKDWDPKKYGGFDSPTVAYSVLVVAKVEKGKSKKLKSVKELLGITIMERSSFEKNPIDFLEAKGYKEVKKDLIIKLPKYSLFELENGRKRMLASAGELQKGNELALPSKYVNFLYLASHYEKLKGSPEDNEQKQLFVEQHKHYLDEIIEQISEFSKRVILADANLDKVLSAYNKHRDKPIREQAENIIHLFTLTNLGAPAAFKYFDTTIDRKRYTSTKEVLDATLIHQSITGLYETRIDLSQLGGDGGGSSGSSGSSGSSGGLLGRDLLTKLKAQIQFSTEGPQVTWEDRPAMCLVLNLEEEYRLHEKPVPPSIDPSWLQLFPMVWAEKAGMGLANQVPPVVVELKSDASPVAVRQYPMSKEAREGIRPHIQRFLDLGILVPCQSPWNTPLLPVKKPGTNDYRPVQDLREVNKRVQDIHPTVPNPYNLLSSLPPSHTWYSVLDLKDAFFCLKLHPNSQPLFAFEWRDPEKGNTGQLTWTRLPQGFKNSPTLFNEALHRDLASFRALNPQVVMLQYVDDLLVAAPTYRDCKEGTRRLLQELSKLGYRVSAKKAQLCREEVTYLGYLLKGGKRWLTPARKATVMKIPTPTTPRQVREFLGTAGFCRLWIPGFASLAAPLYPLTRPKVPFTWTEAHQEAFGRIKEALLSAPALALPDLTKPFALYVDEKEGVARGVLTQTLGPWRRPVAYLSKKLDPVASGWPTCLKAIAAVALLLKDADKLTLGQNVLVIAPHNLESIVRQPPDRWMTNARMTHYQSLLLNERVSFAPPAILNPATLLPVESDDTPIHICSEILAEETGTRPDLRDQPLPGVPAWYTDGSSFIMDGRRQAGAAIVDNKRTVWASNLPEGTSAQKAELIALTQALRLAEGKSINIYTDSRYAFATAHVHGAIYKQRGWLTSAGKDIKNKEEILALLEAIHLPKRVAIIHCPGHQRGTDPVATGNRKADEAAKQAAQSTRILTETTKNAGKRTADGSEFEKRTADGSEFESPKKKAKVE

SEQ ID NO: 6321 - protein, 2219 aa, synthetic construct
MPAAKRVKLDGGDKKYSIGLDIGTNSVGWAVITDEYKVPSKKFKVLGNTDRHSIKKNLIGALLFDSGETAEATRLKRTARRRYTRRKNRICYLQEIFSNEMAKVDDSFFHRLEESFLVEEDKKHERHPIFGNIVDEVAYHEKYPTIYHLRKKLVDSTDKADLRLIYLALAHMIKFRGHFLIEGDLNPDNSDVDKLFIQLVQTYNQLFEENPINASGVDAKAILSARLSKSRRLENLIAQLPGEKKNGLFGNLIALSLGLTPNFKSNFDLAEDAKLQLSKDTYDDDLDNLLAQIGDQYADLFLAAKNLSDAILLSDILRVNTEITKAPLSASMIKRYDEHHQDLTLLKALVRQQLPEKYKEIFFDQSKNGYAGYIDGGASQEEFYKFIKPILEKMDGTEELLVKLNREDLLRKQRTFDNGSIPHQIHLGELHAILRRQEDFYPFLKDNREKIEKILTFRIPYYVGPLARGNSRFAWMTRKSEETITPWNFEEVVDKGASAQSFIERMTNFDKNLPNEKVLPKHSLLYEYFTVYNELTKVKYVTEGMRKPAFLSGEQKKAIVDLLFKTNRKVTVKQLKEDYFKKIECFDSVEISGVEDRFNASLGTYHDLLKIIKDKDFLDNEENEDILEDIVLTLTLFEDREMIEERLKTYAHLFDDKVMKQLKRRRYTGWGRLSRKLINGIRDKQSGKTILDFLKSDGFANRNFMQLIHDDSLTFKEDIQKAQVSGQGDSLHEHIANLAGSPAIKKGILQTVKVVDELVKVMGRHKPENIVIEMARENQTTQKGQKNSRERMKRIEEGIKELGSQILKEHPVENTQLQNEKLYLYYLQNGRDMYVDQELDINRLSDYDVDHIVPQSFLKDDSIDNKVLTRSDKARGKSDNVPSEEVVKKMKNYWRQLLNAKLITQRKFDNLTKAERGGLSELDKAGFIKRQLVETRQITKHVAQILDSRMNTKYDENDKLIREVKVITLKSKLVSDFRKDFQFYKVREINNYHHAHDAYLNAVVGTALIKKYPKLESEFVYGDYKVYDVRKMIAKSEQEIGKATAKYFFYSNIMNFFKTEITLANGEIRKRPLIETNGETGEIVWDKGRDFATVRKVLSMPQVNIVKKTEVQTGGFSKESILPKRNSDKLIARKKDWDPKKYGGFDSPTVAYSVLVVAKVEKGKSKKLKSVKELLGITIMERSSFEKNPIDFLEAKGYKEVKKDLIIKLPKYSLFELENGRKRMLASAGELQKGNELALPSKYVNFLYLASHYEKLKGSPEDNEQKQLFVEQHKHYLDEIIEQISEFSKRVILADANLDKVLSAYNKHRDKPIREQAENIIHLFTLTNLGAPAAFKYFDTTIDRKRYTSTKEVLDATLIHQSITGLYETRIDLSQLGGDGGGSSGSSGSSGSSGGTLGDQGSRGSDPLPEPRVTLTVEGIPTEFLVNTGAEHSVLTKPMGKMGSKRTVVAGATGSKVYPWTTKRLLKIGQKQVTHSFLVIPECPAPLLGRDLLTKLKAQIQFSTEGPQVTWEDRPAMCLVLNLEEEYRLHEKPVPPSIDPSWLQLFPMVWAEKAGMGLANQVPPVVVELKSDASPVAVRQYPMSKEAREGIRPHIQRFLDLGILVPCQSPWNTPLLPVKKPGTNDYRPVQDLREVNKRVQDIHPTVPNPYNLLSSLPPSHTWYSVLDLKDAFFCLKLHPNSQPLFAFEWRDPEKGNTGQLTWTRLPQGFKNSPTLFNEALHRDLASFRALNPQVVMLQYVDDLLVAAPTYRDCKEGTRRLLQELSKLGYRVSAKKAQLCREEVTYLGYLLKGGKRWLTPARKATVMKIPTPTTPRQVREFLGKAGFCRLFIPGFASLAAPLYPLTRPKVPFTWTEAHQEAFGRIKEALLSAPALALPDLTKPFALYVDEKEGVARGVLTQTLGPWRRPVAYLSKKLDPVASGWPTCLKAIAAVALLLKDADKLTLGQNVLVIAPHNLESIVRQPPDRWMTNARMTHYQSLLLNERVSFAPPAILNPATLLPVESDDTPIHICSEILAEETGTRPDLRDQPLPGVPAWYTDGSSFIMDGRRQAGAAIVDNKRTVWASNLPEGTSAQKAELIALTQALRLAEGKSINIYTDSRYAFATAHVHGAIYKQRGWLTSAGKDIKNKEEILALLEAIHLPKRVAIIHCPGHQRGTDPVATGNRKADEAAKQAAQSTRILTETTKNAGKRTADGSEFEKRTADGSEFESPKKKAKVE

SEQ ID NO: 6322 - protein, 2097 aa, synthetic construct
MPAAKRVKLDGGDKKYSIGLDIGTNSVGWAVITDEYKVPSKKFKVLGNTDRHSIKKNLIGALLFDSGETAEATRLKRTARRRYTRRKNRICYLQEIFSNEMAKVDDSFFHRLEESFLVEEDKKHERHPIFGNIVDEVAYHEKYPTIYHLRKKLVDSTDKADLRLIYLALAHMIKFRGHFLIEGDLNPDNSDVDKLFIQLVQTYNQLFEENPINASGVDAKAILSARLSKSRRLENLIAQLPGEKKNGLFGNLIALSLGLTPNFKSNFDLAEDAKLQLSKDTYDDDLDNLLAQIGDQYADLFLAAKNLSDAILLSDILRVNTEITKAPLSASMIKRYDEHHQDLTLLKALVRQQLPEKYKEIFFDQSKNGYAGYIDGGASQEEFYKFIKPILEKMDGTEELLVKLNREDLLRKQRTFDNGSIPHQIHLGELHAILRRQEDFYPFLKDNREKIEKILTFRIPYYVGPLARGNSRFAWMTRKSEETITPWNFEEVVDKGASAQSFIERMTNFDKNLPNEKVLPKHSLLYEYFTVYNELTKVKYVTEGMRKPAFLSGEQKKAIVDLLFKTNRKVTVKQLKEDYFKKIECFDSVEISGVEDRFNASLGTYHDLLKIIKDKDFLDNEENEDILEDIVLTLTLFEDREMIEERLKTYAHLFDDKVMKQLKRRRYTGWGRLSRKLINGIRDKQSGKTILDFLKSDGFANRNFMQLIHDDSLTFKEDIQKAQVSGQGDSLHEHIANLAGSPAIKKGILQTVKVVDELVKVMGRHKPENIVIEMARENQTTQKGQKNSRERMKRIEEGIKELGSQILKEHPVENTQLQNEKLYLYYLQNGRDMYVDQELDINRLSDYDVDHIVPQSFLKDDSIDNKVLTRSDKARGKSDNVPSEEVVKKMKNYWRQLLNAKLITQRKFDNLTKAERGGLSELDKAGFIKRQLVETRQITKHVAQILDSRMNTKYDENDKLIREVKVITLKSKLVSDFRKDFQFYKVREINNYHHAHDAYLNAVVGTALIKKYPKLESEFVYGDYKVYDVRKMIAKSEQEIGKATAKYFFYSNIMNFFKTEITLANGEIRKRPLIETNGETGEIVWDKGRDFATVRKVLSMPQVNIVKKTEVQTGGFSKESILPKRNSDKLIARKKDWDPKKYGGFDSPTVAYSVLVVAKVEKGKSKKLKSVKELLGITIMERSSFEKNPIDFLEAKGYKEVKKDLIIKLPKYSLFELENGRKRMLASAGELQKGNELALPSKYVNFLYLASHYEKLKGSPEDNEQKQLFVEQHKHYLDEIIEQISEFSKRVILADANLDKVLSAYNKHRDKPIREQAENIIHLFTLTNLGAPAAFKYFDTTIDRKRYTSTKEVLDATLIHQSITGLYETRIDLSQLGGDGGGSSGSSGSSGSSGGLGIEDEYRLHETSTEPDVSLGSTWLSDFPQAWAETGGMGLAVRQAPLIIPLKATSTPVSIQQYPMSHEARLGIKPHIQRLLDQGILVPCQSPWNTPLLPVKKPGTNDYRPVQDLREVNKRVEDIHPTVPNPYNLLSGLPPSHQWYTVLDLKDAFFCLRLHPTSQPLFAFEWRDPGMGISGQLTWTRLPQGFKNSPTLFNEALHRDLADFRIQHPDLILLQYVDDILLAATSELDCQQGTRALLQTLGDLGYRASAKKAQICQKQVKYLGYLLREGQRWLTEARKETVMGQPVPKTPRQLREFLGKAGFCRLFIPGFAEMAAPLYPLTKPGTLFSWGPDQQKAYQEIKQALLTAPALGLPDLTKPFELFVDEKQGYAKGVLTQKLGPWRRPVAYLSKKLDPVAAGWPPCLRMVAAIAVLTKDAGKLTMGQPLVILAPHAVEALVKQPPDRWLSNARMTHYQAMLLDTDRVQFGPVVALNPATLLPLPEEGAPHDCLEILAETHGTRPDLTDQPIPDADHTWYTDGSSFLQEGQRKAGAAVTTETEVIWAGALPAGTSAQRAELIALTQALKMAEGKRLNVYTDSRYAFATAHIHGEIYRRRGWLTSEGREIKNKSEILALLKALFLPKRLSIIHCLGHQKGDSAEARGNRLADQAAREAAIKTPPDTSTLLIAGKRTADGSEFEKRTADGSEFESPKKKAKVE

SEQ ID NO: 6323 - protein, 2097 aa, synthetic construct
MPAAKRVKLDGGDKKYSIGLDIGTNSVGWAVITDEYKVPSKKFKVLGNTDRHSIKKNLIGALLFDSGETAEATRLKRTARRRYTRRKNRICYLQEIFSNEMAKVDDSFFHRLEESFLVEEDKKHERHPIFGNIVDEVAYHEKYPTIYHLRKKLVDSTDKADLRLIYLALAHMIKFRGHFLIEGDLNPDNSDVDKLFIQLVQTYNQLFEENPINASGVDAKAILSARLSKSRRLENLIAQLPGEKKNGLFGNLIALSLGLTPNFKSNFDLAEDAKLQLSKDTYDDDLDNLLAQIGDQYADLFLAAKNLSDAILLSDILRVNTEITKAPLSASMIKRYDEHHQDLTLLKALVRQQLPEKYKEIFFDQSKNGYAGYIDGGASQEEFYKFIKPILEKMDGTEELLVKLNREDLLRKQRTFDNGSIPHQIHLGELHAILRRQEDFYPFLKDNREKIEKILTFRIPYYVGPLARGNSRFAWMTRKSEETITPWNFEEVVDKGASAQSFIERMTNFDKNLPNEKVLPKHSLLYEYFTVYNELTKVKYVTEGMRKPAFLSGEQKKAIVDLLFKTNRKVTVKQLKEDYFKKIECFDSVEISGVEDRFNASLGTYHDLLKIIKDKDFLDNEENEDILEDIVLTLTLFEDREMIEERLKTYAHLFDDKVMKQLKRRRYTGWGRLSRKLINGIRDKQSGKTILDFLKSDGFANRNFMQLIHDDSLTFKEDIQKAQVSGQGDSLHEHIANLAGSPAIKKGILQTVKVVDELVKVMGRHKPENIVIEMARENQTTQKGQKNSRERMKRIEEGIKELGSQILKEHPVENTQLQNEKLYLYYLQNGRDMYVDQELDINRLSDYDVDHIVPQSFLKDDSIDNKVLTRSDKARGKSDNVPSEEVVKKMKNYWRQLLNAKLITQRKFDNLTKAERGGLSELDKAGFIKRQLVETRQITKHVAQILDSRMNTKYDENDKLIREVKVITLKSKLVSDFRKDFQFYKVREINNYHHAHDAYLNAVVGTALIKKYPKLESEFVYGDYKVYDVRKMIAKSEQEIGKATAKYFFYSNIMNFFKTEITLANGEIRKRPLIETNGETGEIVWDKGRDFATVRKVLSMPQVNIVKKTEVQTGGFSKESILPKRNSDKLIARKKDWDPKKYGGFDSPTVAYSVLVVAKVEKGKSKKLKSVKELLGITIMERSSFEKNPIDFLEAKGYKEVKKDLIIKLPKYSLFELENGRKRMLASAGELQKGNELALPSKYVNFLYLASHYEKLKGSPEDNEQKQLFVEQHKHYLDEIIEQISEFSKRVILADANLDKVLSAYNKHRDKPIREQAENIIHLFTLTNLGAPAAFKYFDTTIDRKRYTSTKEVLDATLIHQSITGLYETRIDLSQLGGDGGGSSGSSGSSGSSGGTLGIEDEYRLHETSTEPDVSLGSTWLSDFPQAWAETGGMGLAVRQAPLIIPLKATSTPVSIQQYPMSHEARLGIKPHIQRLLDQGILVPCQSPWNTPLLPVKKPGTNDYRPVQDLREVNKRVEDIHPTVPNPYNLLSGLPPSHQWYTVLDLKDAFFCLRLHPTSQPLFAFEWRDPGMGISGQLTWTRLPQGFKNSPTLFNEALHRDLADFRIQHPDLILLQYVDDILLAATSELDCQQGTRALLQTLGDLGYRASAKKAQICQKQVKYLGYLLREGQRWLTEARKETVMGQPVPKTPRQLREFLGTAGFCRLWIPGFAEMAAPLYPLTKPGTLFSWGPDQQKAYQEIKQALLTAPALGLPDLTKPFELFVDEKQGYAKGVLTQKLGPWRRPVAYLSKKLDPVAAGWPPCLRMVAAIAVLTKDAGKLTMGQPLVILAPHAVEALVKQPPDRWLSNARMTHYQAMLLDTDRVQFGPVVALNPATLLPLPEEGAPHDCLEILAETHGTRPDLTDQPIPDADHTWYTDGSSFLQEGQRKAGAAVTTETEVIWAGALPAGTSAQRAELIALTQALKMAEGKRLNVYTDSRYAFATAHIHGEIYRRRGWLTSEGREIKNKSEILALLKALFLPKRLSIIHCLGHQKGDSAEARGNRLADQAAREAAIKTPPDTSTLLAGKRTADGSEFEKRTADGSEFESPKKKAKVE

SEQ ID NO: 6324 - protein, 2097 aa, synthetic construct
MPAAKRVKLDGGDKKYSIGLDIGTNSVGWAVITDEYKVPSKKFKVLGNTDRHSIKKNLIGALLFDSGETAEATRLKRTARRRYTRRKNRICYLQEIFSNEMAKVDDSFFHRLEESFLVEEDKKHERHPIFGNIVDEVAYHEKYPTIYHLRKKLVDSTDKADLRLIYLALAHMIKFRGHFLIEGDLNPDNSDVDKLFIQLVQTYNQLFEENPINASGVDAKAILSARLSKSRRLENLIAQLPGEKKNGLFGNLIALSLGLTPNFKSNFDLAEDAKLQLSKDTYDDDLDNLLAQIGDQYADLFLAAKNLSDAILLSDILRVNTEITKAPLSASMIKRYDEHHQDLTLLKALVRQQLPEKYKEIFFDQSKNGYAGYIDGGASQEEFYKFIKPILEKMDGTEELLVKLNREDLLRKQRTFDNGSIPHQIHLGELHAILRRQEDFYPFLKDNREKIEKILTFRIPYYVGPLARGNSRFAWMTRKSEETITPWNFEEVVDKGASAQSFIERMTNFDKNLPNEKVLPKHSLLYEYFTVYNELTKVKYVTEGMRKPAFLSGEQKKAIVDLLFKTNRKVTVKQLKEDYFKKIECFDSVEISGVEDRFNASLGTYHDLLKIIKDKDFLDNEENEDILEDIVLTLTLFEDREMIEERLKTYAHLFDDKVMKQLKRRRYTGWGRLSRKLINGIRDKQSGKTILDFLKSDGFANRNFMQLIHDDSLTFKEDIQKAQVSGQGDSLHEHIANLAGSPAIKKGILQTVKVVDELVKVMGRHKPENIVIEMARENQTTQKGQKNSRERMKRIEEGIKELGSQILKEHPVENTQLQNEKLYLYYLQNGRDMYVDQELDINRLSDYDVDHIVPQSFLKDDSIDNKVLTRSDKARGKSDNVPSEEVVKKMKNYWRQLLNAKLITQRKFDNLTKAERGGLSELDKAGFIKRQLVETRQITKHVAQILDSRMNTKYDENDKLIREVKVITLKSKLVSDFRKDFQFYKVREINNYHHAHDAYLNAVVGTALIKKYPKLESEFVYGDYKVYDVRKMIAKSEQEIGKATAKYFFYSNIMNFFKTEITLANGEIRKRPLIETNGETGEIVWDKGRDFATVRKVLSMPQVNIVKKTEVQTGGFSKESILPKRNSDKLIARKKDWDPKKYGGFDSPTVAYSVLVVAKVEKGKSKKLKSVKELLGITIMERSSFEKNPIDFLEAKGYKEVKKDLIIKLPKYSLFELENGRKRMLASAGELQKGNELALPSKYVNFLYLASHYEKLKGSPEDNEQKQLFVEQHKHYLDEIIEQISEFSKRVILADANLDKVLSAYNKHRDKPIREQAENIIHLFTLTNLGAPAAFKYFDTTIDRKRYTSTKEVLDATLIHQSITGLYETRIDLSQLGGDGGGSSGSSGSSGSSGGTLNIEDEYRLHETSKGPDVPLGSTWLSDFPQAWAETGGMGLAVRQAPLIIPLKATSTPVSIKQYPMSQEARLGIKPHIQRLLDQGILVPCQSPWNTPLLPVKKPGTNDYRPVQDLREVNKRVEDIHPTVPNPYNLLSGLPPSHQWYTVLDLKDAFFCLRLHPTSQSLFAFEWRDPEMGISGQLTWTRLPQGFKNSPTLFNEALHRDLADFRIQHPDLILLQYVDDLLLAATSELDCQQGTRALLQTLGDLGYRASAKKAQICQKQVKYLGYLLKEGQRWLTEARKETVMGQPTPKTPRQLREFLGTAGFCRLWIPGFAEMAAPLYPLTKPGTLFEWGPDQQKAYQEIKQALLTAPALGLPDLTKPFELFVDEKQGYAKGVLTQKLGPWRRPVAYLSKKLDPVAAGWPPCLRMVAAIAVLTKDAGKLTMGQPLVILAPHAVEALVKQPPDRWLSNARMTHYQALLLDTDRVQFGPIVALNPATLLPLPEEGLQHDCLDILAEAHGTRPDLTDQPLPDADHTWYTDGSSFLQEGQRKAGAAVTTETEVVWAKALPAGTSAQRAELIALTQALKMAEGKKLNVYTDSRYAFATAHIHGEIYRRRGWLTSEGKEIKNKDEILALLKALFLPKRLSIIHCPGHQKGNRAEARGNRMADQAAREVATRETPETSTLLAGKRTADGSEFEKRTADGSEFESPKKKAKVE

SEQ ID NO: 6325 - protein, 2088 aa, synthetic construct
MPAAKRVKLDGGDKKYSIGLDIGTNSVGWAVITDEYKVPSKKFKVLGNTDRHSIKKNLIGALLFDSGETAEATRLKRTARRRYTRRKNRICYLQEIFSNEMAKVDDSFFHRLEESFLVEEDKKHERHPIFGNIVDEVAYHEKYPTIYHLRKKLVDSTDKADLRLIYLALAHMIKFRGHFLIEGDLNPDNSDVDKLFIQLVQTYNQLFEENPINASGVDAKAILSARLSKSRRLENLIAQLPGEKKNGLFGNLIALSLGLTPNFKSNFDLAEDAKLQLSKDTYDDDLDNLLAQIGDQYADLFLAAKNLSDAILLSDILRVNTEITKAPLSASMIKRYDEHHQDLTLLKALVRQQLPEKYKEIFFDQSKNGYAGYIDGGASQEEFYKFIKPILEKMDGTEELLVKLNREDLLRKQRTFDNGSIPHQIHLGELHAILRRQEDFYPFLKDNREKIEKILTFRIPYYVGPLARGNSRFAWMTRKSEETITPWNFEEVVDKGASAQSFIERMTNFDKNLPNEKVLPKHSLLYEYFTVYNELTKVKYVTEGMRKPAFLSGEQKKAIVDLLFKTNRKVTVKQLKEDYFKKIECFDSVEISGVEDRFNASLGTYHDLLKIIKDKDFLDNEENEDILEDIVLTLTLFEDREMIEERLKTYAHLFDDKVMKQLKRRRYTGWGRLSRKLINGIRDKQSGKTILDFLKSDGFANRNFMQLIHDDSLTFKEDIQKAQVSGQGDSLHEHIANLAGSPAIKKGILQTVKVVDELVKVMGRHKPENIVIEMARENQTTQKGQKNSRERMKRIEEGIKELGSQILKEHPVENTQLQNEKLYLYYLQNGRDMYVDQELDINRLSDYDVDHIVPQSFLKDDSIDNKVLTRSDKARGKSDNVPSEEVVKKMKNYWRQLLNAKLITQRKFDNLTKAERGGLSELDKAGFIKRQLVETRQITKHVAQILDSRMNTKYDENDKLIREVKVITLKSKLVSDFRKDFQFYKVREINNYHHAHDAYLNAVVGTALIKKYPKLESEFVYGDYKVYDVRKMIAKSEQEIGKATAKYFFYSNIMNFFKTEITLANGEIRKRPLIETNGETGEIVWDKGRDFATVRKVLSMPQVNIVKKTEVQTGGFSKESILPKRNSDKLIARKKDWDPKKYGGFDSPTVAYSVLVVAKVEKGKSKKLKSVKELLGITIMERSSFEKNPIDFLEAKGYKEVKKDLIIKLPKYSLFELENGRKRMLASAGELQKGNELALPSKYVNFLYLASHYEKLKGSPEDNEQKQLFVEQHKHYLDEIIEQISEFSKRVILADANLDKVLSAYNKHRDKPIREQAENIIHLFTLTNLGAPAAFKYFDTTIDRKRYTSTKEVLDATLIHQSITGLYETRIDLSQLGGDGGGSSGSSGSSGSSGGIPWLMKKPLQLTTLVPLQEYEERLLKQTMLTGSYKEKLQSLFLKYDALWQHWENQVGHRRIKPHHIATGTVNPRPQKQYPINPKAKASIQTVINDLLKQGVLIQQNSIMNTPVYPVPKPDGKWRMVLDYREVNKTIPLIAAQNQHSAGILSSIFRGKYKTTLDLSNGFWAHSITPESYWLTAFTWLGQQYCWTRLPQGFLNSPALFNADVVDLLKEVPNVQVYVDDIYISHDDPREHLEQLEKVFSLLLNAGYVVSLKKSEIAQHEVEFLGFNITKEGRGLTETFKQKLLNITPPRDLKQLQSILGLLNFARNFIPNFSELVKPLYNIIATAPGKYITWTTDNSQQLQNIISMLNSAENLEERNPEVRLIMKVNTSPSAGYIRFYNEFAKRPIMYLNYVYTKAEVKFTNTEKLLTTIHKGLIKALDLGMGQEILVYSPIVSMTKIQKTPLPERKALPIRWITWMSYLEDPRIQFHYDKTLPELQQVPTVTDDIIAKIKHPSEFSMVFYTDGSAIKHPNVNKSHNAGMGIAQVQFKPEFTVINTWSIPLGDHTAQLAEVAAVEFACKKALKIDGPVLIVTDSFYVAESVNKELPYWQSNGFFNNKKKPLKHVSKWKSIADCIQLKPDIIIIHEKGHQPTASTFHTEGNNLADKLATQGSYVVNAGKRTADGSEFEKRTADGSEFESPKKKAKVE

SEQ ID NO: 6326 - protein, 2177 aa, synthetic construct
MPAAKRVKLDGGDKKYSIGLDIGTNSVGWAVITDEYKVPSKKFKVLGNTDRHSIKKNLIGALLFDSGETAEATRLKRTARRRYTRRKNRICYLQEIFSNEMAKVDDSFFHRLEESFLVEEDKKHERHPIFGNIVDEVAYHEKYPTIYHLRKKLVDSTDKADLRLIYLALAHMIKFRGHFLIEGDLNPDNSDVDKLFIQLVQTYNQLFEENPINASGVDAKAILSARLSKSRRLENLIAQLPGEKKNGLFGNLIALSLGLTPNFKSNFDLAEDAKLQLSKDTYDDDLDNLLAQIGDQYADLFLAAKNLSDAILLSDILRVNTEITKAPLSASMIKRYDEHHQDLTLLKALVRQQLPEKYKEIFFDQSKNGYAGYIDGGASQEEFYKFIKPILEKMDGTEELLVKLNREDLLRKQRTFDNGSIPHQIHLGELHAILRRQEDFYPFLKDNREKIEKILTFRIPYYVGPLARGNSRFAWMTRKSEETITPWNFEEVVDKGASAQSFIERMTNFDKNLPNEKVLPKHSLLYEYFTVYNELTKVKYVTEGMRKPAFLSGEQKKAIVDLLFKTNRKVTVKQLKEDYFKKIECFDSVEISGVEDRFNASLGTYHDLLKIIKDKDFLDNEENEDILEDIVLTLTLFEDREMIEERLKTYAHLFDDKVMKQLKRRRYTGWGRLSRKLINGIRDKQSGKTILDFLKSDGFANRNFMQLIHDDSLTFKEDIQKAQVSGQGDSLHEHIANLAGSPAIKKGILQTVKVVDELVKVMGRHKPENIVIEMARENQTTQKGQKNSRERMKRIEEGIKELGSQILKEHPVENTQLQNEKLYLYYLQNGRDMYVDQELDINRLSDYDVDHIVPQSFLKDDSIDNKVLTRSDKARGKSDNVPSEEVVKKMKNYWRQLLNAKLITQRKFDNLTKAERGGLSELDKAGFIKRQLVETRQITKHVAQILDSRMNTKYDENDKLIREVKVITLKSKLVSDFRKDFQFYKVREINNYHHAHDAYLNAVVGTALIKKYPKLESEFVYGDYKVYDVRKMIAKSEQEIGKATAKYFFYSNIMNFFKTEITLANGEIRKRPLIETNGETGEIVWDKGRDFATVRKVLSMPQVNIVKKTEVQTGGFSKESILPKRNSDKLIARKKDWDPKKYGGFDSPTVAYSVLVVAKVEKGKSKKLKSVKELLGITIMERSSFEKNPIDFLEAKGYKEVKKDLIIKLPKYSLFELENGRKRMLASAGELQKGNELALPSKYVNFLYLASHYEKLKGSPEDNEQKQLFVEQHKHYLDEIIEQISEFSKRVILADANLDKVLSAYNKHRDKPIREQAENIIHLFTLTNLGAPAAFKYFDTTIDRKRYTSTKEVLDATLIHQSITGLYETRIDLSQLGGDGGGSSGSSGSSGSSGGMDPLQLLQPLEAEIKGTKLKAHWNSGATITCVPQAFLEEEVPIKNIWIKTIHGEKEQPVYYLTFKIQGRKVEAEVISSPYDYILVSPSDIPWLMKKPLQLTTLVPLQEYEERLLKQTMLTGSYKEKLQSLFLKYDALWQHWENQVGHRRIKPHHIATGTVNPRPQKQYPINPKAKASIQTVINDLLKQGVLIQQNSIMNTPVYPVPKPDGKWRMVLDYREVNKTIPLIAAQNQHSAGILSSIFRGKYKTTLDLSNGFWAHSITPESYWLTAFTWLGQQYCWTRLPQGFLNSPALFNADVVDLLKEVPNVQVYVDDIYISHDDPREHLEQLEKVFSLLLNAGYVVSLKKSEIAQHEVEFLGFNITKEGRGLTETFKQKLLNITPPRDLKQLQSILGKLNFARNFIPNFSELVKPLYNIIATAPGKYITWTTDNSQQLQNIISMLNSAENLEERNPEVRLIMKVNTSPSAGYIRFYNEFAKRPIMYLNYVYTKAEVKFTNTEKLLTTIHKGLIKALDLGMGQEILVYSPIVSMTKIQKTPLPERKALPIRWITWMSYLEDPRIQFHYDKTLPELQQVPTVTDDIIAKIKHPSEFSMVFYTDGSAIKHPNVNKSHNAGMGIAQVQFKPEFTVINTWSIPLGDHTAQLAEVAAVEFACKKALKIDGPVLIVTDSFYVAESVNKELPYWQSNGFFNNKKKPLKHVSKWKSIADCIQLKPDIIIIHEKGHQPTASTFHTEGNNLADKLATQGSYVVNAGKRTADGSEFEKRTADGSEFESPKKKAKVE

SEQ ID NO: 6327 - protein, 2097 aa, synthetic construct
MPAAKRVKLDGGDKKYSIGLDIGTNSVGWAVITDEYKVPSKKFKVLGNTDRHSIKKNLIGALLFDSGETAEATRLKRTARRRYTRRKNRICYLQEIFSNEMAKVDDSFFHRLEESFLVEEDKKHERHPIFGNIVDEVAYHEKYPTIYHLRKKLVDSTDKADLRLIYLALAHMIKFRGHFLIEGDLNPDNSDVDKLFIQLVQTYNQLFEENPINASGVDAKAILSARLSKSRRLENLIAQLPGEKKNGLFGNLIALSLGLTPNFKSNFDLAEDAKLQLSKDTYDDDLDNLLAQIGDQYADLFLAAKNLSDAILLSDILRVNTEITKAPLSASMIKRYDEHHQDLTLLKALVRQQLPEKYKEIFFDQSKNGYAGYIDGGASQEEFYKFIKPILEKMDGTEELLVKLNREDLLRKQRTFDNGSIPHQIHLGELHAILRRQEDFYPFLKDNREKIEKILTFRIPYYVGPLARGNSRFAWMTRKSEETITPWNFEEVVDKGASAQSFIERMTNFDKNLPNEKVLPKHSLLYEYFTVYNELTKVKYVTEGMRKPAFLSGEQKKAIVDLLFKTNRKVTVKQLKEDYFKKIECFDSVEISGVEDRFNASLGTYHDLLKIIKDKDFLDNEENEDILEDIVLTLTLFEDREMIEERLKTYAHLFDDKVMKQLKRRRYTGWGRLSRKLINGIRDKQSGKTILDFLKSDGFANRNFMQLIHDDSLTFKEDIQKAQVSGQGDSLHEHIANLAGSPAIKKGILQTVKVVDELVKVMGRHKPENIVIEMARENQTTQKGQKNSRERMKRIEEGIKELGSQILKEHPVENTQLQNEKLYLYYLQNGRDMYVDQELDINRLSDYDVDHIVPQSFLKDDSIDNKVLTRSDKARGKSDNVPSEEVVKKMKNYWRQLLNAKLITQRKFDNLTKAERGGLSELDKAGFIKRQLVETRQITKHVAQILDSRMNTKYDENDKLIREVKVITLKSKLVSDFRKDFQFYKVREINNYHHAHDAYLNAVVGTALIKKYPKLESEFVYGDYKVYDVRKMIAKSEQEIGKATAKYFFYSNIMNFFKTEITLANGEIRKRPLIETNGETGEIVWDKGRDFATVRKVLSMPQVNIVKKTEVQTGGFSKESILPKRNSDKLIARKKDWDPKKYGGFDSPTVAYSVLVVAKVEKGKSKKLKSVKELLGITIMERSSFEKNPIDFLEAKGYKEVKKDLIIKLPKYSLFELENGRKRMLASAGELQKGNELALPSKYVNFLYLASHYEKLKGSPEDNEQKQLFVEQHKHYLDEIIEQISEFSKRVILADANLDKVLSAYNKHRDKPIREQAENIIHLFTLTNLGAPAAFKYFDTTIDRKRYTSTKEVLDATLIHQSITGLYETRIDLSQLGGDGGGSSGSSGSSGSSGGTLNIEDEYRLHETSKEPDVPLGSTWLSDFPQAWAETGGMGLAVRQAPLIIPLKATSTPVSIKQYPMSQEARLGIKPHIQRLLDQGILVPCQSPWNTPLLPVKKPGTNDYRPVQDLREVNKRVEDIHPTVPNPYNLLSGLPPSHQWYTVLDLKDAFFCLRLHPTSQPLFAFEWRDPEMGISGQLTWTRLPQGFKNSPTLFNEALHRDLADFRIQHPDLILLQYVDDLLLAATSEQDCQRGTRALLQTLGNLGYRASAKKAQICQKQVKYLGYLLKEGQRWLTEARKETVMGQPTPKTPRQLREFLGTAGFCRLWIPGFAEMAAPLYPLTKPGTLFNWGPDQQKAYQEIKQALLTAPALGLPDLTKPFELFVDEKQGYAKGVLTQKLGPWRRPVAYLSKKLDPVAAGWPPCLRMVAAIAVLTKDAGKLTMGQPLVILAPHAVEALVKQPPDRWLSNARMTHYQAMLLDTDRVQFGPVVALNPATLLPLPEKEAPHDCLEILAETHGTRPDLTDQPIPDADYTWYTDGSSFLQEGQRRAGAAVTTETEVIWARALPAGTSAQRAELIALTQALKMAEGKKLNVYTDSRYAFATAHVHGEIYRRRGWLTSEGREIKNKNEILALLKALFLPKRLSIIHCPGHQKGNSAEARGNRMADQAAREAAMKAVLETSTLLAGKRTADGSEFEKRTADGSEFESPKKKAKVE

SEQ ID NO: 6328 - protein, 2102 aa, synthetic construct
MPAAKRVKLDGGDKKYSIGLDIGTNSVGWAVITDEYKVPSKKFKVLGNTDRHSIKKNLIGALLFDSGETAEATRLKRTARRRYTRRKNRICYLQEIFSNEMAKVDDSFFHRLEESFLVEEDKKHERHPIFGNIVDEVAYHEKYPTIYHLRKKLVDSTDKADLRLIYLALAHMIKFRGHFLIEGDLNPDNSDVDKLFIQLVQTYNQLFEENPINASGVDAKAILSARLSKSRRLENLIAQLPGEKKNGLFGNLIALSLGLTPNFKSNFDLAEDAKLQLSKDTYDDDLDNLLAQIGDQYADLFLAAKNLSDAILLSDILRVNTEITKAPLSASMIKRYDEHHQDLTLLKALVRQQLPEKYKEIFFDQSKNGYAGYIDGGASQEEFYKFIKPILEKMDGTEELLVKLNREDLLRKQRTFDNGSIPHQIHLGELHAILRRQEDFYPFLKDNREKIEKILTFRIPYYVGPLARGNSRFAWMTRKSEETITPWNFEEVVDKGASAQSFIERMTNFDKNLPNEKVLPKHSLLYEYFTVYNELTKVKYVTEGMRKPAFLSGEQKKAIVDLLFKTNRKVTVKQLKEDYFKKIECFDSVEISGVEDRFNASLGTYHDLLKIIKDKDFLDNEENEDILEDIVLTLTLFEDREMIEERLKTYAHLFDDKVMKQLKRRRYTGWGRLSRKLINGIRDKQSGKTILDFLKSDGFANRNFMQLIHDDSLTFKEDIQKAQVSGQGDSLHEHIANLAGSPAIKKGILQTVKVVDELVKVMGRHKPENIVIEMARENQTTQKGQKNSRERMKRIEEGIKELGSQILKEHPVENTQLQNEKLYLYYLQNGRDMYVDQELDINRLSDYDVDHIVPQSFLKDDSIDNKVLTRSDKARGKSDNVPSEEVVKKMKNYWRQLLNAKLITQRKFDNLTKAERGGLSELDKAGFIKRQLVETRQITKHVAQILDSRMNTKYDENDKLIREVKVITLKSKLVSDFRKDFQFYKVREINNYHHAHDAYLNAVVGTALIKKYPKLESEFVYGDYKVYDVRKMIAKSEQEIGKATAKYFFYSNIMNFFKTEITLANGEIRKRPLIETNGETGEIVWDKGRDFATVRKVLSMPQVNIVKKTEVQTGGFSKESILPKRNSDKLIARKKDWDPKKYGGFDSPTVAYSVLVVAKVEKGKSKKLKSVKELLGITIMERSSFEKNPIDFLEAKGYKEVKKDLIIKLPKYSLFELENGRKRMLASAGELQKGNELALPSKYVNFLYLASHYEKLKGSPEDNEQKQLFVEQHKHYLDEIIEQISEFSKRVILADANLDKVLSAYNKHRDKPIREQAENIIHLFTLTNLGAPAAFKYFDTTIDRKRYTSTKEVLDATLIHQSITGLYETRIDLSQLGGDGGGSSGSSGSSGSSGSSGGTAPLEEEYRLFLEAPIQNVTLLEQWKREIPKVWAEINPPGLASTQAPIHVQLLSTALPVRVRQYPITLEAKRSLRETIRKFRAAGILRPVHSPWNTPLLPVRKSGTSEYRMVQDLREVNKRVETIHPTVPNPYTLLSLLPPDRIWYSVLDLKDAFFCIPLAPESQLIFAFEWADAEEGESGQLTWTRLPQGFKNSPTLFDEALNRDLQGFRLDHPSVSLLQYVDDLLIAADTQAACLSATRDLLMTLAELGYRVSGKKAQLCQEEVTYLGFKIHKGSRSLSNSRTQAILQIPVPKTKRQVREFLGTIGYCRLWIPGFAELAQPLYAATRGGNDPLVWGEKEEEAFQSLKLALTQPPALALPSLDKPFQLFVEETSGAAKGVLTQALGPWKRPVAYLSKRLDPVAAGWPRCLRAIAAAALLTREASKLTFGQDIEITSSHNLESLLRSPPDKWLTNARITQYQVLLLDPPRVRFKQTAALNPATLLPETDDTLPIHHCLDTLDSLTSTRPDLTDQPLAQAEATLFTDGSSYIRDGKRYAGAAVVTLDSVIWAEPLPIGTSAQKAELIALTKALEWSKDKSVNIYTDSRYAFATLHVHGMIYRERGLLTAGGKAIKNAPEILALLTAVWLPKRVAVMHCKGHQKDDAPTSTGNRRADEVAREVAIRPLSTQATISAGKRTADGSEFEKRTADGSEFESPKKKAKVE

SEQ ID NO: 6329 - protein, 2102 aa, synthetic construct
MPAAKRVKLDGGDKKYSIGLDIGTNSVGWAVITDEYKVPSKKFKVLGNTDRHSIKKNLIGALLFDSGETAEATRLKRTARRRYTRRKNRICYLQEIFSNEMAKVDDSFFHRLEESFLVEEDKKHERHPIFGNIVDEVAYHEKYPTIYHLRKKLVDSTDKADLRLIYLALAHMIKFRGHFLIEGDLNPDNSDVDKLFIQLVQTYNQLFEENPINASGVDAKAILSARLSKSRRLENLIAQLPGEKKNGLFGNLIALSLGLTPNFKSNFDLAEDAKLQLSKDTYDDDLDNLLAQIGDQYADLFLAAKNLSDAILLSDILRVNTEITKAPLSASMIKRYDEHHQDLTLLKALVRQQLPEKYKEIFFDQSKNGYAGYIDGGASQEEFYKFIKPILEKMDGTEELLVKLNREDLLRKQRTFDNGSIPHQIHLGELHAILRRQEDFYPFLKDNREKIEKILTFRIPYYVGPLARGNSRFAWMTRKSEETITPWNFEEVVDKGASAQSFIERMTNFDKNLPNEKVLPKHSLLYEYFTVYNELTKVKYVTEGMRKPAFLSGEQKKAIVDLLFKTNRKVTVKQLKEDYFKKIECFDSVEISGVEDRFNASLGTYHDLLKIIKDKDFLDNEENEDILEDIVLTLTLFEDREMIEERLKTYAHLFDDKVMKQLKRRRYTGWGRLSRKLINGIRDKQSGKTILDFLKSDGFANRNFMQLIHDDSLTFKEDIQKAQVSGQGDSLHEHIANLAGSPAIKKGILQTVKVVDELVKVMGRHKPENIVIEMARENQTTQKGQKNSRERMKRIEEGIKELGSQILKEHPVENTQLQNEKLYLYYLQNGRDMYVDQELDINRLSDYDVDHIVPQSFLKDDSIDNKVLTRSDKARGKSDNVPSEEVVKKMKNYWRQLLNAKLITQRKFDNLTKAERGGLSELDKAGFIKRQLVETRQITKHVAQILDSRMNTKYDENDKLIREVKVITLKSKLVSDFRKDFQFYKVREINNYHHAHDAYLNAVVGTALIKKYPKLESEFVYGDYKVYDVRKMIAKSEQEIGKATAKYFFYSNIMNFFKTEITLANGEIRKRPLIETNGETGEIVWDKGRDFATVRKVLSMPQVNIVKKTEVQTGGFSKESILPKRNSDKLIARKKDWDPKKYGGFDSPTVAYSVLVVAKVEKGKSKKLKSVKELLGITIMERSSFEKNPIDFLEAKGYKEVKKDLIIKLPKYSLFELENGRKRMLASAGELQKGNELALPSKYVNFLYLASHYEKLKGSPEDNEQKQLFVEQHKHYLDEIIEQISEFSKRVILADANLDKVLSAYNKHRDKPIREQAENIIHLFTLTNLGAPAAFKYFDTTIDRKRYTSTKEVLDATLIHQSITGLYETRIDLSQLGGDGGGSSGSSGSSGSSGSSGGTAPLEEEYRLFLEAPIQNVTLLEQWKREIPKVWAEINPPGLASTQAPIHVQLLSTALPVRVRQYPITLEAKRSLRETIRKFRAAGILRPVHSPWNTPLLPVRKSGTSEYRMVQDLREVNKRVETIHPTVPNPYTLLSLLPPDRIWYSVLDLKDAFFCIPLAPESQLIFAFEWADAEEGESGQLTWTRLPQGFKNSPTLFNEALNRDLQGFRLDHPSVSLLQYVDDLLIAADTQAACLSATRDLLMTLAELGYRVSGKKAQLCQEEVTYLGFKIHKGSRSLSNSRTQAILQIPVPKTKRQVREFLGKIGYCRLFIPGFAELAQPLYAATRPGNDPLVWGEKEEEAFQSLKLALTQPPALALPSLDKPFQLFVEETSGAAKGVLTQALGPWKRPVAYLSKRLDPVAAGWPRCLRAIAAAALLTREASKLTFGQDIEITSSHNLESLLRSPPDKWLTNARITQYQVLLLDPPRVRFKQTAALNPATLLPETDDTLPIHHCLDTLDSLTSTRPDLTDQPLAQAEATLFTDGSSYIRDGKRYAGAAVVTLDSVIWAEPLPIGTSAQKAELIALTKALEWSKDKSVNIYTDSRYAFATLHVHGMIYRERGWLTAGGKAIKNAPEILALLTAVWLPKRVAVMHCKGHQKDDAPTSTGNRRADEVAREVAIRPLSTQATISAGKRTADGSEFEKRTADGSEFESPKKKAKVE

SEQ ID NO: 6330 - protein, 2131 aa, synthetic construct
MPAAKRVKLDGGDKKYSIGLDIGTNSVGWAVITDEYKVPSKKFKVLGNTDRHSIKKNLIGALLFDSGETAEATRLKRTARRRYTRRKNRICYLQEIFSNEMAKVDDSFFHRLEESFLVEEDKKHERHPIFGNIVDEVAYHEKYPTIYHLRKKLVDSTDKADLRLIYLALAHMIKFRGHFLIEGDLNPDNSDVDKLFIQLVQTYNQLFEENPINASGVDAKAILSARLSKSRRLENLIAQLPGEKKNGLFGNLIALSLGLTPNFKSNFDLAEDAKLQLSKDTYDDDLDNLLAQIGDQYADLFLAAKNLSDAILLSDILRVNTEITKAPLSASMIKRYDEHHQDLTLLKALVRQQLPEKYKEIFFDQSKNGYAGYIDGGASQEEFYKFIKPILEKMDGTEELLVKLNREDLLRKQRTFDNGSIPHQIHLGELHAILRRQEDFYPFLKDNREKIEKILTFRIPYYVGPLARGNSRFAWMTRKSEETITPWNFEEVVDKGASAQSFIERMTNFDKNLPNEKVLPKHSLLYEYFTVYNELTKVKYVTEGMRKPAFLSGEQKKAIVDLLFKTNRKVTVKQLKEDYFKKIECFDSVEISGVEDRFNASLGTYHDLLKIIKDKDFLDNEENEDILEDIVLTLTLFEDREMIEERLKTYAHLFDDKVMKQLKRRRYTGWGRLSRKLINGIRDKQSGKTILDFLKSDGFANRNFMQLIHDDSLTFKEDIQKAQVSGQGDSLHEHIANLAGSPAIKKGILQTVKVVDELVKVMGRHKPENIVIEMARENQTTQKGQKNSRERMKRIEEGIKELGSQILKEHPVENTQLQNEKLYLYYLQNGRDMYVDQELDINRLSDYDVDHIVPQSFLKDDSIDNKVLTRSDKARGKSDNVPSEEVVKKMKNYWRQLLNAKLITQRKFDNLTKAERGGLSELDKAGFIKRQLVETRQITKHVAQILDSRMNTKYDENDKLIREVKVITLKSKLVSDFRKDFQFYKVREINNYHHAHDAYLNAVVGTALIKKYPKLESEFVYGDYKVYDVRKMIAKSEQEIGKATAKYFFYSNIMNFFKTEITLANGEIRKRPLIETNGETGEIVWDKGRDFATVRKVLSMPQVNIVKKTEVQTGGFSKESILPKRNSDKLIARKKDWDPKKYGGFDSPTVAYSVLVVAKVEKGKSKKLKSVKELLGITIMERSSFEKNPIDFLEAKGYKEVKKDLIIKLPKYSLFELENGRKRMLASAGELQKGNELALPSKYVNFLYLASHYEKLKGSPEDNEQKQLFVEQHKHYLDEIIEQISEFSKRVILADANLDKVLSAYNKHRDKPIREQAENIIHLFTLTNLGAPAAFKYFDTTIDRKRYTSTKEVLDATLIHQSITGLYETRIDLSQLGGDGGGSSGSSGSSGSSGSSGGLLGRDLLTKLKAQIQFSTEGPQVTWEDRPAMCLVLNLEEEYRLHEKPVPPSIDPSWLQLFPMVWAEKAGMGLANQVPPVVVELKSDASPVAVRQYPMSKEAREGIRPHIQRFLDLGILVPCQSPWNTPLLPVKKPGTNDYRPVQDLREVNKRVQDIHPTVPNPYNLLSSLPPSHTWYSVLDLKDAFFCLKLHPNSQPLFAFEWRDPEKGNTGQLTWTRLPQGFKNSPTLFDEALHRDLASFRALNPQVVMLQYVDDLLVAAPTYRDCKEGTRRLLQELSKLGYRVSAKKAQLCREEVTYLGYLLKGGKRWLTPARKATVMKIPTPTTPRQVREFLGTAGFCRLWIPGFASLAAPLYPLTREKVPFTWTEAHQEAFGRIKEALLSAPALALPDLTKPFALYVDEKEGVARGVLTQTLGPWRRPVAYLSKKLDPVASGWPTCLKAIAAVALLLKDADKLTLGQNVLVIAPHNLESIVRQPPDRWMTNARMTHYQSLLLNERVSFAPPAILNPATLLPVESDDTPIHICSEILAEETGTRPDLRDQPLPGVPAWYTDGSSFIMDGRRQAGAAIVDNKRTVWASNLPEGTSAQKAELIALTQALRLAEGKSINIYTDSRYAFATAHVHGAIYKQRGLLTSAGKDIKNKEEILALLEAIHLPKRVAIIHCPGHQRGTDPVATGNRKADEAAKQAAQSTRILTETTKNAGKRTADGSEFEKRTADGSEFESPKKKAKVE

SEQ ID NO: 6331 - protein, 2222 aa, synthetic construct
MPAAKRVKLDGGDKKYSIGLDIGTNSVGWAVITDEYKVPSKKFKVLGNTDRHSIKKNLIGALLFDSGETAEATRLKRTARRRYTRRKNRICYLQEIFSNEMAKVDDSFFHRLEESFLVEEDKKHERHPIFGNIVDEVAYHEKYPTIYHLRKKLVDSTDKADLRLIYLALAHMIKFRGHFLIEGDLNPDNSDVDKLFIQLVQTYNQLFEENPINASGVDAKAILSARLSKSRRLENLIAQLPGEKKNGLFGNLIALSLGLTPNFKSNFDLAEDAKLQLSKDTYDDDLDNLLAQIGDQYADLFLAAKNLSDAILLSDILRVNTEITKAPLSASMIKRYDEHHQDLTLLKALVRQQLPEKYKEIFFDQSKNGYAGYIDGGASQEEFYKFIKPILEKMDGTEELLVKLNREDLLRKQRTFDNGSIPHQIHLGELHAILRRQEDFYPFLKDNREKIEKILTFRIPYYVGPLARGNSRFAWMTRKSEETITPWNFEEVVDKGASAQSFIERMTNFDKNLPNEKVLPKHSLLYEYFTVYNELTKVKYVTEGMRKPAFLSGEQKKAIVDLLFKTNRKVTVKQLKEDYFKKIECFDSVEISGVEDRFNASLGTYHDLLKIIKDKDFLDNEENEDILEDIVLTLTLFEDREMIEERLKTYAHLFDDKVMKQLKRRRYTGWGRLSRKLINGIRDKQSGKTILDFLKSDGFANRNFMQLIHDDSLTFKEDIQKAQVSGQGDSLHEHIANLAGSPAIKKGILQTVKVVDELVKVMGRHKPENIVIEMARENQTTQKGQKNSRERMKRIEEGIKELGSQILKEHPVENTQLQNEKLYLYYLQNGRDMYVDQELDINRLSDYDVDHIVPQSFLKDDSIDNKVLTRSDKARGKSDNVPSEEVVKKMKNYWRQLLNAKLITQRKFDNLTKAERGGLSELDKAGFIKRQLVETRQITKHVAQILDSRMNTKYDENDKLIREVKVITLKSKLVSDFRKDFQFYKVREINNYHHAHDAYLNAVVGTALIKKYPKLESEFVYGDYKVYDVRKMIAKSEQEIGKATAKYFFYSNIMNFFKTEITLANGEIRKRPLIETNGETGEIVWDKGRDFATVRKVLSMPQVNIVKKTEVQTGGFSKESILPKRNSDKLIARKKDWDPKKYGGFDSPTVAYSVLVVAKVEKGKSKKLKSVKELLGITIMERSSFEKNPIDFLEAKGYKEVKKDLIIKLPKYSLFELENGRKRMLASAGELQKGNELALPSKYVNFLYLASHYEKLKGSPEDNEQKQLFVEQHKHYLDEIIEQISEFSKRVILADANLDKVLSAYNKHRDKPIREQAENIIHLFTLTNLGAPAAFKYFDTTIDRKRYTSTKEVLDATLIHQSITGLYETRIDLSQLGGDGGGSSGSSGSSGSSGSSGGTLGDQGSRGSDPLPEPRVTLTVEGIPTEFLVNTGAEHSVLTKPMGKMGSKRTVVAGATGSKVYPWTTKRLLKIGQKQVTHSFLVIPECPAPLLGRDLLTKLKAQIQFSTEGPQVTWEDRPAMCLVLNLEEEYRLHEKPVPPSIDPSWLQLFPMVWAEKAGMGLANQVPPVVVELKSDASPVAVRQYPMSKEAREGIRPHIQRFLDLGILVPCQSPWNTPLLPVKKPGTNDYRPVQDLREVNKRVQDIHPTVPNPYNLLSSLPPSHTWYSVLDLKDAFFCLKLHPNSQPLFAFEWRDPEKGNTGQLTWTRLPQGFKNSPTLFNEALHRDLASFRALNPQVVMLQYVDDLLVAAPTYRDCKEGTRRLLQELSKLGYRVSAKKAQLCREEVTYLGYLLKGGKRWLTPARKATVMKIPTPTTPRQVREFLGTAGFCRLWIPGFASLAAPLYPLTRPKVPFTWTEAHQEAFGRIKEALLSAPALALPDLTKPFALYVDEKEGVARGVLTQTLGPWRRPVAYLSKKLDPVASGWPTCLKAIAAVALLLKDADKLTLGQNVLVIAPHNLESIVRQPPDRWMTNARMTHYQSLLLNERVSFAPPAILNPATLLPVESDDTPIHICSEILAEETGTRPDLRDQPLPGVPAWYTDGSSFIMDGRRQAGAAIVDNKRTVWASNLPEGTSAQKAELIALTQALRLAEGKSINIYTDSRYAFATAHVHGAIYKQRGWLTSAGKDIKNKEEILALLEAIHLPKRVAIIHCPGHQRGTDPVATGNRKADEAAKQAAQSTRILTETTKNAGKRTADGSEFEKRTADGSEFESPKKKAKVE

SEQ ID NO: 6332 - protein, 2100 aa, synthetic construct
MPAAKRVKLDGGDKKYSIGLDIGTNSVGWAVITDEYKVPSKKFKVLGNTDRHSIKKNLIGALLFDSGETAEATRLKRTARRRYTRRKNRICYLQEIFSNEMAKVDDSFFHRLEESFLVEEDKKHERHPIFGNIVDEVAYHEKYPTIYHLRKKLVDSTDKADLRLIYLALAHMIKFRGHFLIEGDLNPDNSDVDKLFIQLVQTYNQLFEENPINASGVDAKAILSARLSKSRRLENLIAQLPGEKKNGLFGNLIALSLGLTPNFKSNFDLAEDAKLQLSKDTYDDDLDNLLAQIGDQYADLFLAAKNLSDAILLSDILRVNTEITKAPLSASMIKRYDEHHQDLTLLKALVRQQLPEKYKEIFFDQSKNGYAGYIDGGASQEEFYKFIKPILEKMDGTEELLVKLNREDLLRKQRTFDNGSIPHQIHLGELHAILRRQEDFYPFLKDNREKIEKILTFRIPYYVGPLARGNSRFAWMTRKSEETITPWNFEEVVDKGASAQSFIERMTNFDKNLPNEKVLPKHSLLYEYFTVYNELTKVKYVTEGMRKPAFLSGEQKKAIVDLLFKTNRKVTVKQLKEDYFKKIECFDSVEISGVEDRFNASLGTYHDLLKIIKDKDFLDNEENEDILEDIVLTLTLFEDREMIEERLKTYAHLFDDKVMKQLKRRRYTGWGRLSRKLINGIRDKQSGKTILDFLKSDGFANRNFMQLIHDDSLTFKEDIQKAQVSGQGDSLHEHIANLAGSPAIKKGILQTVKVVDELVKVMGRHKPENIVIEMARENQTTQKGQKNSRERMKRIEEGIKELGSQILKEHPVENTQLQNEKLYLYYLQNGRDMYVDQELDINRLSDYDVDHIVPQSFLKDDSIDNKVLTRSDKARGKSDNVPSEEVVKKMKNYWRQLLNAKLITQRKFDNLTKAERGGLSELDKAGFIKRQLVETRQITKHVAQILDSRMNTKYDENDKLIREVKVITLKSKLVSDFRKDFQFYKVREINNYHHAHDAYLNAVVGTALIKKYPKLESEFVYGDYKVYDVRKMIAKSEQEIGKATAKYFFYSNIMNFFKTEITLANGEIRKRPLIETNGETGEIVWDKGRDFATVRKVLSMPQVNIVKKTEVQTGGFSKESILPKRNSDKLIARKKDWDPKKYGGFDSPTVAYSVLVVAKVEKGKSKKLKSVKELLGITIMERSSFEKNPIDFLEAKGYKEVKKDLIIKLPKYSLFELENGRKRMLASAGELQKGNELALPSKYVNFLYLASHYEKLKGSPEDNEQKQLFVEQHKHYLDEIIEQISEFSKRVILADANLDKVLSAYNKHRDKPIREQAENIIHLFTLTNLGAPAAFKYFDTTIDRKRYTSTKEVLDATLIHQSITGLYETRIDLSQLGGDGGGSSGSSGSSGSSGSSGGTLNLEDEYRLYETSAEPEVSPGSTWLSDFPQAWAETGGMGLAVRQAPLIIPLKATSTPVSIKQYPMSQEAKLGIKPHIQRLLDQGILVPCQSPWNTPLLPVKKPGTNDYRPVQDLREVNKRVEDIHPTVPNPYNLLSGLPPSHRWYTVLDLKDAFFCLRLHPTSQPLFAFEWRDPGMGISGQLTWTRLPQGFKNSPTLFNEALHRDLADFRIQHPDLILLQYVDDILLAATSELDCQQGTRALLLTLGNLGYRASAKKAQLCQKQVKYLGYLLKEGQRWLTEARKETVMGQPTPKTPRQLREFLGTAGFCRLWIPGFAEMAAPLYPLTKPGTLFNWGPDQQKAYQEIKQALLTAPALGLPDLTKPFELFVDEKQGYAKGVLTQKLGPWRRPVAYLSKKLDPVAAGWPPCLRMVAAIAVLRKDAGKLTMGQPLVILAPHAVEALVKQPPDRWLSNARMTHYQAMLLDTDRVQFGPVVALNPATLLPLPEEGAPHDCLEILAETHGTRPDLTDQPIPDADHTWYTDGSSFLQEGQRKAGAAVTTETEVIWARALPAGTSAQRAELIALTQALKMAEGKRLNVYTDSRYAFATAHIHGEIYRRRGWLTSEGREIKNKSEILALLKALFLPKRLSIIHCLGHQKGDSAEARGNRLADQAAREAAIKTPPDTSTLLAGKRTADGSEFEKRTADGSEFESPKKKAKVE

SEQ ID NO: 6333 - protein, 2100 aa, synthetic construct
MPAAKRVKLDGGDKKYSIGLDIGTNSVGWAVITDEYKVPSKKFKVLGNTDRHSIKKNLIGALLFDSGETAEATRLKRTARRRYTRRKNRICYLQEIFSNEMAKVDDSFFHRLEESFLVEEDKKHERHPIFGNIVDEVAYHEKYPTIYHLRKKLVDSTDKADLRLIYLALAHMIKFRGHFLIEGDLNPDNSDVDKLFIQLVQTYNQLFEENPINASGVDAKAILSARLSKSRRLENLIAQLPGEKKNGLFGNLIALSLGLTPNFKSNFDLAEDAKLQLSKDTYDDDLDNLLAQIGDQYADLFLAAKNLSDAILLSDILRVNTEITKAPLSASMIKRYDEHHQDLTLLKALVRQQLPEKYKEIFFDQSKNGYAGYIDGGASQEEFYKFIKPILEKMDGTEELLVKLNREDLLRKQRTFDNGSIPHQIHLGELHAILRRQEDFYPFLKDNREKIEKILTFRIPYYVGPLARGNSRFAWMTRKSEETITPWNFEEVVDKGASAQSFIERMTNFDKNLPNEKVLPKHSLLYEYFTVYNELTKVKYVTEGMRKPAFLSGEQKKAIVDLLFKTNRKVTVKQLKEDYFKKIECFDSVEISGVEDRFNASLGTYHDLLKIIKDKDFLDNEENEDILEDIVLTLTLFEDREMIEERLKTYAHLFDDKVMKQLKRRRYTGWGRLSRKLINGIRDKQSGKTILDFLKSDGFANRNFMQLIHDDSLTFKEDIQKAQVSGQGDSLHEHIANLAGSPAIKKGILQTVKVVDELVKVMGRHKPENIVIEMARENQTTQKGQKNSRERMKRIEEGIKELGSQILKEHPVENTQLQNEKLYLYYLQNGRDMYVDQELDINRLSDYDVDHIVPQSFLKDDSIDNKVLTRSDKARGKSDNVPSEEVVKKMKNYWRQLLNAKLITQRKFDNLTKAERGGLSELDKAGFIKRQLVETRQITKHVAQILDSRMNTKYDENDKLIREVKVITLKSKLVSDFRKDFQFYKVREINNYHHAHDAYLNAVVGTALIKKYPKLESEFVYGDYKVYDVRKMIAKSEQEIGKATAKYFFYSNIMNFFKTEITLANGEIRKRPLIETNGETGEIVWDKGRDFATVRKVLSMPQVNIVKKTEVQTGGFSKESILPKRNSDKLIARKKDWDPKKYGGFDSPTVAYSVLVVAKVEKGKSKKLKSVKELLGITIMERSSFEKNPIDFLEAKGYKEVKKDLIIKLPKYSLFELENGRKRMLASAGELQKGNELALPSKYVNFLYLASHYEKLKGSPEDNEQKQLFVEQHKHYLDEIIEQISEFSKRVILADANLDKVLSAYNKHRDKPIREQAENIIHLFTLTNLGAPAAFKYFDTTIDRKRYTSTKEVLDATLIHQSITGLYETRIDLSQLGGDGGGSSGSSGSSGSSGSSGGTLGIEDEYRLHETSTEPDVSLGSTWLSDFPQAWAETGGMGLAVRQAPLIIPLKATSTPVSIQQYPMSHEARLGIKPHIQRLLDQGILVPCQSPWNTPLLPVKKPGTNDYRPVQDLREVNKRVEDIHPTVPNPYNLLSGLPPSHQWYTVLDLKDAFFCLRLHPTSQPLFAFEWRDPGMGISGQLTWTRLPQGFKNSPTLFNEALHRDLADFRIQHPDLILLQYVDDILLAATSELDCQQGTRALLQTLGDLGYRASAKKAQICQKQVKYLGYLLREGQRWLTEARKETVMGQPVPKTPRQLREFLGTAGFCRLWIPGFAEMAAPLYPLTKPGTLFSWGPDQQKAYQEIKQALLTAPALGLPDLTKPFELFVDEKQGYAKGVLTQKLGPWRRPVAYLSKKLDPVAAGWPPCLRMVAAIAVLTKDAGKLTMGQPLVILAPHAVEALVKQPPDRWLSNARMTHYQAMLLDTDRVQFGPVVALNPATLLPLPEEGAPHDCLEILAETHGTRPDLTDQPIPDADHTWYTDGSSFLQEGQRKAGAAVTTETEVIWAGALPAGTSAQRAELIALTQALKMAEGKRLNVYTDSRYAFATAHIHGEIYRRRGWLTSEGREIKNKSEILALLKALFLPKRLSIIHCLGHQKGDSAEARGNRLADQAAREAAIKTPPDTSTLLAGKRTADGSEFEKRTADGSEFESPKKKAKVE

SEQ ID NO: 6334 - protein, 2100 aa, synthetic construct
MPAAKRVKLDGGDKKYSIGLDIGTNSVGWAVITDEYKVPSKKFKVLGNTDRHSIKKNLIGALLFDSGETAEATRLKRTARRRYTRRKNRICYLQEIFSNEMAKVDDSFFHRLEESFLVEEDKKHERHPIFGNIVDEVAYHEKYPTIYHLRKKLVDSTDKADLRLIYLALAHMIKFRGHFLIEGDLNPDNSDVDKLFIQLVQTYNQLFEENPINASGVDAKAILSARLSKSRRLENLIAQLPGEKKNGLFGNLIALSLGLTPNFKSNFDLAEDAKLQLSKDTYDDDLDNLLAQIGDQYADLFLAAKNLSDAILLSDILRVNTEITKAPLSASMIKRYDEHHQDLTLLKALVRQQLPEKYKEIFFDQSKNGYAGYIDGGASQEEFYKFIKPILEKMDGTEELLVKLNREDLLRKQRTFDNGSIPHQIHLGELHAILRRQEDFYPFLKDNREKIEKILTFRIPYYVGPLARGNSRFAWMTRKSEETITPWNFEEVVDKGASAQSFIERMTNFDKNLPNEKVLPKHSLLYEYFTVYNELTKVKYVTEGMRKPAFLSGEQKKAIVDLLFKTNRKVTVKQLKEDYFKKIECFDSVEISGVEDRFNASLGTYHDLLKIIKDKDFLDNEENEDILEDIVLTLTLFEDREMIEERLKTYAHLFDDKVMKQLKRRRYTGWGRLSRKLINGIRDKQSGKTILDFLKSDGFANRNFMQLIHDDSLTFKEDIQKAQVSGQGDSLHEHIANLAGSPAIKKGILQTVKVVDELVKVMGRHKPENIVIEMARENQTTQKGQKNSRERMKRIEEGIKELGSQILKEHPVENTQLQNEKLYLYYLQNGRDMYVDQELDINRLSDYDVDHIVPQSFLKDDSIDNKVLTRSDKARGKSDNVPSEEVVKKMKNYWRQLLNAKLITQRKFDNLTKAERGGLSELDKAGFIKRQLVETRQITKHVAQILDSRMNTKYDENDKLIREVKVITLKSKLVSDFRKDFQFYKVREINNYHHAHDAYLNAVVGTALIKKYPKLESEFVYGDYKVYDVRKMIAKSEQEIGKATAKYFFYSNIMNFFKTEITLANGEIRKRPLIETNGETGEIVWDKGRDFATVRKVLSMPQVNIVKKTEVQTGGFSKESILPKRNSDKLIARKKDWDPKKYGGFDSPTVAYSVLVVAKVEKGKSKKLKSVKELLGITIMERSSFEKNPIDFLEAKGYKEVKKDLIIKLPKYSLFELENGRKRMLASAGELQKGNELALPSKYVNFLYLASHYEKLKGSPEDNEQKQLFVEQHKHYLDEIIEQISEFSKRVILADANLDKVLSAYNKHRDKPIREQAENIIHLFTLTNLGAPAAFKYFDTTIDRKRYTSTKEVLDATLIHQSITGLYETRIDLSQLGGDGGGSSGSSGSSGSSGSSGGTLNIEDEYRLHEISTEPDVSPGSTWLSDFPQAWAETGGMGLAVRQAPLIIPLKATSTPVSIKQYPMSQEAKLGIKPHIQRLLDQGILVPCQSPWNTPLLPVKKPGTNDYRPVQGLREVNKRVEDIHPTVPNPYNLLSGLPTSHRWYTVLDLKDAFFCLRLHPTSQPLFASEWRDPGMGISGQLTWTRLPQGFKNSPTLFDEALHRGLADFRIQHPDLILLQYVDDLLLAATSELDCQQGTRALLKTLGNLGYRASAKKAQICQKQVKYLGYLLREGQRWLTEARKETVMGQPTPKTPRQLREFLGTAGFCRLWIPRFAEMAAPLYPLTKTGTLFNWGPDQQKAYHEIKQALLTAPALGLPDLTKPFELFVDEKQGYAKGVLTQKLGPWRRPVAYLSKKLDPVAAGWPPCLRMVAAIAVLTKDAGKLTMGQPLVILAPHAVEALVKQPPDRWLSNARMTHYQAMLLDTDRVQFGPVVALNPATLLPLPEEGAPHDCLEILAETHGTEPDLTDQPIPDADHTWYTDGSSFLQEGQRKAGAAVTTETEVIWARALPAGTSAQRAELIALTQALKMAEGKRLNVYTDSRYAFATAHIHGEIYKRRGLLTSEGREIKNKSEILALLKALFLPKRLSIIHCLGHQKGDSAEARGNRLADQAAREAAIKTPPDTSTLLAGKRTADGSEFEKRTADGSEFESPKKKAKVE

SEQ ID NO: 6335 - protein, 2100 aa, synthetic construct
MPAAKRVKLDGGDKKYSIGLDIGTNSVGWAVITDEYKVPSKKFKVLGNTDRHSIKKNLIGALLFDSGETAEATRLKRTARRRYTRRKNRICYLQEIFSNEMAKVDDSFFHRLEESFLVEEDKKHERHPIFGNIVDEVAYHEKYPTIYHLRKKLVDSTDKADLRLIYLALAHMIKFRGHFLIEGDLNPDNSDVDKLFIQLVQTYNQLFEENPINASGVDAKAILSARLSKSRRLENLIAQLPGEKKNGLFGNLIALSLGLTPNFKSNFDLAEDAKLQLSKDTYDDDLDNLLAQIGDQYADLFLAAKNLSDAILLSDILRVNTEITKAPLSASMIKRYDEHHQDLTLLKALVRQQLPEKYKEIFFDQSKNGYAGYIDGGASQEEFYKFIKPILEKMDGTEELLVKLNREDLLRKQRTFDNGSIPHQIHLGELHAILRRQEDFYPFLKDNREKIEKILTFRIPYYVGPLARGNSRFAWMTRKSEETITPWNFEEVVDKGASAQSFIERMTNFDKNLPNEKVLPKHSLLYEYFTVYNELTKVKYVTEGMRKPAFLSGEQKKAIVDLLFKTNRKVTVKQLKEDYFKKIECFDSVEISGVEDRFNASLGTYHDLLKIIKDKDFLDNEENEDILEDIVLTLTLFEDREMIEERLKTYAHLFDDKVMKQLKRRRYTGWGRLSRKLINGIRDKQSGKTILDFLKSDGFANRNFMQLIHDDSLTFKEDIQKAQVSGQGDSLHEHIANLAGSPAIKKGILQTVKVVDELVKVMGRHKPENIVIEMARENQTTQKGQKNSRERMKRIEEGIKELGSQILKEHPVENTQLQNEKLYLYYLQNGRDMYVDQELDINRLSDYDVDHIVPQSFLKDDSIDNKVLTRSDKARGKSDNVPSEEVVKKMKNYWRQLLNAKLITQRKFDNLTKAERGGLSELDKAGFIKRQLVETRQITKHVAQILDSRMNTKYDENDKLIREVKVITLKSKLVSDFRKDFQFYKVREINNYHHAHDAYLNAVVGTALIKKYPKLESEFVYGDYKVYDVRKMIAKSEQEIGKATAKYFFYSNIMNFFKTEITLANGEIRKRPLIETNGETGEIVWDKGRDFATVRKVLSMPQVNIVKKTEVQTGGFSKESILPKRNSDKLIARKKDWDPKKYGGFDSPTVAYSVLVVAKVEKGKSKKLKSVKELLGITIMERSSFEKNPIDFLEAKGYKEVKKDLIIKLPKYSLFELENGRKRMLASAGELQKGNELALPSKYVNFLYLASHYEKLKGSPEDNEQKQLFVEQHKHYLDEIIEQISEFSKRVILADANLDKVLSAYNKHRDKPIREQAENIIHLFTLTNLGAPAAFKYFDTTIDRKRYTSTKEVLDATLIHQSITGLYETRIDLSQLGGDGGGSSGSSGSSGSSGSSGGTLNIEDEYRLHEISTEPDVSPGSTWLSDFPQAWAETGGMGLAVRQAPLIIPLKATSTPVSIKQYPMSQEAKLGIKPHIQRLLDQGILVPCQSPWNTPLLPVKKPGTNDYRPVQGLREVNKRVEDIHPTVPNPYNLLSGLPTSHRWYTVLDLKDAFFCLRLHPTSQPLFASEWRDPGMGISGQLTWTRLPQGFKNSPTLFNEALHRGLADFRIQHPDLILLQYVDDLLLAATSELDCQQGTRALLKTLGNLGYRASAKKAQICQKQVKYLGYLLREGQRWLTEARKETVMGQPTPKTPRQLREFLGTAGFCRLWIPRFAEMAAPLYPLTKPGTLFNWGPDQQKAYHEIKQALLTAPALGLPDLTKPFELFVDEKQGYAKGVLTQKLGPWRRPVAYLSKKLDPVAAGWPPCLRMVAAIAVLTKDAGKLTMGQPLVILAPHAVEALVKQPPDRWLSNARMTHYQAMLLDTDRVQFGPVVALNPATLLPLPEEGAPHDCLEILAETHGTEPDLTDQPIPDADHTWYTDGSSFLQEGQRKAGAAVTTETEVIWARALPAGTSAQRAELIALTQALKMAEGKRLNVYTDSRYAFATAHIHGEIYKRRGWLTSEGREIKNKSEILALLKALFLPKRLSIIHCLGHQKGDSAEARGNRLADQAAREAAIKTPPDTSTLLAGKRTADGSEFEKRTADGSEFESPKKKAKVE

SEQ ID NO: 6336 - protein, 2091 aa, synthetic construct
MPAAKRVKLDGGDKKYSIGLDIGTNSVGWAVITDEYKVPSKKFKVLGNTDRHSIKKNLIGALLFDSGETAEATRLKRTARRRYTRRKNRICYLQEIFSNEMAKVDDSFFHRLEESFLVEEDKKHERHPIFGNIVDEVAYHEKYPTIYHLRKKLVDSTDKADLRLIYLALAHMIKFRGHFLIEGDLNPDNSDVDKLFIQLVQTYNQLFEENPINASGVDAKAILSARLSKSRRLENLIAQLPGEKKNGLFGNLIALSLGLTPNFKSNFDLAEDAKLQLSKDTYDDDLDNLLAQIGDQYADLFLAAKNLSDAILLSDILRVNTEITKAPLSASMIKRYDEHHQDLTLLKALVRQQLPEKYKEIFFDQSKNGYAGYIDGGASQEEFYKFIKPILEKMDGTEELLVKLNREDLLRKQRTFDNGSIPHQIHLGELHAILRRQEDFYPFLKDNREKIEKILTFRIPYYVGPLARGNSRFAWMTRKSEETITPWNFEEVVDKGASAQSFIERMTNFDKNLPNEKVLPKHSLLYEYFTVYNELTKVKYVTEGMRKPAFLSGEQKKAIVDLLFKTNRKVTVKQLKEDYFKKIECFDSVEISGVEDRFNASLGTYHDLLKIIKDKDFLDNEENEDILEDIVLTLTLFEDREMIEERLKTYAHLFDDKVMKQLKRRRYTGWGRLSRKLINGIRDKQSGKTILDFLKSDGFANRNFMQLIHDDSLTFKEDIQKAQVSGQGDSLHEHIANLAGSPAIKKGILQTVKVVDELVKVMGRHKPENIVIEMARENQTTQKGQKNSRERMKRIEEGIKELGSQILKEHPVENTQLQNEKLYLYYLQNGRDMYVDQELDINRLSDYDVDHIVPQSFLKDDSIDNKVLTRSDKARGKSDNVPSEEVVKKMKNYWRQLLNAKLITQRKFDNLTKAERGGLSELDKAGFIKRQLVETRQITKHVAQILDSRMNTKYDENDKLIREVKVITLKSKLVSDFRKDFQFYKVREINNYHHAHDAYLNAVVGTALIKKYPKLESEFVYGDYKVYDVRKMIAKSEQEIGKATAKYFFYSNIMNFFKTEITLANGEIRKRPLIETNGETGEIVWDKGRDFATVRKVLSMPQVNIVKKTEVQTGGFSKESILPKRNSDKLIARKKDWDPKKYGGFDSPTVAYSVLVVAKVEKGKSKKLKSVKELLGITIMERSSFEKNPIDFLEAKGYKEVKKDLIIKLPKYSLFELENGRKRMLASAGELQKGNELALPSKYVNFLYLASHYEKLKGSPEDNEQKQLFVEQHKHYLDEIIEQISEFSKRVILADANLDKVLSAYNKHRDKPIREQAENIIHLFTLTNLGAPAAFKYFDTTIDRKRYTSTKEVLDATLIHQSITGLYETRIDLSQLGGDGGGSSGSSGSSGSSGSSGGIPWLMKKPLQLTTLVPLQEYEERLLKQTMLTGSYKEKLQSLFLKYDALWQHWENQVGHRRIKPHHIATGTVNPRPQKQYPINPKAKASIQTVINDLLKQGVLIQQNSIMNTPVYPVPKPDGKWRMVLDYREVNKTIPLIAAQNQHSAGILSSIFRGKYKTTLDLSNGFWAHSITPESYWLTAFTWLGQQYCWTRLPQGFLNSPALFNADVVDLLKEVPNVQVYVDDIYISHDDPREHLEQLEKVFSLLLNAGYVVSLKKSEIAQHEVEFLGFNITKEGRGLTETFKQKLLNITPPRDLKQLQSILGKLNFARNFIPNFSELVKPLYNIIATAPGKYITWTTDNSQQLQNIISMLNSAENLEERNPEVRLIMKVNTSPSAGYIRFYNEFAKRPIMYLNYVYTKAEVKFTNTEKLLTTIHKGLIKALDLGMGQEILVYSPIVSMTKIQKTPLPERKALPIRWITWMSYLEDPRIQFHYDKTLPELQQVPTVTDDIIAKIKHPSEFSMVFYTDGSAIKHPNVNKSHNAGMGIAQVQFKPEFTVINTWSIPLGDHTAQLAEVAAVEFACKKALKIDGPVLIVTDSFYVAESVNKELPYWQSNGFFNNKKKPLKHVSKWKSIADCIQLKPDIIIIHEKGHQPTASTFHTEGNNLADKLATQGSYVVNAGKRTADGSEFEKRTADGSEFESPKKKAKVE

SEQ ID NO: 6337 - protein, 2105 aa, synthetic construct
MPAAKRVKLDGGDKKYSIGLDIGTNSVGWAVITDEYKVPSKKFKVLGNTDRHSIKKNLIGALLFDSGETAEATRLKRTARRRYTRRKNRICYLQEIFSNEMAKVDDSFFHRLEESFLVEEDKKHERHPIFGNIVDEVAYHEKYPTIYHLRKKLVDSTDKADLRLIYLALAHMIKFRGHFLIEGDLNPDNSDVDKLFIQLVQTYNQLFEENPINASGVDAKAILSARLSKSRRLENLIAQLPGEKKNGLFGNLIALSLGLTPNFKSNFDLAEDAKLQLSKDTYDDDLDNLLAQIGDQYADLFLAAKNLSDAILLSDILRVNTEITKAPLSASMIKRYDEHHQDLTLLKALVRQQLPEKYKEIFFDQSKNGYAGYIDGGASQEEFYKFIKPILEKMDGTEELLVKLNREDLLRKQRTFDNGSIPHQIHLGELHAILRRQEDFYPFLKDNREKIEKILTFRIPYYVGPLARGNSRFAWMTRKSEETITPWNFEEVVDKGASAQSFIERMTNFDKNLPNEKVLPKHSLLYEYFTVYNELTKVKYVTEGMRKPAFLSGEQKKAIVDLLFKTNRKVTVKQLKEDYFKKIECFDSVEISGVEDRFNASLGTYHDLLKIIKDKDFLDNEENEDILEDIVLTLTLFEDREMIEERLKTYAHLFDDKVMKQLKRRRYTGWGRLSRKLINGIRDKQSGKTILDFLKSDGFANRNFMQLIHDDSLTFKEDIQKAQVSGQGDSLHEHIANLAGSPAIKKGILQTVKVVDELVKVMGRHKPENIVIEMARENQTTQKGQKNSRERMKRIEEGIKELGSQILKEHPVENTQLQNEKLYLYYLQNGRDMYVDQELDINRLSDYDVDHIVPQSFLKDDSIDNKVLTRSDKARGKSDNVPSEEVVKKMKNYWRQLLNAKLITQRKFDNLTKAERGGLSELDKAGFIKRQLVETRQITKHVAQILDSRMNTKYDENDKLIREVKVITLKSKLVSDFRKDFQFYKVREINNYHHAHDAYLNAVVGTALIKKYPKLESEFVYGDYKVYDVRKMIAKSEQEIGKATAKYFFYSNIMNFFKTEITLANGEIRKRPLIETNGETGEIVWDKGRDFATVRKVLSMPQVNIVKKTEVQTGGFSKESILPKRNSDKLIARKKDWDPKKYGGFDSPTVAYSVLVVAKVEKGKSKKLKSVKELLGITIMERSSFEKNPIDFLEAKGYKEVKKDLIIKLPKYSLFELENGRKRMLASAGELQKGNELALPSKYVNFLYLASHYEKLKGSPEDNEQKQLFVEQHKHYLDEIIEQISEFSKRVILADANLDKVLSAYNKHRDKPIREQAENIIHLFTLTNLGAPAAFKYFDTTIDRKRYTSTKEVLDATLIHQSITGLYETRIDLSQLGGDGGGSSGSSGSSGSSGSSGSSGGTAPLEEEYRLFLEAPIQNVTLLEQWKREIPKVWAEINPPGLASTQAPIHVQLLSTALPVRVRQYPITLEAKRSLRETIRKFRAAGILRPVHSPWNTPLLPVRKSGTSEYRMVQDLREVNKRVETIHPTVPNPYTLLSLLPPDRIWYSVLDLKDAFFCIPLAPESQLIFAFEWADAEEGESGQLTWTRLPQGFKNSPTLFDEALNRDLQGFRLDHPSVSLLQYVDDLLIAADTQAACLSATRDLLMTLAELGYRVSGKKAQLCQEEVTYLGFKIHKGSRSLSNSRTQAILQIPVPKTKRQVREFLGTIGYCRLWIPGFAELAQPLYAATRGGNDPLVWGEKEEEAFQSLKLALTQPPALALPSLDKPFQLFVEETSGAAKGVLTQALGPWKRPVAYLSKRLDPVAAGWPRCLRAIAAAALLTREASKLTFGQDIEITSSHNLESLLRSPPDKWLTNARITQYQVLLLDPPRVRFKQTAALNPATLLPETDDTLPIHHCLDTLDSLTSTRPDLTDQPLAQAEATLFTDGSSYIRDGKRYAGAAVVTLDSVIWAEPLPIGTSAQKAELIALTKALEWSKDKSVNIYTDSRYAFATLHVHGMIYRERGLLTAGGKAIKNAPEILALLTAVWLPKRVAVMHCKGHQKDDAPTSTGNRRADEVAREVAIRPLSTQATISAGKRTADGSEFEKRTADGSEFESPKKKAKVE

SEQ ID NO: 6338 - protein, 2180 aa, synthetic construct
MPAAKRVKLDGGDKKYSIGLDIGTNSVGWAVITDEYKVPSKKFKVLGNTDRHSIKKNLIGALLFDSGETAEATRLKRTARRRYTRRKNRICYLQEIFSNEMAKVDDSFFHRLEESFLVEEDKKHERHPIFGNIVDEVAYHEKYPTIYHLRKKLVDSTDKADLRLIYLALAHMIKFRGHFLIEGDLNPDNSDVDKLFIQLVQTYNQLFEENPINASGVDAKAILSARLSKSRRLENLIAQLPGEKKNGLFGNLIALSLGLTPNFKSNFDLAEDAKLQLSKDTYDDDLDNLLAQIGDQYADLFLAAKNLSDAILLSDILRVNTEITKAPLSASMIKRYDEHHQDLTLLKALVRQQLPEKYKEIFFDQSKNGYAGYIDGGASQEEFYKFIKPILEKMDGTEELLVKLNREDLLRKQRTFDNGSIPHQIHLGELHAILRRQEDFYPFLKDNREKIEKILTFRIPYYVGPLARGNSRFAWMTRKSEETITPWNFEEVVDKGASAQSFIERMTNFDKNLPNEKVLPKHSLLYEYFTVYNELTKVKYVTEGMRKPAFLSGEQKKAIVDLLFKTNRKVTVKQLKEDYFKKIECFDSVEISGVEDRFNASLGTYHDLLKIIKDKDFLDNEENEDILEDIVLTLTLFEDREMIEERLKTYAHLFDDKVMKQLKRRRYTGWGRLSRKLINGIRDKQSGKTILDFLKSDGFANRNFMQLIHDDSLTFKEDIQKAQVSGQGDSLHEHIANLAGSPAIKKGILQTVKVVDELVKVMGRHKPENIVIEMARENQTTQKGQKNSRERMKRIEEGIKELGSQILKEHPVENTQLQNEKLYLYYLQNGRDMYVDQELDINRLSDYDVDHIVPQSFLKDDSIDNKVLTRSDKARGKSDNVPSEEVVKKMKNYWRQLLNAKLITQRKFDNLTKAERGGLSELDKAGFIKRQLVETRQITKHVAQILDSRMNTKYDENDKLIREVKVITLKSKLVSDFRKDFQFYKVREINNYHHAHDAYLNAVVGTALIKKYPKLESEFVYGDYKVYDVRKMIAKSEQEIGKATAKYFFYSNIMNFFKTEITLANGEIRKRPLIETNGETGEIVWDKGRDFATVRKVLSMPQVNIVKKTEVQTGGFSKESILPKRNSDKLIARKKDWDPKKYGGFDSPTVAYSVLVVAKVEKGKSKKLKSVKELLGITIMERSSFEKNPIDFLEAKGYKEVKKDLIIKLPKYSLFELENGRKRMLASAGELQKGNELALPSKYVNFLYLASHYEKLKGSPEDNEQKQLFVEQHKHYLDEIIEQISEFSKRVILADANLDKVLSAYNKHRDKPIREQAENIIHLFTLTNLGAPAAFKYFDTTIDRKRYTSTKEVLDATLIHQSITGLYETRIDLSQLGGDGGGSSGSSGSSGSSGSSGSSGGMDLLKPLTVERKGVKIKGYWNSQADITCVPKDLLQGEEPVRQQNVTTIHGTQEGDVYYVNLKIDGRRINTEVIGTTLDYAIITPGDVPWILKKPLELTIKLDLEEQQGTLLNNSILSKKGKEELKQLFEKYSALWQSWENQVGHRRIRPHKIATGTVKPTPQKQYHINPKAKPDIQIVINDLLKQGVLIQKESTMNTPVYPVPKPNGRWRMVLDYRAVNKVTPLIAVQNQHSYGILGSLFKGRYKTTIDLSNGFWAHPIVPEDYWITAFTWQGKQYCWTVLPQGFLNSPGLFNGDVVDLLQGIPNVEVYVDDVYISHDSEKEHLEYLDILFNRLKEAGYIISLKKSNIANSIVDFLGFQITNEGRGLTDTFKEKLENITAPTTLKQLQSILGLLNFARNFIPDFTELIAPLYALIPKSPKNYVPWQIEHSTTLETLITKLNGAEYLQGRKGDKTLIMKVNASYTTGYIRYYNEGEKKPISYVSIVFSKTELKFTELEKLLTTVHKGLLKALDLSMGQNIHVYSPIVSMQNIQKTPQTAKKALASRWLSWLSYLEDPRIRFFYDPQMPALKDLPAVDTGKDNKKHPSNFQHIFYTDGSAITSPTKEGHLNAGMGIVYFINKDGNLQKQQEWSISLGNHTAQFAEIAAFEFALKKCLPLGGNILVVTDSNYVAKAYNEELDVWASNGFVNNRKKPLKHISKWKSVADLKRLRPDVVVTHEPGHQKLDSSPHAYGNNLADQLATQASFKVHAGKRTADGSEFEKRTADGSEFESPKKKAKVE

SEQ ID NO: 6339 - protein, 2102 aa, synthetic construct
MPAAKRVKLDGGDKKYSIGLDIGTNSVGWAVITDEYKVPSKKFKVLGNTDRHSIKKNLIGALLFDSGETAEATRLKRTARRRYTRRKNRICYLQEIFSNEMAKVDDSFFHRLEESFLVEEDKKHERHPIFGNIVDEVAYHEKYPTIYHLRKKLVDSTDKADLRLIYLALAHMIKFRGHFLIEGDLNPDNSDVDKLFIQLVQTYNQLFEENPINASGVDAKAILSARLSKSRRLENLIAQLPGEKKNGLFGNLIALSLGLTPNFKSNFDLAEDAKLQLSKDTYDDDLDNLLAQIGDQYADLFLAAKNLSDAILLSDILRVNTEITKAPLSASMIKRYDEHHQDLTLLKALVRQQLPEKYKEIFFDQSKNGYAGYIDGGASQEEFYKFIKPILEKMDGTEELLVKLNREDLLRKQRTFDNGSIPHQIHLGELHAILRRQEDFYPFLKDNREKIEKILTFRIPYYVGPLARGNSRFAWMTRKSEETITPWNFEEVVDKGASAQSFIERMTNFDKNLPNEKVLPKHSLLYEYFTVYNELTKVKYVTEGMRKPAFLSGEQKKAIVDLLFKTNRKVTVKQLKEDYFKKIECFDSVEISGVEDRFNASLGTYHDLLKIIKDKDFLDNEENEDILEDIVLTLTLFEDREMIEERLKTYAHLFDDKVMKQLKRRRYTGWGRLSRKLINGIRDKQSGKTILDFLKSDGFANRNFMQLIHDDSLTFKEDIQKAQVSGQGDSLHEHIANLAGSPAIKKGILQTVKVVDELVKVMGRHKPENIVIEMARENQTTQKGQKNSRERMKRIEEGIKELGSQILKEHPVENTQLQNEKLYLYYLQNGRDMYVDQELDINRLSDYDVDHIVPQSFLKDDSIDNKVLTRSDKARGKSDNVPSEEVVKKMKNYWRQLLNAKLITQRKFDNLTKAERGGLSELDKAGFIKRQLVETRQITKHVAQILDSRMNTKYDENDKLIREVKVITLKSKLVSDFRKDFQFYKVREINNYHHAHDAYLNAVVGTALIKKYPKLESEFVYGDYKVYDVRKMIAKSEQEIGKATAKYFFYSNIMNFFKTEITLANGEIRKRPLIETNGETGEIVWDKGRDFATVRKVLSMPQVNIVKKTEVQTGGFSKESILPKRNSDKLIARKKDWDPKKYGGFDSPTVAYSVLVVAKVEKGKSKKLKSVKELLGITIMERSSFEKNPIDFLEAKGYKEVKKDLIIKLPKYSLFELENGRKRMLASAGELQKGNELALPSKYVNFLYLASHYEKLKGSPEDNEQKQLFVEQHKHYLDEIIEQISEFSKRVILADANLDKVLSAYNKHRDKPIREQAENIIHLFTLTNLGAPAAFKYFDTTIDRKRYTSTKEVLDATLIHQSITGLYETRIDLSQLGGDGGGSSGSSGSSGSSGSSGSSGGTLQLEEEYRLFEPESTQKQEMDIWLKNFPQAWAETGGMGTAHCQAPVLIQLKATATPISIRQYPMPHEAYQGIKPHIRRMLDQGILKPCQSPWNTPLLPVKKPGTEDYRPVQDLREVNKRVEDIHPTVPNPYNLLSTLPPSHPWYTVLDLKDAFFCLRLHSESQLLFAFEWRDPEIGLSGQLTWTRLPQGFKNSPTLFNEALHSDLADFRVRYPALVLLQYVDDLLLAAATRTECLEGTKALLETLGNKGYRASAKKAQICLQEVTYLGYSLKDGQRWLTKARKEAILSIPVPKNSRQVREFLGTAGYCRLWIPGFAELAAPLYPLTRPGTLFQWGTEQQLAFEDIKKALLSSPALGLPDITKPFELFIDENSGFAKGVLVQKLGPWKRPVAYLSKKLDTVASGWPPCLRMVAAIAILVKDAGKLTLGQPLTILTSHPVEALVRQPPNKWLSNARMTHYQAMLLDAERVHFGPTVSLNPATLLPLPSGGNHHDCLQILAETHGTRPDLTDQPLPDADLTWYTDGSSFIRNGEREAGAAVTTESEVIWAAPLPPGTSAQRAELIALTQALKMAEGKKLTVYTDSRYAFATTHVHGEIYRRRGWLTSEGKEIKNKNEILALLEALFLPKRLSIIHCPGHQKGDSPQAKGNRLADDTAKKAATETHSSLTVLPAGKRTADGSEFEKRTADGSEFESPKKKAKVE

SEQ ID NO: 6340 - protein, 2094 aa, synthetic construct
MPAAKRVKLDGGDKKYSIGLDIGTNSVGWAVITDEYKVPSKKFKVLGNTDRHSIKKNLIGALLFDSGETAEATRLKRTARRRYTRRKNRICYLQEIFSNEMAKVDDSFFHRLEESFLVEEDKKHERHPIFGNIVDEVAYHEKYPTIYHLRKKLVDSTDKADLRLIYLALAHMIKFRGHFLIEGDLNPDNSDVDKLFIQLVQTYNQLFEENPINASGVDAKAILSARLSKSRRLENLIAQLPGEKKNGLFGNLIALSLGLTPNFKSNFDLAEDAKLQLSKDTYDDDLDNLLAQIGDQYADLFLAAKNLSDAILLSDILRVNTEITKAPLSASMIKRYDEHHQDLTLLKALVRQQLPEKYKEIFFDQSKNGYAGYIDGGASQEEFYKFIKPILEKMDGTEELLVKLNREDLLRKQRTFDNGSIPHQIHLGELHAILRRQEDFYPFLKDNREKIEKILTFRIPYYVGPLARGNSRFAWMTRKSEETITPWNFEEVVDKGASAQSFIERMTNFDKNLPNEKVLPKHSLLYEYFTVYNELTKVKYVTEGMRKPAFLSGEQKKAIVDLLFKTNRKVTVKQLKEDYFKKIECFDSVEISGVEDRFNASLGTYHDLLKIIKDKDFLDNEENEDILEDIVLTLTLFEDREMIEERLKTYAHLFDDKVMKQLKRRRYTGWGRLSRKLINGIRDKQSGKTILDFLKSDGFANRNFMQLIHDDSLTFKEDIQKAQVSGQGDSLHEHIANLAGSPAIKKGILQTVKVVDELVKVMGRHKPENIVIEMARENQTTQKGQKNSRERMKRIEEGIKELGSQILKEHPVENTQLQNEKLYLYYLQNGRDMYVDQELDINRLSDYDVDHIVPQSFLKDDSIDNKVLTRSDKARGKSDNVPSEEVVKKMKNYWRQLLNAKLITQRKFDNLTKAERGGLSELDKAGFIKRQLVETRQITKHVAQILDSRMNTKYDENDKLIREVKVITLKSKLVSDFRKDFQFYKVREINNYHHAHDAYLNAVVGTALIKKYPKLESEFVYGDYKVYDVRKMIAKSEQEIGKATAKYFFYSNIMNFFKTEITLANGEIRKRPLIETNGETGEIVWDKGRDFATVRKVLSMPQVNIVKKTEVQTGGFSKESILPKRNSDKLIARKKDWDPKKYGGFDSPTVAYSVLVVAKVEKGKSKKLKSVKELLGITIMERSSFEKNPIDFLEAKGYKEVKKDLIIKLPKYSLFELENGRKRMLASAGELQKGNELALPSKYVNFLYLASHYEKLKGSPEDNEQKQLFVEQHKHYLDEIIEQISEFSKRVILADANLDKVLSAYNKHRDKPIREQAENIIHLFTLTNLGAPAAFKYFDTTIDRKRYTSTKEVLDATLIHQSITGLYETRIDLSQLGGDGGGSSGSSGSSGSSGSSGSSGGVPWLTQQPLQLTILVPLQEYQEKILSKTALPEDQKQQLKTLFVKYDNLWQHWENQVGHRKIRPHNIATGDYPPRPQKQYPINPKAKPSIQIVIDDLLKQGVLTPQNSTMNTPVYPVPKPDGRWRMVLDYREVNKTIPLTAAQNQHSAGILATIVRQKYKTTLDLANGFWAHPITPESYWLTAFTWQGKQYCWTRLPQGFLNSPALFNADVVDLLKEIPNVQVYVDDIYLSHDDPKEHVQQLEKVFQILLQAGYVVSLKKSEIGQKTVEFLGFNITKEGRGLTDTFKTKLLNITPPKDLKQLQSILGLLNFARNFIPNFAELVQPLYNLIAPAKGKYIEWSEENTKQLNMVIEALNTASNLEERLPEQRLVIKVNTSPSAGYVRYYNETGKKPIMYLNYVFSKAELKFSMLEKLLTTMHKALIKAMDLAMGQEILVYSPIVSMTKIQKTPLPERKALPIRWITWMTYLEDPRIQFHYDKTLPELKHIPDVYTSSQSPVKHPSQYEGVFYTDGSAIKSPDPTKSNNAGMGIVHATYKPEYQVLNQWSIPLGNHTAQMAEIAAVEFACKKALKIPGPVLVITDSFYVAESANKELPYWKSNGFVNNKKKPLKHISKWKSIAECLSMKPDITIQHEKGISLQIPVFILKGNALADKLATQGSYVVNAGKRTADGSEFEKRTADGSEFESPKKKAKVE

SEQ ID NO: 6341 - protein, 2094 aa, synthetic construct
MPAAKRVKLDGGDKKYSIGLDIGTNSVGWAVITDEYKVPSKKFKVLGNTDRHSIKKNLIGALLFDSGETAEATRLKRTARRRYTRRKNRICYLQEIFSNEMAKVDDSFFHRLEESFLVEEDKKHERHPIFGNIVDEVAYHEKYPTIYHLRKKLVDSTDKADLRLIYLALAHMIKFRGHFLIEGDLNPDNSDVDKLFIQLVQTYNQLFEENPINASGVDAKAILSARLSKSRRLENLIAQLPGEKKNGLFGNLIALSLGLTPNFKSNFDLAEDAKLQLSKDTYDDDLDNLLAQIGDQYADLFLAAKNLSDAILLSDILRVNTEITKAPLSASMIKRYDEHHQDLTLLKALVRQQLPEKYKEIFFDQSKNGYAGYIDGGASQEEFYKFIKPILEKMDGTEELLVKLNREDLLRKQRTFDNGSIPHQIHLGELHAILRRQEDFYPFLKDNREKIEKILTFRIPYYVGPLARGNSRFAWMTRKSEETITPWNFEEVVDKGASAQSFIERMTNFDKNLPNEKVLPKHSLLYEYFTVYNELTKVKYVTEGMRKPAFLSGEQKKAIVDLLFKTNRKVTVKQLKEDYFKKIECFDSVEISGVEDRFNASLGTYHDLLKIIKDKDFLDNEENEDILEDIVLTLTLFEDREMIEERLKTYAHLFDDKVMKQLKRRRYTGWGRLSRKLINGIRDKQSGKTILDFLKSDGFANRNFMQLIHDDSLTFKEDIQKAQVSGQGDSLHEHIANLAGSPAIKKGILQTVKVVDELVKVMGRHKPENIVIEMARENQTTQKGQKNSRERMKRIEEGIKELGSQILKEHPVENTQLQNEKLYLYYLQNGRDMYVDQELDINRLSDYDVDHIVPQSFLKDDSIDNKVLTRSDKARGKSDNVPSEEVVKKMKNYWRQLLNAKLITQRKFDNLTKAERGGLSELDKAGFIKRQLVETRQITKHVAQILDSRMNTKYDENDKLIREVKVITLKSKLVSDFRKDFQFYKVREINNYHHAHDAYLNAVVGTALIKKYPKLESEFVYGDYKVYDVRKMIAKSEQEIGKATAKYFFYSNIMNFFKTEITLANGEIRKRPLIETNGETGEIVWDKGRDFATVRKVLSMPQVNIVKKTEVQTGGFSKESILPKRNSDKLIARKKDWDPKKYGGFDSPTVAYSVLVVAKVEKGKSKKLKSVKELLGITIMERSSFEKNPIDFLEAKGYKEVKKDLIIKLPKYSLFELENGRKRMLASAGELQKGNELALPSKYVNFLYLASHYEKLKGSPEDNEQKQLFVEQHKHYLDEIIEQISEFSKRVILADANLDKVLSAYNKHRDKPIREQAENIIHLFTLTNLGAPAAFKYFDTTIDRKRYTSTKEVLDATLIHQSITGLYETRIDLSQLGGDGGGSSGSSGSSGSSGSSGSSGGVPWLTQQPLQLTILVPLQEYQEKILSKTALPEDQKQQLKTLFVKYDNLWQHWENQVGHRKIRPHNIATGDYPPRPQKQYPINPKAKPSIQIVIDDLLKQGVLTPQNSTMNTPVYPVPKPDGRWRMVLDYREVNKTIPLTAAQNQHSAGILATIVRQKYKTTLDLANGFWAHPITPESYWLTAFTWQGKQYCWTRLPQGFLNSPALFNADVVDLLKEIPNVQVYVDDIYLSHDDPKEHVQQLEKVFQILLQAGYVVSLKKSEIGQKTVEFLGFNITKEGRGLTDTFKTKLLNITPPKDLKQLQSILGKLNFARNFIPNFAELVQPLYNLIAPAKGKYIEWSEENTKQLNMVIEALNTASNLEERLPEQRLVIKVNTSPSAGYVRYYNETGKKPIMYLNYVFSKAELKFSMLEKLLTTMHKALIKAMDLAMGQEILVYSPIVSMTKIQKTPLPERKALPIRWITWMTYLEDPRIQFHYDKTLPELKHIPDVYTSSQSPVKHPSQYEGVFYTDGSAIKSPDPTKSNNAGMGIVHATYKPEYQVLNQWSIPLGNHTAQMAEIAAVEFACKKALKIPGPVLVITDSFYVAESANKELPYWKSNGFVNNKKKPLKHISKWKSIAECLSMKPDITIQHEKGISLQIPVFILKGNALADKLATQGSYVVNAGKRTADGSEFEKRTADGSEFESPKKKAKVE

SEQ ID NO: 6342 - protein, 2183 aa, synthetic construct
MPAAKRVKLDGGDKKYSIGLDIGTNSVGWAVITDEYKVPSKKFKVLGNTDRHSIKKNLIGALLFDSGETAEATRLKRTARRRYTRRKNRICYLQEIFSNEMAKVDDSFFHRLEESFLVEEDKKHERHPIFGNIVDEVAYHEKYPTIYHLRKKLVDSTDKADLRLIYLALAHMIKFRGHFLIEGDLNPDNSDVDKLFIQLVQTYNQLFEENPINASGVDAKAILSARLSKSRRLENLIAQLPGEKKNGLFGNLIALSLGLTPNFKSNFDLAEDAKLQLSKDTYDDDLDNLLAQIGDQYADLFLAAKNLSDAILLSDILRVNTEITKAPLSASMIKRYDEHHQDLTLLKALVRQQLPEKYKEIFFDQSKNGYAGYIDGGASQEEFYKFIKPILEKMDGTEELLVKLNREDLLRKQRTFDNGSIPHQIHLGELHAILRRQEDFYPFLKDNREKIEKILTFRIPYYVGPLARGNSRFAWMTRKSEETITPWNFEEVVDKGASAQSFIERMTNFDKNLPNEKVLPKHSLLYEYFTVYNELTKVKYVTEGMRKPAFLSGEQKKAIVDLLFKTNRKVTVKQLKEDYFKKIECFDSVEISGVEDRFNASLGTYHDLLKIIKDKDFLDNEENEDILEDIVLTLTLFEDREMIEERLKTYAHLFDDKVMKQLKRRRYTGWGRLSRKLINGIRDKQSGKTILDFLKSDGFANRNFMQLIHDDSLTFKEDIQKAQVSGQGDSLHEHIANLAGSPAIKKGILQTVKVVDELVKVMGRHKPENIVIEMARENQTTQKGQKNSRERMKRIEEGIKELGSQILKEHPVENTQLQNEKLYLYYLQNGRDMYVDQELDINRLSDYDVDHIVPQSFLKDDSIDNKVLTRSDKARGKSDNVPSEEVVKKMKNYWRQLLNAKLITQRKFDNLTKAERGGLSELDKAGFIKRQLVETRQITKHVAQILDSRMNTKYDENDKLIREVKVITLKSKLVSDFRKDFQFYKVREINNYHHAHDAYLNAVVGTALIKKYPKLESEFVYGDYKVYDVRKMIAKSEQEIGKATAKYFFYSNIMNFFKTEITLANGEIRKRPLIETNGETGEIVWDKGRDFATVRKVLSMPQVNIVKKTEVQTGGFSKESILPKRNSDKLIARKKDWDPKKYGGFDSPTVAYSVLVVAKVEKGKSKKLKSVKELLGITIMERSSFEKNPIDFLEAKGYKEVKKDLIIKLPKYSLFELENGRKRMLASAGELQKGNELALPSKYVNFLYLASHYEKLKGSPEDNEQKQLFVEQHKHYLDEIIEQISEFSKRVILADANLDKVLSAYNKHRDKPIREQAENIIHLFTLTNLGAPAAFKYFDTTIDRKRYTSTKEVLDATLIHQSITGLYETRIDLSQLGGDGGGSSGSSGSSGSSGSSGSSGGMNPLQLLQPLPAEIKGTKLLAHWNSGATITCIPESFLEDEQPIKKTLIKTIHGEKQQNVYYVTFKVKGRKVEAEVIASPYEYILLSPTDVPWLTQQPLQLTILVPLQEYQEKILSKTALPEDQKQQLKTLFVKYDNLWQHWENQVGHRKIRPHNIATGDYPPRPQKQYPINPKAKPSIQIVIDDLLKQGVLTPQNSTMNTPVYPVPKPDGRWRMVLDYREVNKTIPLTAAQNQHSAGILATIVRQKYKTTLDLANGFWAHPITPESYWLTAFTWQGKQYCWTRLPQGFLNSPALFNADVVDLLKEIPNVQVYVDDIYLSHDDPKEHVQQLEKVFQILLQAGYVVSLKKSEIGQKTVEFLGFNITKEGRGLTDTFKTKLLNITPPKDLKQLQSILGLLNFARNFIPNFAELVQPLYNLIAPAKGKYIEWSEENTKQLNMVIEALNTASNLEERLPEQRLVIKVNTSPSAGYVRYYNETGKKPIMYLNYVFSKAELKFSMLEKLLTTMHKALIKAMDLAMGQEILVYSPIVSMTKIQKTPLPERKALPIRWITWMTYLEDPRIQFHYDKTLPELKHIPDVYTSSQSPVKHPSQYEGVFYTDGSAIKSPDPTKSNNAGMGIVHATYKPEYQVLNQWSIPLGNHTAQMAEIAAVEFACKKALKIPGPVLVITDSFYVAESANKELPYWKSNGFVNNKKKPLKHISKWKSIAECLSMKPDITIQHEKGISLQIPVFILKGNALADKLATQGSYVVNAGKRTADGSEFEKRTADGSEFESPKKKAKVE

SEQ ID NO: 6343 - protein, 2101 aa, synthetic construct
MPAAKRVKLDGGDKKYSIGLDIGTNSVGWAVITDEYKVPSKKFKVLGNTDRHSIKKNLIGALLFDSGETAEATRLKRTARRRYTRRKNRICYLQEIFSNEMAKVDDSFFHRLEESFLVEEDKKHERHPIFGNIVDEVAYHEKYPTIYHLRKKLVDSTDKADLRLIYLALAHMIKFRGHFLIEGDLNPDNSDVDKLFIQLVQTYNQLFEENPINASGVDAKAILSARLSKSRRLENLIAQLPGEKKNGLFGNLIALSLGLTPNFKSNFDLAEDAKLQLSKDTYDDDLDNLLAQIGDQYADLFLAAKNLSDAILLSDILRVNTEITKAPLSASMIKRYDEHHQDLTLLKALVRQQLPEKYKEIFFDQSKNGYAGYIDGGASQEEFYKFIKPILEKMDGTEELLVKLNREDLLRKQRTFDNGSIPHQIHLGELHAILRRQEDFYPFLKDNREKIEKILTFRIPYYVGPLARGNSRFAWMTRKSEETITPWNFEEVVDKGASAQSFIERMTNFDKNLPNEKVLPKHSLLYEYFTVYNELTKVKYVTEGMRKPAFLSGEQKKAIVDLLFKTNRKVTVKQLKEDYFKKIECFDSVEISGVEDRFNASLGTYHDLLKIIKDKDFLDNEENEDILEDIVLTLTLFEDREMIEERLKTYAHLFDDKVMKQLKRRRYTGWGRLSRKLINGIRDKQSGKTILDFLKSDGFANRNFMQLIHDDSLTFKEDIQKAQVSGQGDSLHEHIANLAGSPAIKKGILQTVKVVDELVKVMGRHKPENIVIEMARENQTTQKGQKNSRERMKRIEEGIKELGSQILKEHPVENTQLQNEKLYLYYLQNGRDMYVDQELDINRLSDYDVDHIVPQSFLKDDSIDNKVLTRSDKARGKSDNVPSEEVVKKMKNYWRQLLNAKLITQRKFDNLTKAERGGLSELDKAGFIKRQLVETRQITKHVAQILDSRMNTKYDENDKLIREVKVITLKSKLVSDFRKDFQFYKVREINNYHHAHDAYLNAVVGTALIKKYPKLESEFVYGDYKVYDVRKMIAKSEQEIGKATAKYFFYSNIMNFFKTEITLANGEIRKRPLIETNGETGEIVWDKGRDFATVRKVLSMPQVNIVKKTEVQTGGFSKESILPKRNSDKLIARKKDWDPKKYGGFDSPTVAYSVLVVAKVEKGKSKKLKSVKELLGITIMERSSFEKNPIDFLEAKGYKEVKKDLIIKLPKYSLFELENGRKRMLASAGELQKGNELALPSKYVNFLYLASHYEKLKGSPEDNEQKQLFVEQHKHYLDEIIEQISEFSKRVILADANLDKVLSAYNKHRDKPIREQAENIIHLFTLTNLGAPAAFKYFDTTIDRKRYTSTKEVLDATLIHQSITGLYETRIDLSQLGGDGGGSSGSSGSSGSSGSSGSSGGVLNLEEEYRLHEKPVPSSIDPSWLQLFPTVWAERAGMGLANQVPPVVVELRSGASPVAVRQYPMSKEAREGIRPHIQKFLDLGVLVPCRSPWNTPLLPVKKPGTNDYRPVQDLREINKRVQDIHPTVPNPYNLLSSLPPSYTWYSVLDLKDAFFCLRLHPNSQPLFAFEWKDPEKGNTGQLTWTRLPQGFKNSPTLFNEALHRDLAPFRALNPQVVLLQYVDDLLVAAPTYEDCKKGTQKLLQELSKLGYRVSAKKAQLCQREVTYLGYLLKEGKRWLTPARKATVMKIPVPTTPRQVREFLGKAGFCRLFIPGFASLAAPLYPLTKPSIPFIWTEEHQQAFDHIKKALLSAPALALPDLTKPFTLYIDERAGVARGVLTQTLGPWRRPVAYLSKKLDPVASGWPTCLKAVAAVALLLKDADKLTLGQNVTVIASHSLESIVRQPPDRWMTNARMTHYQSLLLNERVSFAPPAVLNPATLLPVESEATPVHRCSEILAEETGTRRDLEDQPLPGVPTWYTDGSSFITEGKRRAGAPIVDGKRTVWASSLPEGTSAQKAELVALTQALRLAEGKNINIYTDSRYAFATAHIHGAIYKQRGWLTSAGKDIKNKEEILALLEAIHLPRRVAIIHCPGHQRGSNPVATGNRRADEAAKQAALSTRVLAGTTKPAGKRTADGSEFEKRTADGSEFESPKKKAKVE

SEQ ID NO: 6344 - protein, 2134 aa, synthetic construct
MPAAKRVKLDGGDKKYSIGLDIGTNSVGWAVITDEYKVPSKKFKVLGNTDRHSIKKNLIGALLFDSGETAEATRLKRTARRRYTRRKNRICYLQEIFSNEMAKVDDSFFHRLEESFLVEEDKKHERHPIFGNIVDEVAYHEKYPTIYHLRKKLVDSTDKADLRLIYLALAHMIKFRGHFLIEGDLNPDNSDVDKLFIQLVQTYNQLFEENPINASGVDAKAILSARLSKSRRLENLIAQLPGEKKNGLFGNLIALSLGLTPNFKSNFDLAEDAKLQLSKDTYDDDLDNLLAQIGDQYADLFLAAKNLSDAILLSDILRVNTEITKAPLSASMIKRYDEHHQDLTLLKALVRQQLPEKYKEIFFDQSKNGYAGYIDGGASQEEFYKFIKPILEKMDGTEELLVKLNREDLLRKQRTFDNGSIPHQIHLGELHAILRRQEDFYPFLKDNREKIEKILTFRIPYYVGPLARGNSRFAWMTRKSEETITPWNFEEVVDKGASAQSFIERMTNFDKNLPNEKVLPKHSLLYEYFTVYNELTKVKYVTEGMRKPAFLSGEQKKAIVDLLFKTNRKVTVKQLKEDYFKKIECFDSVEISGVEDRFNASLGTYHDLLKIIKDKDFLDNEENEDILEDIVLTLTLFEDREMIEERLKTYAHLFDDKVMKQLKRRRYTGWGRLSRKLINGIRDKQSGKTILDFLKSDGFANRNFMQLIHDDSLTFKEDIQKAQVSGQGDSLHEHIANLAGSPAIKKGILQTVKVVDELVKVMGRHKPENIVIEMARENQTTQKGQKNSRERMKRIEEGIKELGSQILKEHPVENTQLQNEKLYLYYLQNGRDMYVDQELDINRLSDYDVDHIVPQSFLKDDSIDNKVLTRSDKARGKSDNVPSEEVVKKMKNYWRQLLNAKLITQRKFDNLTKAERGGLSELDKAGFIKRQLVETRQITKHVAQILDSRMNTKYDENDKLIREVKVITLKSKLVSDFRKDFQFYKVREINNYHHAHDAYLNAVVGTALIKKYPKLESEFVYGDYKVYDVRKMIAKSEQEIGKATAKYFFYSNIMNFFKTEITLANGEIRKRPLIETNGETGEIVWDKGRDFATVRKVLSMPQVNIVKKTEVQTGGFSKESILPKRNSDKLIARKKDWDPKKYGGFDSPTVAYSVLVVAKVEKGKSKKLKSVKELLGITIMERSSFEKNPIDFLEAKGYKEVKKDLIIKLPKYSLFELENGRKRMLASAGELQKGNELALPSKYVNFLYLASHYEKLKGSPEDNEQKQLFVEQHKHYLDEIIEQISEFSKRVILADANLDKVLSAYNKHRDKPIREQAENIIHLFTLTNLGAPAAFKYFDTTIDRKRYTSTKEVLDATLIHQSITGLYETRIDLSQLGGDGGGSSGSSGSSGSSGSSGSSGGLLGRDLLTKLKAQIQFSTEGPQVTWEDRPAMCLVLNLEEEYRLHEKPVPPSIDPSWLQLFPMVWAEKAGMGLANQVPPVVVELKSDASPVAVRQYPMSKEAREGIRPHIQRFLDLGILVPCQSPWNTPLLPVKKPGTNDYRPVQDLREVNKRVQDIHPTVPNPYNLLSSLPPSHTWYSVLDLKDAFFCLKLHPNSQPLFAFEWRDPEKGNTGQLTWTRLPQGFKNSPTLFNEALHRDLASFRALNPQVVMLQYVDDLLVAAPTYRDCKEGTRRLLQELSKLGYRVSAKKAQLCREEVTYLGYLLKGGKRWLTPARKATVMKIPTPTTPRQVREFLGTAGFCRLWIPGFASLAAPLYPLTRPKVPFTWTEAHQEAFGRIKEALLSAPALALPDLTKPFALYVDEKEGVARGVLTQTLGPWRRPVAYLSKKLDPVASGWPTCLKAIAAVALLLKDADKLTLGQNVLVIAPHNLESIVRQPPDRWMTNARMTHYQSLLLNERVSFAPPAILNPATLLPVESDDTPIHICSEILAEETGTRPDLRDQPLPGVPAWYTDGSSFIMDGRRQAGAAIVDNKRTVWASNLPEGTSAQKAELIALTQALRLAEGKSINIYTDSRYAFATAHVHGAIYKQRGWLTSAGKDIKNKEEILALLEAIHLPKRVAIIHCPGHQRGTDPVATGNRKADEAAKQAAQSTRILTETTKNAGKRTADGSEFEKRTADGSEFESPKKKAKVE

SEQ ID NO: 6345 - protein, 2225 aa, synthetic construct
MPAAKRVKLDGGDKKYSIGLDIGTNSVGWAVITDEYKVPSKKFKVLGNTDRHSIKKNLIGALLFDSGETAEATRLKRTARRRYTRRKNRICYLQEIFSNEMAKVDDSFFHRLEESFLVEEDKKHERHPIFGNIVDEVAYHEKYPTIYHLRKKLVDSTDKADLRLIYLALAHMIKFRGHFLIEGDLNPDNSDVDKLFIQLVQTYNQLFEENPINASGVDAKAILSARLSKSRRLENLIAQLPGEKKNGLFGNLIALSLGLTPNFKSNFDLAEDAKLQLSKDTYDDDLDNLLAQIGDQYADLFLAAKNLSDAILLSDILRVNTEITKAPLSASMIKRYDEHHQDLTLLKALVRQQLPEKYKEIFFDQSKNGYAGYIDGGASQEEFYKFIKPILEKMDGTEELLVKLNREDLLRKQRTFDNGSIPHQIHLGELHAILRRQEDFYPFLKDNREKIEKILTFRIPYYVGPLARGNSRFAWMTRKSEETITPWNFEEVVDKGASAQSFIERMTNFDKNLPNEKVLPKHSLLYEYFTVYNELTKVKYVTEGMRKPAFLSGEQKKAIVDLLFKTNRKVTVKQLKEDYFKKIECFDSVEISGVEDRFNASLGTYHDLLKIIKDKDFLDNEENEDILEDIVLTLTLFEDREMIEERLKTYAHLFDDKVMKQLKRRRYTGWGRLSRKLINGIRDKQSGKTILDFLKSDGFANRNFMQLIHDDSLTFKEDIQKAQVSGQGDSLHEHIANLAGSPAIKKGILQTVKVVDELVKVMGRHKPENIVIEMARENQTTQKGQKNSRERMKRIEEGIKELGSQILKEHPVENTQLQNEKLYLYYLQNGRDMYVDQELDINRLSDYDVDHIVPQSFLKDDSIDNKVLTRSDKARGKSDNVPSEEVVKKMKNYWRQLLNAKLITQRKFDNLTKAERGGLSELDKAGFIKRQLVETRQITKHVAQILDSRMNTKYDENDKLIREVKVITLKSKLVSDFRKDFQFYKVREINNYHHAHDAYLNAVVGTALIKKYPKLESEFVYGDYKVYDVRKMIAKSEQEIGKATAKYFFYSNIMNFFKTEITLANGEIRKRPLIETNGETGEIVWDKGRDFATVRKVLSMPQVNIVKKTEVQTGGFSKESILPKRNSDKLIARKKDWDPKKYGGFDSPTVAYSVLVVAKVEKGKSKKLKSVKELLGITIMERSSFEKNPIDFLEAKGYKEVKKDLIIKLPKYSLFELENGRKRMLASAGELQKGNELALPSKYVNFLYLASHYEKLKGSPEDNEQKQLFVEQHKHYLDEIIEQISEFSKRVILADANLDKVLSAYNKHRDKPIREQAENIIHLFTLTNLGAPAAFKYFDTTIDRKRYTSTKEVLDATLIHQSITGLYETRIDLSQLGGDGGGSSGSSGSSGSSGSSGSSGGTLGDQGSRGSDPLPEPRVTLTVEGIPTEFLVNTGAEHSVLTKPMGKMGSKRTVVAGATGSKVYPWTTKRLLKIGQKQVTHSFLVIPECPAPLLGRDLLTKLKAQIQFSTEGPQVTWEDRPAMCLVLNLEEEYRLHEKPVPPSIDPSWLQLFPMVWAEKAGMGLANQVPPVVVELKSDASPVAVRQYPMSKEAREGIRPHIQRFLDLGILVPCQSPWNTPLLPVKKPGTNDYRPVQDLREVNKRVQDIHPTVPNPYNLLSSLPPSHTWYSVLDLKDAFFCLKLHPNSQPLFAFEWRDPEKGNTGQLTWTRLPQGFKNSPTLFNEALHRDLASFRALNPQVVMLQYVDDLLVAAPTYRDCKEGTRRLLQELSKLGYRVSAKKAQLCREEVTYLGYLLKGGKRWLTPARKATVMKIPTPTTPRQVREFLGTAGFCRLWIPGFASLAAPLYPLTRPKVPFTWTEAHQEAFGRIKEALLSAPALALPDLTKPFALYVDEKEGVARGVLTQTLGPWRRPVAYLSKKLDPVASGWPTCLKAIAAVALLLKDADKLTLGQNVLVIAPHNLESIVRQPPDRWMTNARMTHYQSLLLNERVSFAPPAILNPATLLPVESDDTPIHICSEILAEETGTRPDLRDQPLPGVPAWYTDGSSFIMDGRRQAGAAIVDNKRTVWASNLPEGTSAQKAELIALTQALRLAEGKSINIYTDSRYAFATAHVHGAIYKQRGWLTSAGKDIKNKEEILALLEAIHLPKRVAIIHCPGHQRGTDPVATGNRKADEAAKQAAQSTRILTETTKNAGKRTADGSEFEKRTADGSEFESPKKKAKVE

SEQ ID NO: 6346 - protein, 2225 aa, synthetic construct
MPAAKRVKLDGGDKKYSIGLDIGTNSVGWAVITDEYKVPSKKFKVLGNTDRHSIKKNLIGALLFDSGETAEATRLKRTARRRYTRRKNRICYLQEIFSNEMAKVDDSFFHRLEESFLVEEDKKHERHPIFGNIVDEVAYHEKYPTIYHLRKKLVDSTDKADLRLIYLALAHMIKFRGHFLIEGDLNPDNSDVDKLFIQLVQTYNQLFEENPINASGVDAKAILSARLSKSRRLENLIAQLPGEKKNGLFGNLIALSLGLTPNFKSNFDLAEDAKLQLSKDTYDDDLDNLLAQIGDQYADLFLAAKNLSDAILLSDILRVNTEITKAPLSASMIKRYDEHHQDLTLLKALVRQQLPEKYKEIFFDQSKNGYAGYIDGGASQEEFYKFIKPILEKMDGTEELLVKLNREDLLRKQRTFDNGSIPHQIHLGELHAILRRQEDFYPFLKDNREKIEKILTFRIPYYVGPLARGNSRFAWMTRKSEETITPWNFEEVVDKGASAQSFIERMTNFDKNLPNEKVLPKHSLLYEYFTVYNELTKVKYVTEGMRKPAFLSGEQKKAIVDLLFKTNRKVTVKQLKEDYFKKIECFDSVEISGVEDRFNASLGTYHDLLKIIKDKDFLDNEENEDILEDIVLTLTLFEDREMIEERLKTYAHLFDDKVMKQLKRRRYTGWGRLSRKLINGIRDKQSGKTILDFLKSDGFANRNFMQLIHDDSLTFKEDIQKAQVSGQGDSLHEHIANLAGSPAIKKGILQTVKVVDELVKVMGRHKPENIVIEMARENQTTQKGQKNSRERMKRIEEGIKELGSQILKEHPVENTQLQNEKLYLYYLQNGRDMYVDQELDINRLSDYDVDHIVPQSFLKDDSIDNKVLTRSDKARGKSDNVPSEEVVKKMKNYWRQLLNAKLITQRKFDNLTKAERGGLSELDKAGFIKRQLVETRQITKHVAQILDSRMNTKYDENDKLIREVKVITLKSKLVSDFRKDFQFYKVREINNYHHAHDAYLNAVVGTALIKKYPKLESEFVYGDYKVYDVRKMIAKSEQEIGKATAKYFFYSNIMNFFKTEITLANGEIRKRPLIETNGETGEIVWDKGRDFATVRKVLSMPQVNIVKKTEVQTGGFSKESILPKRNSDKLIARKKDWDPKKYGGFDSPTVAYSVLVVAKVEKGKSKKLKSVKELLGITIMERSSFEKNPIDFLEAKGYKEVKKDLIIKLPKYSLFELENGRKRMLASAGELQKGNELALPSKYVNFLYLASHYEKLKGSPEDNEQKQLFVEQHKHYLDEIIEQISEFSKRVILADANLDKVLSAYNKHRDKPIREQAENIIHLFTLTNLGAPAAFKYFDTTIDRKRYTSTKEVLDATLIHQSITGLYETRIDLSQLGGDGGGSSGSSGSSGSSGSSGSSGGTLGDQGSRGSDPLPEPRVTLTVEGIPTEFLVNTGAEHSVLTKPMGKMGSKRTVVAGATGSKVYPWTTKRLLKIGQKQVTHSFLVIPECPAPLLGRDLLTKLKAQIQFSTEGPQVTWEDRPAMCLVLNLEEEYRLHEKPVPPSIDPSWLQLFPMVWAEKAGMGLANQVPPVVVELKSDASPVAVRQYPMSKEAREGIRPHIQRFLDLGILVPCQSPWNTPLLPVKKPGTNDYRPVQDLREVNKRVQDIHPTVPNPYNLLSSLPPSHTWYSVLDLKDAFFCLKLHPNSQPLFAFEWRDPEKGNTGQLTWTRLPQGFKNSPTLFNEALHRDLASFRALNPQVVMLQYVDDLLVAAPTYRDCKEGTRRLLQELSKLGYRVSAKKAQLCREEVTYLGYLLKGGKRWLTPARKATVMKIPTPTTPRQVREFLGKAGFCRLFIPGFASLAAPLYPLTRPKVPFTWTEAHQEAFGRIKEALLSAPALALPDLTKPFALYVDEKEGVARGVLTQTLGPWRRPVAYLSKKLDPVASGWPTCLKAIAAVALLLKDADKLTLGQNVLVIAPHNLESIVRQPPDRWMTNARMTHYQSLLLNERVSFAPPAILNPATLLPVESDDTPIHICSEILAEETGTRPDLRDQPLPGVPAWYTDGSSFIMDGRRQAGAAIVDNKRTVWASNLPEGTSAQKAELIALTQALRLAEGKSINIYTDSRYAFATAHVHGAIYKQRGWLTSAGKDIKNKEEILALLEAIHLPKRVAIIHCPGHQRGTDPVATGNRKADEAAKQAAQSTRILTETTKNAGKRTADGSEFEKRTADGSEFESPKKKAKVE

SEQ ID NO: 6347 - protein, 2103 aa, synthetic construct
MPAAKRVKLDGGDKKYSIGLDIGTNSVGWAVITDEYKVPSKKFKVLGNTDRHSIKKNLIGALLFDSGETAEATRLKRTARRRYTRRKNRICYLQEIFSNEMAKVDDSFFHRLEESFLVEEDKKHERHPIFGNIVDEVAYHEKYPTIYHLRKKLVDSTDKADLRLIYLALAHMIKFRGHFLIEGDLNPDNSDVDKLFIQLVQTYNQLFEENPINASGVDAKAILSARLSKSRRLENLIAQLPGEKKNGLFGNLIALSLGLTPNFKSNFDLAEDAKLQLSKDTYDDDLDNLLAQIGDQYADLFLAAKNLSDAILLSDILRVNTEITKAPLSASMIKRYDEHHQDLTLLKALVRQQLPEKYKEIFFDQSKNGYAGYIDGGASQEEFYKFIKPILEKMDGTEELLVKLNREDLLRKQRTFDNGSIPHQIHLGELHAILRRQEDFYPFLKDNREKIEKILTFRIPYYVGPLARGNSRFAWMTRKSEETITPWNFEEVVDKGASAQSFIERMTNFDKNLPNEKVLPKHSLLYEYFTVYNELTKVKYVTEGMRKPAFLSGEQKKAIVDLLFKTNRKVTVKQLKEDYFKKIECFDSVEISGVEDRFNASLGTYHDLLKIIKDKDFLDNEENEDILEDIVLTLTLFEDREMIEERLKTYAHLFDDKVMKQLKRRRYTGWGRLSRKLINGIRDKQSGKTILDFLKSDGFANRNFMQLIHDDSLTFKEDIQKAQVSGQGDSLHEHIANLAGSPAIKKGILQTVKVVDELVKVMGRHKPENIVIEMARENQTTQKGQKNSRERMKRIEEGIKELGSQILKEHPVENTQLQNEKLYLYYLQNGRDMYVDQELDINRLSDYDVDHIVPQSFLKDDSIDNKVLTRSDKARGKSDNVPSEEVVKKMKNYWRQLLNAKLITQRKFDNLTKAERGGLSELDKAGFIKRQLVETRQITKHVAQILDSRMNTKYDENDKLIREVKVITLKSKLVSDFRKDFQFYKVREINNYHHAHDAYLNAVVGTALIKKYPKLESEFVYGDYKVYDVRKMIAKSEQEIGKATAKYFFYSNIMNFFKTEITLANGEIRKRPLIETNGETGEIVWDKGRDFATVRKVLSMPQVNIVKKTEVQTGGFSKESILPKRNSDKLIARKKDWDPKKYGGFDSPTVAYSVLVVAKVEKGKSKKLKSVKELLGITIMERSSFEKNPIDFLEAKGYKEVKKDLIIKLPKYSLFELENGRKRMLASAGELQKGNELALPSKYVNFLYLASHYEKLKGSPEDNEQKQLFVEQHKHYLDEIIEQISEFSKRVILADANLDKVLSAYNKHRDKPIREQAENIIHLFTLTNLGAPAAFKYFDTTIDRKRYTSTKEVLDATLIHQSITGLYETRIDLSQLGGDGGGSSGSSGSSGSSGSSGSSGGTLNLEDEYRLYETSAEPEVSPGSTWLSDFPQAWAETGGMGLAVRQAPLIIPLKATSTPVSIKQYPMSQEAKLGIKPHIQRLLDQGILVPCQSPWNTPLLPVKKPGTNDYRPVQDLREVNKRVEDIHPTVPNPYNLLSGLPPSHRWYTVLDLKDAFFCLRLHPTSQPLFAFEWRDPGMGISGQLTWTRLPQGFKNSPTLFNEALHRDLADFRIQHPDLILLQYVDDILLAATSELDCQQGTRALLLTLGNLGYRASAKKAQLCQKQVKYLGYLLKEGQRWLTEARKETVMGQPTPKTPRQLREFLGTAGFCRLWIPGFAEMAAPLYPLTKPGTLFNWGPDQQKAYQEIKQALLTAPALGLPDLTKPFELFVDEKQGYAKGVLTQKLGPWRRPVAYLSKKLDPVAAGWPPCLRMVAAIAVLRKDAGKLTMGQPLVILAPHAVEALVKQPPDRWLSNARMTHYQAMLLDTDRVQFGPVVALNPATLLPLPEEGAPHDCLEILAETHGTRPDLTDQPIPDADHTWYTDGSSFLQEGQRKAGAAVTTETEVIWARALPAGTSAQRAELIALTQALKMAEGKRLNVYTDSRYAFATAHIHGEIYRRRGWLTSEGREIKNKSEILALLKALFLPKRLSIIHCLGHQKGDSAEARGNRLADQAAREAAIKTPPDTSTLLAGKRTADGSEFEKRTADGSEFESPKKKAKVE

SEQ ID NO: 6348 - protein, 2103 aa, synthetic construct
MPAAKRVKLDGGDKKYSIGLDIGTNSVGWAVITDEYKVPSKKFKVLGNTDRHSIKKNLIGALLFDSGETAEATRLKRTARRRYTRRKNRICYLQEIFSNEMAKVDDSFFHRLEESFLVEEDKKHERHPIFGNIVDEVAYHEKYPTIYHLRKKLVDSTDKADLRLIYLALAHMIKFRGHFLIEGDLNPDNSDVDKLFIQLVQTYNQLFEENPINASGVDAKAILSARLSKSRRLENLIAQLPGEKKNGLFGNLIALSLGLTPNFKSNFDLAEDAKLQLSKDTYDDDLDNLLAQIGDQYADLFLAAKNLSDAILLSDILRVNTEITKAPLSASMIKRYDEHHQDLTLLKALVRQQLPEKYKEIFFDQSKNGYAGYIDGGASQEEFYKFIKPILEKMDGTEELLVKLNREDLLRKQRTFDNGSIPHQIHLGELHAILRRQEDFYPFLKDNREKIEKILTFRIPYYVGPLARGNSRFAWMTRKSEETITPWNFEEVVDKGASAQSFIERMTNFDKNLPNEKVLPKHSLLYEYFTVYNELTKVKYVTEGMRKPAFLSGEQKKAIVDLLFKTNRKVTVKQLKEDYFKKIECFDSVEISGVEDRFNASLGTYHDLLKIIKDKDFLDNEENEDILEDIVLTLTLFEDREMIEERLKTYAHLFDDKVMKQLKRRRYTGWGRLSRKLINGIRDKQSGKTILDFLKSDGFANRNFMQLIHDDSLTFKEDIQKAQVSGQGDSLHEHIANLAGSPAIKKGILQTVKVVDELVKVMGRHKPENIVIEMARENQTTQKGQKNSRERMKRIEEGIKELGSQILKEHPVENTQLQNEKLYLYYLQNGRDMYVDQELDINRLSDYDVDHIVPQSFLKDDSIDNKVLTRSDKARGKSDNVPSEEVVKKMKNYWRQLLNAKLITQRKFDNLTKAERGGLSELDKAGFIKRQLVETRQITKHVAQILDSRMNTKYDENDKLIREVKVITLKSKLVSDFRKDFQFYKVREINNYHHAHDAYLNAVVGTALIKKYPKLESEFVYGDYKVYDVRKMIAKSEQEIGKATAKYFFYSNIMNFFKTEITLANGEIRKRPLIETNGETGEIVWDKGRDFATVRKVLSMPQVNIVKKTEVQTGGFSKESILPKRNSDKLIARKKDWDPKKYGGFDSPTVAYSVLVVAKVEKGKSKKLKSVKELLGITIMERSSFEKNPIDFLEAKGYKEVKKDLIIKLPKYSLFELENGRKRMLASAGELQKGNELALPSKYVNFLYLASHYEKLKGSPEDNEQKQLFVEQHKHYLDEIIEQISEFSKRVILADANLDKVLSAYNKHRDKPIREQAENIIHLFTLTNLGAPAAFKYFDTTIDRKRYTSTKEVLDATLIHQSITGLYETRIDLSQLGGDGGGSSGSSGSSGSSGSSGSSGGTLNLEDEYRLYETSAEPEVSPGSTWLSDFPQAWAETGGMGLAVRQAPLIIPLKATSTPVSIKQYPMSQEAKLGIKPHIQRLLDQGILVPCQSPWNTPLLPVKKPGTNDYRPVQDLREVNKRVEDIHPTVPNPYNLLSGLPPSHRWYTVLDLKDAFFCLRLHPTSQPLFAFEWRDPGMGISGQLTWTRLPQGFKNSPTLFNEALHRDLADFRIQHPDLILLQYVDDILLAATSELDCQQGTRALLLTLGNLGYRASAKKAQLCQKQVKYLGYLLKEGQRWLTEARKETVMGQPTPKTPRQLREFLGKAGFCRLFIPGFAEMAAPLYPLTKPGTLFNWGPDQQKAYQEIKQALLTAPALGLPDLTKPFELFVDEKQGYAKGVLTQKLGPWRRPVAYLSKKLDPVAAGWPPCLRMVAAIAVLRKDAGKLTMGQPLVILAPHAVEALVKQPPDRWLSNARMTHYQAMLLDTDRVQFGPVVALNPATLLPLPEEGAPHDCLEILAETHGTRPDLTDQPIPDADHTWYTDGSSFLQEGQRKAGAAVTTETEVIWARALPAGTSAQRAELIALTQALKMAEGKRLNVYTDSRYAFATAHIHGEIYRRRGWLTSEGREIKNKSEILALLKALFLPKRLSIIHCLGHQKGDSAEARGNRLADQAAREAAIKTPPDTSTLLAGKRTADGSEFEKRTADGSEFESPKKKAKVE

SEQ ID NO: 6349 - protein, 2103 aa, synthetic construct
MPAAKRVKLDGGDKKYSIGLDIGTNSVGWAVITDEYKVPSKKFKVLGNTDRHSIKKNLIGALLFDSGETAEATRLKRTARRRYTRRKNRICYLQEIFSNEMAKVDDSFFHRLEESFLVEEDKKHERHPIFGNIVDEVAYHEKYPTIYHLRKKLVDSTDKADLRLIYLALAHMIKFRGHFLIEGDLNPDNSDVDKLFIQLVQTYNQLFEENPINASGVDAKAILSARLSKSRRLENLIAQLPGEKKNGLFGNLIALSLGLTPNFKSNFDLAEDAKLQLSKDTYDDDLDNLLAQIGDQYADLFLAAKNLSDAILLSDILRVNTEITKAPLSASMIKRYDEHHQDLTLLKALVRQQLPEKYKEIFFDQSKNGYAGYIDGGASQEEFYKFIKPILEKMDGTEELLVKLNREDLLRKQRTFDNGSIPHQIHLGELHAILRRQEDFYPFLKDNREKIEKILTFRIPYYVGPLARGNSRFAWMTRKSEETITPWNFEEVVDKGASAQSFIERMTNFDKNLPNEKVLPKHSLLYEYFTVYNELTKVKYVTEGMRKPAFLSGEQKKAIVDLLFKTNRKVTVKQLKEDYFKKIECFDSVEISGVEDRFNASLGTYHDLLKIIKDKDFLDNEENEDILEDIVLTLTLFEDREMIEERLKTYAHLFDDKVMKQLKRRRYTGWGRLSRKLINGIRDKQSGKTILDFLKSDGFANRNFMQLIHDDSLTFKEDIQKAQVSGQGDSLHEHIANLAGSPAIKKGILQTVKVVDELVKVMGRHKPENIVIEMARENQTTQKGQKNSRERMKRIEEGIKELGSQILKEHPVENTQLQNEKLYLYYLQNGRDMYVDQELDINRLSDYDVDHIVPQSFLKDDSIDNKVLTRSDKARGKSDNVPSEEVVKKMKNYWRQLLNAKLITQRKFDNLTKAERGGLSELDKAGFIKRQLVETRQITKHVAQILDSRMNTKYDENDKLIREVKVITLKSKLVSDFRKDFQFYKVREINNYHHAHDAYLNAVVGTALIKKYPKLESEFVYGDYKVYDVRKMIAKSEQEIGKATAKYFFYSNIMNFFKTEITLANGEIRKRPLIETNGETGEIVWDKGRDFATVRKVLSMPQVNIVKKTEVQTGGFSKESILPKRNSDKLIARKKDWDPKKYGGFDSPTVAYSVLVVAKVEKGKSKKLKSVKELLGITIMERSSFEKNPIDFLEAKGYKEVKKDLIIKLPKYSLFELENGRKRMLASAGELQKGNELALPSKYVNFLYLASHYEKLKGSPEDNEQKQLFVEQHKHYLDEIIEQISEFSKRVILADANLDKVLSAYNKHRDKPIREQAENIIHLFTLTNLGAPAAFKYFDTTIDRKRYTSTKEVLDATLIHQSITGLYETRIDLSQLGGDGGGSSGSSGSSGSSGSSGSSGGTLNIEDEYRLHETSKEPDVSLGSTWLSDFPQAWAETGGMGLAVRQAPLIIPLKATSTPVSIKQYPMSQEARLGIKPHIQRLLDQGILVPCQSPWNTPLLPVKKPGTNDYRPVQDLREVNKRVEDIHPTVPNPYNLLSGLPPSHQWYTVLDLKDAFFCLRLHPTSQPLFAFEWRDPEMGISGQLTWTRLPQGFKNSPTLFNEALHRDLAGFRIQHPDLILLQYVDDLLLAATSELDCQQGTRALLQTLGDLGYRASAKKAQICQKQVKYLGYLLKEGQRWLTEARKETVMGQPIPKTPRQLREFLGTAGFCRLWIPGFAEMAAPLYPLTKPGTLFNWGPDQQKAFQEIKQALLTAPALGLPDLTKPFELFVDEKQGYAKGVLTQKLGPWRRPVAYLSKKLDPVAAGWPPCLRMVAAIAVLTKDAGKLTMGQPLVILAPHAVEALVKQPPDRWLSNARMTHYQALLLDTDRVQFGPVVALNPATLLPLPEEGLQHDCLDILAEAHGTRSDLMDQPLPDADHTWYTDGSSFLQEGQRKAGAAVTTETEVIWARALPAGTSAQRAELIALTQALKMAEGKKLNVYTDSRYAFATAHIHGEIYRRRGWLTSEGKEIKNKDEILALLKALFLPKRLSIIHCPGHQKGNSAEARGNRMADQAAREVATRETPETSTLLAGKRTADGSEFEKRTADGSEFESPKKKAKVE

SEQ ID NO: 6350 - protein, 2103 aa, synthetic construct
MPAAKRVKLDGGDKKYSIGLDIGTNSVGWAVITDEYKVPSKKFKVLGNTDRHSIKKNLIGALLFDSGETAEATRLKRTARRRYTRRKNRICYLQEIFSNEMAKVDDSFFHRLEESFLVEEDKKHERHPIFGNIVDEVAYHEKYPTIYHLRKKLVDSTDKADLRLIYLALAHMIKFRGHFLIEGDLNPDNSDVDKLFIQLVQTYNQLFEENPINASGVDAKAILSARLSKSRRLENLIAQLPGEKKNGLFGNLIALSLGLTPNFKSNFDLAEDAKLQLSKDTYDDDLDNLLAQIGDQYADLFLAAKNLSDAILLSDILRVNTEITKAPLSASMIKRYDEHHQDLTLLKALVRQQLPEKYKEIFFDQSKNGYAGYIDGGASQEEFYKFIKPILEKMDGTEELLVKLNREDLLRKQRTFDNGSIPHQIHLGELHAILRRQEDFYPFLKDNREKIEKILTFRIPYYVGPLARGNSRFAWMTRKSEETITPWNFEEVVDKGASAQSFIERMTNFDKNLPNEKVLPKHSLLYEYFTVYNELTKVKYVTEGMRKPAFLSGEQKKAIVDLLFKTNRKVTVKQLKEDYFKKIECFDSVEISGVEDRFNASLGTYHDLLKIIKDKDFLDNEENEDILEDIVLTLTLFEDREMIEERLKTYAHLFDDKVMKQLKRRRYTGWGRLSRKLINGIRDKQSGKTILDFLKSDGFANRNFMQLIHDDSLTFKEDIQKAQVSGQGDSLHEHIANLAGSPAIKKGILQTVKVVDELVKVMGRHKPENIVIEMARENQTTQKGQKNSRERMKRIEEGIKELGSQILKEHPVENTQLQNEKLYLYYLQNGRDMYVDQELDINRLSDYDVDHIVPQSFLKDDSIDNKVLTRSDKARGKSDNVPSEEVVKKMKNYWRQLLNAKLITQRKFDNLTKAERGGLSELDKAGFIKRQLVETRQITKHVAQILDSRMNTKYDENDKLIREVKVITLKSKLVSDFRKDFQFYKVREINNYHHAHDAYLNAVVGTALIKKYPKLESEFVYGDYKVYDVRKMIAKSEQEIGKATAKYFFYSNIMNFFKTEITLANGEIRKRPLIETNGETGEIVWDKGRDFATVRKVLSMPQVNIVKKTEVQTGGFSKESILPKRNSDKLIARKKDWDPKKYGGFDSPTVAYSVLVVAKVEKGKSKKLKSVKELLGITIMERSSFEKNPIDFLEAKGYKEVKKDLIIKLPKYSLFELENGRKRMLASAGELQKGNELALPSKYVNFLYLASHYEKLKGSPEDNEQKQLFVEQHKHYLDEIIEQISEFSKRVILADANLDKVLSAYNKHRDKPIREQAENIIHLFTLTNLGAPAAFKYFDTTIDRKRYTSTKEVLDATLIHQSITGLYETRIDLSQLGGDGGGSSGSSGSSGSSGSSGSSGGTLNIEDEYRLHETSKGPDVPLGSTWLSDFPQAWAETGGMGLAFRQAPLIISLKATSTPVSIKQYPMSQEARLGIKPHIQRLLDQGILVPCQSPWNTPLLPVKKPGTNDYRPVQDLREVNKRVEDIHPTVPNPYNLLSGLPPSHQWYTVLDLKDAFFCLRLHPTSQSLFAFEWKDPEMGISGQLTWTRLPQGFKNSPTLFDEALHRDLADFRIQHPDLILLQYVDDLLLAATSELDCQQGTRALLQTLGDLGYRASAKKAQICQKQVKYLGYLLKEGQRWLTEARKETVMGQPTPKTPRQLREFLGTAGLCRLWIPGFAEMAAPLYPLTKTGTLFKWGPDQQKAYQEIKQALLTAPALGLPDLTKPFELFVDEKQGYAKGVLTQKLGPWRRPVAYLSKKLDPVAAGWPPCLRMVAAIAVLTKDVGKLTMGQPLVILAPHAVEALVKQPPDRWLSNARMTHYQALLLDTDRVQFGPIVALNPATLLPLPEEGLQHDCLDILAEAHGTRPDLTDQPLPDADHTWYTDGSSFLQEGQRRAGAAVTTETEVIWAKALPAGTSAQRAELIALTQALKMAAGKKLNVYTDSRYAFATAHIHGEIYRRRGLLTSEGKEIKNKDEILALLKALFLPKRLSIIHCPGHQKGNHAEARGNRMADQAAREVATRETPETSTLLAGKRTADGSEFEKRTADGSEFESPKKKAKVE

SEQ ID NO: 6351 - protein, 2103 aa, synthetic construct
MPAAKRVKLDGGDKKYSIGLDIGTNSVGWAVITDEYKVPSKKFKVLGNTDRHSIKKNLIGALLFDSGETAEATRLKRTARRRYTRRKNRICYLQEIFSNEMAKVDDSFFHRLEESFLVEEDKKHERHPIFGNIVDEVAYHEKYPTIYHLRKKLVDSTDKADLRLIYLALAHMIKFRGHFLIEGDLNPDNSDVDKLFIQLVQTYNQLFEENPINASGVDAKAILSARLSKSRRLENLIAQLPGEKKNGLFGNLIALSLGLTPNFKSNFDLAEDAKLQLSKDTYDDDLDNLLAQIGDQYADLFLAAKNLSDAILLSDILRVNTEITKAPLSASMIKRYDEHHQDLTLLKALVRQQLPEKYKEIFFDQSKNGYAGYIDGGASQEEFYKFIKPILEKMDGTEELLVKLNREDLLRKQRTFDNGSIPHQIHLGELHAILRRQEDFYPFLKDNREKIEKILTFRIPYYVGPLARGNSRFAWMTRKSEETITPWNFEEVVDKGASAQSFIERMTNFDKNLPNEKVLPKHSLLYEYFTVYNELTKVKYVTEGMRKPAFLSGEQKKAIVDLLFKTNRKVTVKQLKEDYFKKIECFDSVEISGVEDRFNASLGTYHDLLKIIKDKDFLDNEENEDILEDIVLTLTLFEDREMIEERLKTYAHLFDDKVMKQLKRRRYTGWGRLSRKLINGIRDKQSGKTILDFLKSDGFANRNFMQLIHDDSLTFKEDIQKAQVSGQGDSLHEHIANLAGSPAIKKGILQTVKVVDELVKVMGRHKPENIVIEMARENQTTQKGQKNSRERMKRIEEGIKELGSQILKEHPVENTQLQNEKLYLYYLQNGRDMYVDQELDINRLSDYDVDHIVPQSFLKDDSIDNKVLTRSDKARGKSDNVPSEEVVKKMKNYWRQLLNAKLITQRKFDNLTKAERGGLSELDKAGFIKRQLVETRQITKHVAQILDSRMNTKYDENDKLIREVKVITLKSKLVSDFRKDFQFYKVREINNYHHAHDAYLNAVVGTALIKKYPKLESEFVYGDYKVYDVRKMIAKSEQEIGKATAKYFFYSNIMNFFKTEITLANGEIRKRPLIETNGETGEIVWDKGRDFATVRKVLSMPQVNIVKKTEVQTGGFSKESILPKRNSDKLIARKKDWDPKKYGGFDSPTVAYSVLVVAKVEKGKSKKLKSVKELLGITIMERSSFEKNPIDFLEAKGYKEVKKDLIIKLPKYSLFELENGRKRMLASAGELQKGNELALPSKYVNFLYLASHYEKLKGSPEDNEQKQLFVEQHKHYLDEIIEQISEFSKRVILADANLDKVLSAYNKHRDKPIREQAENIIHLFTLTNLGAPAAFKYFDTTIDRKRYTSTKEVLDATLIHQSITGLYETRIDLSQLGGDGGGSSGSSGSSGSSGSSGSSGGTLNIEDEYRLHETSKGPDVPLGSTWLSDFPQAWAETGGMGLAVRQAPLIIPLKATSTPVSIKQYPMSQEARLGIKPHIQRLLDQGILVPCQSPWNTPLLPVKKPGTNDYRPVQDLREVNKRVEDIHPTVPNPYNLLSGLPPSHQWYTVLDLKDAFFCLRLHPTSQSLFAFEWRDPEMGISGQLTWTRLPQGFKNSPTLFNEALHRDLADFRIQHPDLILLQYVDDLLLAATSELDCQQGTRALLQTLGDLGYRASAKKAQICQKQVKYLGYLLKEGQRWLTEARKETVMGQPTPKTPRQLREFLGTAGFCRLWIPGFAEMAAPLYPLTKPGTLFEWGPDQQKAYQEIKQALLTAPALGLPDLTKPFELFVDEKQGYAKGVLTQKLGPWRRPVAYLSKKLDPVAAGWPPCLRMVAAIAVLTKDAGKLTMGQPLVILAPHAVEALVKQPPDRWLSNARMTHYQALLLDTDRVQFGPIVALNPATLLPLPEEGLQHDCLDILAEAHGTRPDLTDQPLPDADHTWYTDGSSFLQEGQRKAGAAVTTETEVVWAKALPAGTSAQRAELIALTQALKMAEGKKLNVYTDSRYAFATAHIHGEIYRRRGWLTSEGKEIKNKDEILALLKALFLPKRLSIIHCPGHQKGNRAEARGNRMADQAAREVATRETPETSTLLAGKRTADGSEFEKRTADGSEFESPKKKAKVE

SEQ ID NO: 6352 - protein, 2103 aa, synthetic construct
MPAAKRVKLDGGDKKYSIGLDIGTNSVGWAVITDEYKVPSKKFKVLGNTDRHSIKKNLIGALLFDSGETAEATRLKRTARRRYTRRKNRICYLQEIFSNEMAKVDDSFFHRLEESFLVEEDKKHERHPIFGNIVDEVAYHEKYPTIYHLRKKLVDSTDKADLRLIYLALAHMIKFRGHFLIEGDLNPDNSDVDKLFIQLVQTYNQLFEENPINASGVDAKAILSARLSKSRRLENLIAQLPGEKKNGLFGNLIALSLGLTPNFKSNFDLAEDAKLQLSKDTYDDDLDNLLAQIGDQYADLFLAAKNLSDAILLSDILRVNTEITKAPLSASMIKRYDEHHQDLTLLKALVRQQLPEKYKEIFFDQSKNGYAGYIDGGASQEEFYKFIKPILEKMDGTEELLVKLNREDLLRKQRTFDNGSIPHQIHLGELHAILRRQEDFYPFLKDNREKIEKILTFRIPYYVGPLARGNSRFAWMTRKSEETITPWNFEEVVDKGASAQSFIERMTNFDKNLPNEKVLPKHSLLYEYFTVYNELTKVKYVTEGMRKPAFLSGEQKKAIVDLLFKTNRKVTVKQLKEDYFKKIECFDSVEISGVEDRFNASLGTYHDLLKIIKDKDFLDNEENEDILEDIVLTLTLFEDREMIEERLKTYAHLFDDKVMKQLKRRRYTGWGRLSRKLINGIRDKQSGKTILDFLKSDGFANRNFMQLIHDDSLTFKEDIQKAQVSGQGDSLHEHIANLAGSPAIKKGILQTVKVVDELVKVMGRHKPENIVIEMARENQTTQKGQKNSRERMKRIEEGIKELGSQILKEHPVENTQLQNEKLYLYYLQNGRDMYVDQELDINRLSDYDVDHIVPQSFLKDDSIDNKVLTRSDKARGKSDNVPSEEVVKKMKNYWRQLLNAKLITQRKFDNLTKAERGGLSELDKAGFIKRQLVETRQITKHVAQILDSRMNTKYDENDKLIREVKVITLKSKLVSDFRKDFQFYKVREINNYHHAHDAYLNAVVGTALIKKYPKLESEFVYGDYKVYDVRKMIAKSEQEIGKATAKYFFYSNIMNFFKTEITLANGEIRKRPLIETNGETGEIVWDKGRDFATVRKVLSMPQVNIVKKTEVQTGGFSKESILPKRNSDKLIARKKDWDPKKYGGFDSPTVAYSVLVVAKVEKGKSKKLKSVKELLGITIMERSSFEKNPIDFLEAKGYKEVKKDLIIKLPKYSLFELENGRKRMLASAGELQKGNELALPSKYVNFLYLASHYEKLKGSPEDNEQKQLFVEQHKHYLDEIIEQISEFSKRVILADANLDKVLSAYNKHRDKPIREQAENIIHLFTLTNLGAPAAFKYFDTTIDRKRYTSTKEVLDATLIHQSITGLYETRIDLSQLGGDGGGSSGSSGSSGSSGSSGSSGGTLNIEDEHRLHETSKEPDVSLGSTWLSDFPQAWAETGGMGLAVRQAPLIIPLKATSTPVSIKQYPMSQEARLGIKPHIQRLLDQGILVPCQSPWNTPLLPVKKPGTNDYRPVQDLREVNKRVEDIHPTVPNPYNLLSGLPPSHQWYTVLDLKDAFFCLRLHPTSQPLFAFEWRDPEMGISGQLTWTRLPQGFKNSPTLFDEALHRDLADFRIQHPDLILLQYVDDLLLAATSELDCQQGTRALLQTLGNLGYRASAKKAQICQKQVKYLGYLLKEGQRWLTEARKETVMGQPTPKTPRQLREFLGTAGFCRLWIPGFAEMAAPLYPLTKTGTLFNWGPDQQKAYQEIKQALLTAPALGLPDLTKPFELFVDEKQGYAKGVLTQKLGPWRRPVAYLSKKLDPVAAGWPPCLRMVAAIAVLTKDAGKLTMGQPLVILAPHAVEALVKQPPDRWLSNARMTHYQALLLDTDRVQFGPVVALNPATLLPLPEEGLQHNCLDILAEAHGTRPDLTDQPLPDADHTWYTDGSSLLQEGQRKAGAAVTTETEVIWAKALPAGTSAQRAELIALTQALKMAEGKKLNVYTDSRYAFATAHIHGEIYRRRGLLTSEGKEIKNKDEILALLKALFLPKRLSIIHCPGHQKGHSAEARGNRMADQAARKAAITETPDTSTLLAGKRTADGSEFEKRTADGSEFESPKKKAKVE

SEQ ID NO: 6353 - protein, 2103 aa, synthetic construct
MPAAKRVKLDGGDKKYSIGLDIGTNSVGWAVITDEYKVPSKKFKVLGNTDRHSIKKNLIGALLFDSGETAEATRLKRTARRRYTRRKNRICYLQEIFSNEMAKVDDSFFHRLEESFLVEEDKKHERHPIFGNIVDEVAYHEKYPTIYHLRKKLVDSTDKADLRLIYLALAHMIKFRGHFLIEGDLNPDNSDVDKLFIQLVQTYNQLFEENPINASGVDAKAILSARLSKSRRLENLIAQLPGEKKNGLFGNLIALSLGLTPNFKSNFDLAEDAKLQLSKDTYDDDLDNLLAQIGDQYADLFLAAKNLSDAILLSDILRVNTEITKAPLSASMIKRYDEHHQDLTLLKALVRQQLPEKYKEIFFDQSKNGYAGYIDGGASQEEFYKFIKPILEKMDGTEELLVKLNREDLLRKQRTFDNGSIPHQIHLGELHAILRRQEDFYPFLKDNREKIEKILTFRIPYYVGPLARGNSRFAWMTRKSEETITPWNFEEVVDKGASAQSFIERMTNFDKNLPNEKVLPKHSLLYEYFTVYNELTKVKYVTEGMRKPAFLSGEQKKAIVDLLFKTNRKVTVKQLKEDYFKKIECFDSVEISGVEDRFNASLGTYHDLLKIIKDKDFLDNEENEDILEDIVLTLTLFEDREMIEERLKTYAHLFDDKVMKQLKRRRYTGWGRLSRKLINGIRDKQSGKTILDFLKSDGFANRNFMQLIHDDSLTFKEDIQKAQVSGQGDSLHEHIANLAGSPAIKKGILQTVKVVDELVKVMGRHKPENIVIEMARENQTTQKGQKNSRERMKRIEEGIKELGSQILKEHPVENTQLQNEKLYLYYLQNGRDMYVDQELDINRLSDYDVDHIVPQSFLKDDSIDNKVLTRSDKARGKSDNVPSEEVVKKMKNYWRQLLNAKLITQRKFDNLTKAERGGLSELDKAGFIKRQLVETRQITKHVAQILDSRMNTKYDENDKLIREVKVITLKSKLVSDFRKDFQFYKVREINNYHHAHDAYLNAVVGTALIKKYPKLESEFVYGDYKVYDVRKMIAKSEQEIGKATAKYFFYSNIMNFFKTEITLANGEIRKRPLIETNGETGEIVWDKGRDFATVRKVLSMPQVNIVKKTEVQTGGFSKESILPKRNSDKLIARKKDWDPKKYGGFDSPTVAYSVLVVAKVEKGKSKKLKSVKELLGITIMERSSFEKNPIDFLEAKGYKEVKKDLIIKLPKYSLFELENGRKRMLASAGELQKGNELALPSKYVNFLYLASHYEKLKGSPEDNEQKQLFVEQHKHYLDEIIEQISEFSKRVILADANLDKVLSAYNKHRDKPIREQAENIIHLFTLTNLGAPAAFKYFDTTIDRKRYTSTKEVLDATLIHQSITGLYETRIDLSQLGGDGGGSSGSSGSSGSSGSSGSSGGTLNIEDEYRLHEISTEPDVSPGSTWLSDFPQAWAETGGMGLAVRQAPLIIPLKATSTPVSIKQYPMSQEAKLGIKPHIQRLLDQGILVPCQSPWNTPLLPVKKPGTNDYRPVQGLREVNKRVEDIHPTVPNPYNLLSGLPTSHRWYTVLDLKDAFFCLRLHPTSQPLFASEWRDPGMGISGQLTWTRLPQGFKNSPTLFDEALHRGLADFRIQHPDLILLQYVDDLLLAATSELDCQQGTRALLKTLGNLGYRASAKKAQICQKQVKYLGYLLREGQRWLTEARKETVMGQPTPKTPRQLREFLGTAGFCRLWIPRFAEMAAPLYPLTKTGTLFNWGPDQQKAYHEIKQALLTAPALGLPDLTKPFELFVDEKQGYAKGVLTQKLGPWRRPVAYLSKKLDPVAAGWPPCLRMVAAIAVLTKDAGKLTMGQPLVILAPHAVEALVKQPPDRWLSNARMTHYQAMLLDTDRVQFGPVVALNPATLLPLPEEGAPHDCLEILAETHGTEPDLTDQPIPDADHTWYTDGSSFLQEGQRKAGAAVTTETEVIWARALPAGTSAQRAELIALTQALKMAEGKRLNVYTDSRYAFATAHIHGEIYKRRGLLTSEGREIKNKSEILALLKALFLPKRLSIIHCLGHQKGDSAEARGNRLADQAAREAAIKTPPDTSTLLAGKRTADGSEFEKRTADGSEFESPKKKAKVE

SEQ ID NO: 6354 - protein, 2097 aa, synthetic construct
MPAAKRVKLDGGDKKYSIGLDIGTNSVGWAVITDEYKVPSKKFKVLGNTDRHSIKKNLIGALLFDSGETAEATRLKRTARRRYTRRKNRICYLQEIFSNEMAKVDDSFFHRLEESFLVEEDKKHERHPIFGNIVDEVAYHEKYPTIYHLRKKLVDSTDKADLRLIYLALAHMIKFRGHFLIEGDLNPDNSDVDKLFIQLVQTYNQLFEENPINASGVDAKAILSARLSKSRRLENLIAQLPGEKKNGLFGNLIALSLGLTPNFKSNFDLAEDAKLQLSKDTYDDDLDNLLAQIGDQYADLFLAAKNLSDAILLSDILRVNTEITKAPLSASMIKRYDEHHQDLTLLKALVRQQLPEKYKEIFFDQSKNGYAGYIDGGASQEEFYKFIKPILEKMDGTEELLVKLNREDLLRKQRTFDNGSIPHQIHLGELHAILRRQEDFYPFLKDNREKIEKILTFRIPYYVGPLARGNSRFAWMTRKSEETITPWNFEEVVDKGASAQSFIERMTNFDKNLPNEKVLPKHSLLYEYFTVYNELTKVKYVTEGMRKPAFLSGEQKKAIVDLLFKTNRKVTVKQLKEDYFKKIECFDSVEISGVEDRFNASLGTYHDLLKIIKDKDFLDNEENEDILEDIVLTLTLFEDREMIEERLKTYAHLFDDKVMKQLKRRRYTGWGRLSRKLINGIRDKQSGKTILDFLKSDGFANRNFMQLIHDDSLTFKEDIQKAQVSGQGDSLHEHIANLAGSPAIKKGILQTVKVVDELVKVMGRHKPENIVIEMARENQTTQKGQKNSRERMKRIEEGIKELGSQILKEHPVENTQLQNEKLYLYYLQNGRDMYVDQELDINRLSDYDVDHIVPQSFLKDDSIDNKVLTRSDKARGKSDNVPSEEVVKKMKNYWRQLLNAKLITQRKFDNLTKAERGGLSELDKAGFIKRQLVETRQITKHVAQILDSRMNTKYDENDKLIREVKVITLKSKLVSDFRKDFQFYKVREINNYHHAHDAYLNAVVGTALIKKYPKLESEFVYGDYKVYDVRKMIAKSEQEIGKATAKYFFYSNIMNFFKTEITLANGEIRKRPLIETNGETGEIVWDKGRDFATVRKVLSMPQVNIVKKTEVQTGGFSKESILPKRNSDKLIARKKDWDPKKYGGFDSPTVAYSVLVVAKVEKGKSKKLKSVKELLGITIMERSSFEKNPIDFLEAKGYKEVKKDLIIKLPKYSLFELENGRKRMLASAGELQKGNELALPSKYVNFLYLASHYEKLKGSPEDNEQKQLFVEQHKHYLDEIIEQISEFSKRVILADANLDKVLSAYNKHRDKPIREQAENIIHLFTLTNLGAPAAFKYFDTTIDRKRYTSTKEVLDATLIHQSITGLYETRIDLSQLGGDGGGSSGSSGSSGSSGSSGSSGGTLQLDDEYRLYSPLVKPDQNIQFWLEQFPQAWAETAGMGLAKQVPPQVIQLKASATPVSVRQYPLSKEAQEGIRPHVQRLIQQGILVPVQSPWNTPLLPVRKPGTNDYRPVQDLREVNKRVQDIHPTVPNPYNLLCALPPQRSWYTVLDLKDAFFCLRLHPTSQPLFAFEWRDPGTGRTGQLTWTRLPQGFKNSPTIFDEALHRDLANFRIQHPQVTLLQYVDDLLLAGATKQDCLEGTKALLLELSDLGYRASAKKAQICRREVTYLGYSLRDGQRWLTEARKKTVVQIPAPTTAKQVREFLGTAGFCRLWIPGFATLAAPLYPLTKEKGEFSWAPEHQKAFDAIKKALLSAPALALPDVTKPFTLYVDERKGVARGVLTQTLGPWRRPVAYLSKKLDPVASGWPVCLKAIAAVAILVKDADKLTLGQNITVIAPHALENIVRQPPDRWMTNARMTHYQSLLLTERVTFAPPAALNPATLLPEETDEPVTHDCHQLLIEETGVRKDLTDIPLTGEVLTWFTDGSSYVVEGKRMAGAAVVDGTRTIWASSLPEGTSAQKAELMALTQALRLAEGKSINIYTDSRYAFATAHVHGAIYKQRGLLTSAGREIKNKEEILSLLEALHLPKRLAIIHCPGHQKAKDPISRGNQMADRVAKQAAQGVNLLAGKRTADGSEFEKRTADGSEFESPKKKAKVE

SEQ ID NO: 6355 - protein, 2183 aa, synthetic construct
MPAAKRVKLDGGDKKYSIGLDIGTNSVGWAVITDEYKVPSKKFKVLGNTDRHSIKKNLIGALLFDSGETAEATRLKRTARRRYTRRKNRICYLQEIFSNEMAKVDDSFFHRLEESFLVEEDKKHERHPIFGNIVDEVAYHEKYPTIYHLRKKLVDSTDKADLRLIYLALAHMIKFRGHFLIEGDLNPDNSDVDKLFIQLVQTYNQLFEENPINASGVDAKAILSARLSKSRRLENLIAQLPGEKKNGLFGNLIALSLGLTPNFKSNFDLAEDAKLQLSKDTYDDDLDNLLAQIGDQYADLFLAAKNLSDAILLSDILRVNTEITKAPLSASMIKRYDEHHQDLTLLKALVRQQLPEKYKEIFFDQSKNGYAGYIDGGASQEEFYKFIKPILEKMDGTEELLVKLNREDLLRKQRTFDNGSIPHQIHLGELHAILRRQEDFYPFLKDNREKIEKILTFRIPYYVGPLARGNSRFAWMTRKSEETITPWNFEEVVDKGASAQSFIERMTNFDKNLPNEKVLPKHSLLYEYFTVYNELTKVKYVTEGMRKPAFLSGEQKKAIVDLLFKTNRKVTVKQLKEDYFKKIECFDSVEISGVEDRFNASLGTYHDLLKIIKDKDFLDNEENEDILEDIVLTLTLFEDREMIEERLKTYAHLFDDKVMKQLKRRRYTGWGRLSRKLINGIRDKQSGKTILDFLKSDGFANRNFMQLIHDDSLTFKEDIQKAQVSGQGDSLHEHIANLAGSPAIKKGILQTVKVVDELVKVMGRHKPENIVIEMARENQTTQKGQKNSRERMKRIEEGIKELGSQILKEHPVENTQLQNEKLYLYYLQNGRDMYVDQELDINRLSDYDVDHIVPQSFLKDDSIDNKVLTRSDKARGKSDNVPSEEVVKKMKNYWRQLLNAKLITQRKFDNLTKAERGGLSELDKAGFIKRQLVETRQITKHVAQILDSRMNTKYDENDKLIREVKVITLKSKLVSDFRKDFQFYKVREINNYHHAHDAYLNAVVGTALIKKYPKLESEFVYGDYKVYDVRKMIAKSEQEIGKATAKYFFYSNIMNFFKTEITLANGEIRKRPLIETNGETGEIVWDKGRDFATVRKVLSMPQVNIVKKTEVQTGGFSKESILPKRNSDKLIARKKDWDPKKYGGFDSPTVAYSVLVVAKVEKGKSKKLKSVKELLGITIMERSSFEKNPIDFLEAKGYKEVKKDLIIKLPKYSLFELENGRKRMLASAGELQKGNELALPSKYVNFLYLASHYEKLKGSPEDNEQKQLFVEQHKHYLDEIIEQISEFSKRVILADANLDKVLSAYNKHRDKPIREQAENIIHLFTLTNLGAPAAFKYFDTTIDRKRYTSTKEVLDATLIHQSITGLYETRIDLSQLGGDGGGSSGSSGSSGSSGSSGSSGGMDPLQLLQPLEAEIKGTKLKAHWNSGATITCVPEAFLEDERPIQTMLIKTIHGEKQQDVYYLTFKVQGRKVEAEVLASPYDYILLNPSDVPWLMKKPLQLTVLVPLHEYQERLLQQTALPKEQKELLQKLFLKYDALWQHWENQVGHRRIKPHNIATGTLAPRPQKQYPINPKAKPSIQIVIDDLLKQGVLIQQNSTMNTPVYPVPKPDGKWRMVLDYREVNKTIPLIAAQNQHSAGILSSIYRGKYKTTLDLTNGFWAHPITPESYWLTAFTWQGKQYCWTRLPQGFLNSPALFNADVVDLLKEIPNVQAYVDDIYISHDDPQEHLEQLEKIFSILLNAGYVVSLKKSEIAQREVEFLGFNITKEGRGLTDTFKQKLLNITPPKDLKQLQSILGLLNFARNFIPNYSELVKPLYTIVAPANGKFISWTEDNSNQLQHIISVLNQADNLEERNPETRLIIKVNSSPSAGYIRYYNEGSKRPIMYVNYIFSKAEAKFTQTEKLLTTMHKGLIKAMDLAMGQEILVYSPIVSMTKIQRTPLPERKALPVRWITWMTYLEDPRIQFHYDKSLPELQQIPNVTEDVIAKTKHPSEFAMVFYTDGSAIKHPDVNKSHSAGMGIAQVQFIPEYKIVHQWSIPLGDHTAQLAEIAAVEFACKKALKISGPVLIVTDSFYVAESANKELPYWKSNGFLNNKKKPLRHVSKWKSIAECLQLKPDIIIMHEKGHQQPMTTLHTEGNNLADKLATQGSYVVHAGKRTADGSEFEKRTADGSEFESPKKKAKVE

SEQ ID NO: 6356 - protein, 2094 aa, synthetic construct
MPAAKRVKLDGGDKKYSIGLDIGTNSVGWAVITDEYKVPSKKFKVLGNTDRHSIKKNLIGALLFDSGETAEATRLKRTARRRYTRRKNRICYLQEIFSNEMAKVDDSFFHRLEESFLVEEDKKHERHPIFGNIVDEVAYHEKYPTIYHLRKKLVDSTDKADLRLIYLALAHMIKFRGHFLIEGDLNPDNSDVDKLFIQLVQTYNQLFEENPINASGVDAKAILSARLSKSRRLENLIAQLPGEKKNGLFGNLIALSLGLTPNFKSNFDLAEDAKLQLSKDTYDDDLDNLLAQIGDQYADLFLAAKNLSDAILLSDILRVNTEITKAPLSASMIKRYDEHHQDLTLLKALVRQQLPEKYKEIFFDQSKNGYAGYIDGGASQEEFYKFIKPILEKMDGTEELLVKLNREDLLRKQRTFDNGSIPHQIHLGELHAILRRQEDFYPFLKDNREKIEKILTFRIPYYVGPLARGNSRFAWMTRKSEETITPWNFEEVVDKGASAQSFIERMTNFDKNLPNEKVLPKHSLLYEYFTVYNELTKVKYVTEGMRKPAFLSGEQKKAIVDLLFKTNRKVTVKQLKEDYFKKIECFDSVEISGVEDRFNASLGTYHDLLKIIKDKDFLDNEENEDILEDIVLTLTLFEDREMIEERLKTYAHLFDDKVMKQLKRRRYTGWGRLSRKLINGIRDKQSGKTILDFLKSDGFANRNFMQLIHDDSLTFKEDIQKAQVSGQGDSLHEHIANLAGSPAIKKGILQTVKVVDELVKVMGRHKPENIVIEMARENQTTQKGQKNSRERMKRIEEGIKELGSQILKEHPVENTQLQNEKLYLYYLQNGRDMYVDQELDINRLSDYDVDHIVPQSFLKDDSIDNKVLTRSDKARGKSDNVPSEEVVKKMKNYWRQLLNAKLITQRKFDNLTKAERGGLSELDKAGFIKRQLVETRQITKHVAQILDSRMNTKYDENDKLIREVKVITLKSKLVSDFRKDFQFYKVREINNYHHAHDAYLNAVVGTALIKKYPKLESEFVYGDYKVYDVRKMIAKSEQEIGKATAKYFFYSNIMNFFKTEITLANGEIRKRPLIETNGETGEIVWDKGRDFATVRKVLSMPQVNIVKKTEVQTGGFSKESILPKRNSDKLIARKKDWDPKKYGGFDSPTVAYSVLVVAKVEKGKSKKLKSVKELLGITIMERSSFEKNPIDFLEAKGYKEVKKDLIIKLPKYSLFELENGRKRMLASAGELQKGNELALPSKYVNFLYLASHYEKLKGSPEDNEQKQLFVEQHKHYLDEIIEQISEFSKRVILADANLDKVLSAYNKHRDKPIREQAENIIHLFTLTNLGAPAAFKYFDTTIDRKRYTSTKEVLDATLIHQSITGLYETRIDLSQLGGDGGGSSGSSGSSGSSGSSGSSGGIPWLMKKPLQLTTLVPLQEYEERLLKQTMLTGSYKEKLQSLFLKYDALWQHWENQVGHRRIKPHHIATGTVNPRPQKQYPINPKAKASIQTVINDLLKQGVLIQQNSIMNTPVYPVPKPDGKWRMVLDYREVNKTIPLIAAQNQHSAGILSSIFRGKYKTTLDLSNGFWAHSITPESYWLTAFTWLGQQYCWTRLPQGFLNSPALFNADVVDLLKEVPNVQVYVDDIYISHDDPREHLEQLEKVFSLLLNAGYVVSLKKSEIAQHEVEFLGFNITKEGRGLTETFKQKLLNITPPRDLKQLQSILGKLNFARNFIPNFSELVKPLYNIIATAPGKYITWTTDNSQQLQNIISMLNSAENLEERNPEVRLIMKVNTSPSAGYIRFYNEFAKRPIMYLNYVYTKAEVKFTNTEKLLTTIHKGLIKALDLGMGQEILVYSPIVSMTKIQKTPLPERKALPIRWITWMSYLEDPRIQFHYDKTLPELQQVPTVTDDIIAKIKHPSEFSMVFYTDGSAIKHPNVNKSHNAGMGIAQVQFKPEFTVINTWSIPLGDHTAQLAEVAAVEFACKKALKIDGPVLIVTDSFYVAESVNKELPYWQSNGFFNNKKKPLKHVSKWKSIADCIQLKPDIIIIHEKGHQPTASTFHTEGNNLADKLATQGSYVVNAGKRTADGSEFEKRTADGSEFESPKKKAKVE

SEQ ID NO: 6357 - protein, 2183 aa, synthetic construct
MPAAKRVKLDGGDKKYSIGLDIGTNSVGWAVITDEYKVPSKKFKVLGNTDRHSIKKNLIGALLFDSGETAEATRLKRTARRRYTRRKNRICYLQEIFSNEMAKVDDSFFHRLEESFLVEEDKKHERHPIFGNIVDEVAYHEKYPTIYHLRKKLVDSTDKADLRLIYLALAHMIKFRGHFLIEGDLNPDNSDVDKLFIQLVQTYNQLFEENPINASGVDAKAILSARLSKSRRLENLIAQLPGEKKNGLFGNLIALSLGLTPNFKSNFDLAEDAKLQLSKDTYDDDLDNLLAQIGDQYADLFLAAKNLSDAILLSDILRVNTEITKAPLSASMIKRYDEHHQDLTLLKALVRQQLPEKYKEIFFDQSKNGYAGYIDGGASQEEFYKFIKPILEKMDGTEELLVKLNREDLLRKQRTFDNGSIPHQIHLGELHAILRRQEDFYPFLKDNREKIEKILTFRIPYYVGPLARGNSRFAWMTRKSEETITPWNFEEVVDKGASAQSFIERMTNFDKNLPNEKVLPKHSLLYEYFTVYNELTKVKYVTEGMRKPAFLSGEQKKAIVDLLFKTNRKVTVKQLKEDYFKKIECFDSVEISGVEDRFNASLGTYHDLLKIIKDKDFLDNEENEDILEDIVLTLTLFEDREMIEERLKTYAHLFDDKVMKQLKRRRYTGWGRLSRKLINGIRDKQSGKTILDFLKSDGFANRNFMQLIHDDSLTFKEDIQKAQVSGQGDSLHEHIANLAGSPAIKKGILQTVKVVDELVKVMGRHKPENIVIEMARENQTTQKGQKNSRERMKRIEEGIKELGSQILKEHPVENTQLQNEKLYLYYLQNGRDMYVDQELDINRLSDYDVDHIVPQSFLKDDSIDNKVLTRSDKARGKSDNVPSEEVVKKMKNYWRQLLNAKLITQRKFDNLTKAERGGLSELDKAGFIKRQLVETRQITKHVAQILDSRMNTKYDENDKLIREVKVITLKSKLVSDFRKDFQFYKVREINNYHHAHDAYLNAVVGTALIKKYPKLESEFVYGDYKVYDVRKMIAKSEQEIGKATAKYFFYSNIMNFFKTEITLANGEIRKRPLIETNGETGEIVWDKGRDFATVRKVLSMPQVNIVKKTEVQTGGFSKESILPKRNSDKLIARKKDWDPKKYGGFDSPTVAYSVLVVAKVEKGKSKKLKSVKELLGITIMERSSFEKNPIDFLEAKGYKEVKKDLIIKLPKYSLFELENGRKRMLASAGELQKGNELALPSKYVNFLYLASHYEKLKGSPEDNEQKQLFVEQHKHYLDEIIEQISEFSKRVILADANLDKVLSAYNKHRDKPIREQAENIIHLFTLTNLGAPAAFKYFDTTIDRKRYTSTKEVLDATLIHQSITGLYETRIDLSQLGGDGGGSSGSSGSSGSSGSSGSSGGMDPLQLLQPLEAEIKGTKLKAHWNSGATITCVPQAFLEEEVPIKNIWIKTIHGEKEQPVYYLTFKIQGRKVEAEVISSPYDYILVSPSDIPWLMKKPLQLTTLVPLQEYEERLLKQTMLTGSYKEKLQSLFLKYDALWQHWENQVGHRRIKPHHIATGTVNPRPQKQYPINPKAKASIQTVINDLLKQGVLIQQNSIMNTPVYPVPKPDGKWRMVLDYREVNKTIPLIAAQNQHSAGILSSIFRGKYKTTLDLSNGFWAHSITPESYWLTAFTWLGQQYCWTRLPQGFLNSPALFNADVVDLLKEVPNVQVYVDDIYISHDDPREHLEQLEKVFSLLLNAGYVVSLKKSEIAQHEVEFLGFNITKEGRGLTETFKQKLLNITPPRDLKQLQSILGLLNFARNFIPNFSELVKPLYNIIATAPGKYITWTTDNSQQLQNIISMLNSAENLEERNPEVRLIMKVNTSPSAGYIRFYNEFAKRPIMYLNYVYTKAEVKFTNTEKLLTTIHKGLIKALDLGMGQEILVYSPIVSMTKIQKTPLPERKALPIRWITWMSYLEDPRIQFHYDKTLPELQQVPTVTDDIIAKIKHPSEFSMVFYTDGSAIKHPNVNKSHNAGMGIAQVQFKPEFTVINTWSIPLGDHTAQLAEVAAVEFACKKALKIDGPVLIVTDSFYVAESVNKELPYWQSNGFFNNKKKPLKHVSKWKSIADCIQLKPDIIIIHEKGHQPTASTFHTEGNNLADKLATQGSYVVNAGKRTADGSEFEKRTADGSEFESPKKKAKVE

SEQ ID NO: 6358 - protein, 2101 aa, synthetic construct
MPAAKRVKLDGGDKKYSIGLDIGTNSVGWAVITDEYKVPSKKFKVLGNTDRHSIKKNLIGALLFDSGETAEATRLKRTARRRYTRRKNRICYLQEIFSNEMAKVDDSFFHRLEESFLVEEDKKHERHPIFGNIVDEVAYHEKYPTIYHLRKKLVDSTDKADLRLIYLALAHMIKFRGHFLIEGDLNPDNSDVDKLFIQLVQTYNQLFEENPINASGVDAKAILSARLSKSRRLENLIAQLPGEKKNGLFGNLIALSLGLTPNFKSNFDLAEDAKLQLSKDTYDDDLDNLLAQIGDQYADLFLAAKNLSDAILLSDILRVNTEITKAPLSASMIKRYDEHHQDLTLLKALVRQQLPEKYKEIFFDQSKNGYAGYIDGGASQEEFYKFIKPILEKMDGTEELLVKLNREDLLRKQRTFDNGSIPHQIHLGELHAILRRQEDFYPFLKDNREKIEKILTFRIPYYVGPLARGNSRFAWMTRKSEETITPWNFEEVVDKGASAQSFIERMTNFDKNLPNEKVLPKHSLLYEYFTVYNELTKVKYVTEGMRKPAFLSGEQKKAIVDLLFKTNRKVTVKQLKEDYFKKIECFDSVEISGVEDRFNASLGTYHDLLKIIKDKDFLDNEENEDILEDIVLTLTLFEDREMIEERLKTYAHLFDDKVMKQLKRRRYTGWGRLSRKLINGIRDKQSGKTILDFLKSDGFANRNFMQLIHDDSLTFKEDIQKAQVSGQGDSLHEHIANLAGSPAIKKGILQTVKVVDELVKVMGRHKPENIVIEMARENQTTQKGQKNSRERMKRIEEGIKELGSQILKEHPVENTQLQNEKLYLYYLQNGRDMYVDQELDINRLSDYDVDHIVPQSFLKDDSIDNKVLTRSDKARGKSDNVPSEEVVKKMKNYWRQLLNAKLITQRKFDNLTKAERGGLSELDKAGFIKRQLVETRQITKHVAQILDSRMNTKYDENDKLIREVKVITLKSKLVSDFRKDFQFYKVREINNYHHAHDAYLNAVVGTALIKKYPKLESEFVYGDYKVYDVRKMIAKSEQEIGKATAKYFFYSNIMNFFKTEITLANGEIRKRPLIETNGETGEIVWDKGRDFATVRKVLSMPQVNIVKKTEVQTGGFSKESILPKRNSDKLIARKKDWDPKKYGGFDSPTVAYSVLVVAKVEKGKSKKLKSVKELLGITIMERSSFEKNPIDFLEAKGYKEVKKDLIIKLPKYSLFELENGRKRMLASAGELQKGNELALPSKYVNFLYLASHYEKLKGSPEDNEQKQLFVEQHKHYLDEIIEQISEFSKRVILADANLDKVLSAYNKHRDKPIREQAENIIHLFTLTNLGAPAAFKYFDTTIDRKRYTSTKEVLDATLIHQSITGLYETRIDLSQLGGDGGGSSGSSGSSGSSGSSGSSGGVLNLEEEYRLHEKPVPSSIDPSWLQLFPTVWAERAGMGLANQVPPVVVELRSGASPVAVRQYPMSKEAREGIRPHIQRFLDLGVLVPCQSPWNTPLLPVKKPGTNDYRPVQDLREINKRVQDIHPTVPNPYNLLSSLPPSHTWYSVLDLKDAFFCLKLHPNSQPLFAFEWRDPEKGNTGQLTWTRLPQGFKNSPTLFDEALHRDLAPFRALNPQVVLLQYVDDLLVAAPTYRDCKEGTQKLLQELSKLGYRVSAKKAQLCQKEVTYLGYLLKEGKRWLTPARKATVMKIPPPTTPRQVREFLGTAGFCRLWIPGFASLAAPLYPLTKESIPFIWTEEHQKAFDRIKEALLSAPALALPDLTKPFTLYVDERAGVARGVLTQTLGPWRRPVAYLSKKLDPVASGWPTCLKAVAAVALLLKDADKLTLGQNVTVIASHSLESIVRQPPDRWMTNARMTHYQSLLLNERVSFAPPAVLNPATLLPVESEATPVHRCSEILAEETGTRRDLKDQPLPGVPAWYTDGSSFIAEGKRRAGAAIVDGKRTVWASSLPEGTSAQKAELVALTQALRLAEGKDINIYTDSRYAFATAHIHGAIYKQRGLLTSAGKDIKNKEEILALLEAIHLPKRVAIIHCPGHQKGNDPVATGNRRADEAAKQAALSTRVLAETTKPAGKRTADGSEFEKRTADGSEFESPKKKAKVE

SEQ ID NO: 6359 - protein, 2103 aa, synthetic construct
MPAAKRVKLDGGDKKYSIGLDIGTNSVGWAVITDEYKVPSKKFKVLGNTDRHSIKKNLIGALLFDSGETAEATRLKRTARRRYTRRKNRICYLQEIFSNEMAKVDDSFFHRLEESFLVEEDKKHERHPIFGNIVDEVAYHEKYPTIYHLRKKLVDSTDKADLRLIYLALAHMIKFRGHFLIEGDLNPDNSDVDKLFIQLVQTYNQLFEENPINASGVDAKAILSARLSKSRRLENLIAQLPGEKKNGLFGNLIALSLGLTPNFKSNFDLAEDAKLQLSKDTYDDDLDNLLAQIGDQYADLFLAAKNLSDAILLSDILRVNTEITKAPLSASMIKRYDEHHQDLTLLKALVRQQLPEKYKEIFFDQSKNGYAGYIDGGASQEEFYKFIKPILEKMDGTEELLVKLNREDLLRKQRTFDNGSIPHQIHLGELHAILRRQEDFYPFLKDNREKIEKILTFRIPYYVGPLARGNSRFAWMTRKSEETITPWNFEEVVDKGASAQSFIERMTNFDKNLPNEKVLPKHSLLYEYFTVYNELTKVKYVTEGMRKPAFLSGEQKKAIVDLLFKTNRKVTVKQLKEDYFKKIECFDSVEISGVEDRFNASLGTYHDLLKIIKDKDFLDNEENEDILEDIVLTLTLFEDREMIEERLKTYAHLFDDKVMKQLKRRRYTGWGRLSRKLINGIRDKQSGKTILDFLKSDGFANRNFMQLIHDDSLTFKEDIQKAQVSGQGDSLHEHIANLAGSPAIKKGILQTVKVVDELVKVMGRHKPENIVIEMARENQTTQKGQKNSRERMKRIEEGIKELGSQILKEHPVENTQLQNEKLYLYYLQNGRDMYVDQELDINRLSDYDVDHIVPQSFLKDDSIDNKVLTRSDKARGKSDNVPSEEVVKKMKNYWRQLLNAKLITQRKFDNLTKAERGGLSELDKAGFIKRQLVETRQITKHVAQILDSRMNTKYDENDKLIREVKVITLKSKLVSDFRKDFQFYKVREINNYHHAHDAYLNAVVGTALIKKYPKLESEFVYGDYKVYDVRKMIAKSEQEIGKATAKYFFYSNIMNFFKTEITLANGEIRKRPLIETNGETGEIVWDKGRDFATVRKVLSMPQVNIVKKTEVQTGGFSKESILPKRNSDKLIARKKDWDPKKYGGFDSPTVAYSVLVVAKVEKGKSKKLKSVKELLGITIMERSSFEKNPIDFLEAKGYKEVKKDLIIKLPKYSLFELENGRKRMLASAGELQKGNELALPSKYVNFLYLASHYEKLKGSPEDNEQKQLFVEQHKHYLDEIIEQISEFSKRVILADANLDKVLSAYNKHRDKPIREQAENIIHLFTLTNLGAPAAFKYFDTTIDRKRYTSTKEVLDATLIHQSITGLYETRIDLSQLGGDGGGSSGSSGSSGSSGSSGSSGGTLNIEDEYRLHETSKEPDVPLGSTWLSDFPQAWAETGGMGLAVRQAPLIIPLKATSTPVSIKQYPMSQEARLGIKPHIQRLLDQGILVPCQSPWNTPLLPVKKPGTNDYRPVQDLREVNKRVEDIHPTVPNPYNLLSGLPPSHQWYTVLDLKDAFFCLRLHPTSQPLFAFEWRDPEMGISGQLTWTRLPQGFKNSPTLFNEALHRDLADFRIQHPDLILLQYVDDLLLAATSEQDCQRGTRALLQTLGNLGYRASAKKAQICQKQVKYLGYLLKEGQRWLTEARKETVMGQPTPKTPRQLREFLGTAGFCRLWIPGFAEMAAPLYPLTKPGTLFNWGPDQQKAYQEIKQALLTAPALGLPDLTKPFELFVDEKQGYAKGVLTQKLGPWRRPVAYLSKKLDPVAAGWPPCLRMVAAIAVLTKDAGKLTMGQPLVILAPHAVEALVKQPPDRWLSNARMTHYQAMLLDTDRVQFGPVVALNPATLLPLPEKEAPHDCLEILAETHGTRPDLTDQPIPDADYTWYTDGSSFLQEGQRRAGAAVTTETEVIWARALPAGTSAQRAELIALTQALKMAEGKKLNVYTDSRYAFATAHVHGEIYRRRGWLTSEGREIKNKNEILALLKALFLPKRLSIIHCPGHQKGNSAEARGNRMADQAAREAAMKAVLETSTLLAGKRTADGSEFEKRTADGSEFESPKKKAKVE

SEQ ID NO: 6360 - protein, 2096 aa, synthetic construct
MPAAKRVKLDGGDKKYSIGLDIGTNSVGWAVITDEYKVPSKKFKVLGNTDRHSIKKNLIGALLFDSGETAEATRLKRTARRRYTRRKNRICYLQEIFSNEMAKVDDSFFHRLEESFLVEEDKKHERHPIFGNIVDEVAYHEKYPTIYHLRKKLVDSTDKADLRLIYLALAHMIKFRGHFLIEGDLNPDNSDVDKLFIQLVQTYNQLFEENPINASGVDAKAILSARLSKSRRLENLIAQLPGEKKNGLFGNLIALSLGLTPNFKSNFDLAEDAKLQLSKDTYDDDLDNLLAQIGDQYADLFLAAKNLSDAILLSDILRVNTEITKAPLSASMIKRYDEHHQDLTLLKALVRQQLPEKYKEIFFDQSKNGYAGYIDGGASQEEFYKFIKPILEKMDGTEELLVKLNREDLLRKQRTFDNGSIPHQIHLGELHAILRRQEDFYPFLKDNREKIEKILTFRIPYYVGPLARGNSRFAWMTRKSEETITPWNFEEVVDKGASAQSFIERMTNFDKNLPNEKVLPKHSLLYEYFTVYNELTKVKYVTEGMRKPAFLSGEQKKAIVDLLFKTNRKVTVKQLKEDYFKKIECFDSVEISGVEDRFNASLGTYHDLLKIIKDKDFLDNEENEDILEDIVLTLTLFEDREMIEERLKTYAHLFDDKVMKQLKRRRYTGWGRLSRKLINGIRDKQSGKTILDFLKSDGFANRNFMQLIHDDSLTFKEDIQKAQVSGQGDSLHEHIANLAGSPAIKKGILQTVKVVDELVKVMGRHKPENIVIEMARENQTTQKGQKNSRERMKRIEEGIKELGSQILKEHPVENTQLQNEKLYLYYLQNGRDMYVDQELDINRLSDYDVDHIVPQSFLKDDSIDNKVLTRSDKARGKSDNVPSEEVVKKMKNYWRQLLNAKLITQRKFDNLTKAERGGLSELDKAGFIKRQLVETRQITKHVAQILDSRMNTKYDENDKLIREVKVITLKSKLVSDFRKDFQFYKVREINNYHHAHDAYLNAVVGTALIKKYPKLESEFVYGDYKVYDVRKMIAKSEQEIGKATAKYFFYSNIMNFFKTEITLANGEIRKRPLIETNGETGEIVWDKGRDFATVRKVLSMPQVNIVKKTEVQTGGFSKESILPKRNSDKLIARKKDWDPKKYGGFDSPTVAYSVLVVAKVEKGKSKKLKSVKELLGITIMERSSFEKNPIDFLEAKGYKEVKKDLIIKLPKYSLFELENGRKRMLASAGELQKGNELALPSKYVNFLYLASHYEKLKGSPEDNEQKQLFVEQHKHYLDEIIEQISEFSKRVILADANLDKVLSAYNKHRDKPIREQAENIIHLFTLTNLGAPAAFKYFDTTIDRKRYTSTKEVLDATLIHQSITGLYETRIDLSQLGGDGGEAAAKGGTVSLQDEHRLFDIPVTTSLPDVWLQDFPQAWAETGGLGRAKCQAPIIIDLKPTAVPVSIKQYPMSLEAHMGIRQHIIKFLELGVLRPCRSPWNTPLLPVKKPGTQDYRPVQDLREINKRTVDIHPTVPNPYNLLSTLKPDYSWYTVLDLKDAFFCLPLAPQSQELFAFEWKDPERGISGQLTWTRLPQGFKNSPTLFNEALHRDLTDFRTQHPEVTLLQYVDDLLLAAPTKKACTQGTRHLLQELGEKGYRASAKKAQICQTKVTYLGYILSEGKRWLTPGRIETVARIPPPRNPREVREFLGTAGFCRLWIPGFAELAAPLYALTKPSTPFTWQTEHQLAFEALKKALLSAPALGLPDTSKPFTLFLDERQGIAKGVLTQKLGPWKRPVAYLSKKLDPVAAGWPPCLRIMAATAMLVKDSAKLTLGQPLTVITPHTLEAIVRQPPDRWITNARLTHYQALLLDTDRVQFGPPVTLNPATLLPVPENQPSPHDCRQVLAETHGTREDLKDQELPDADHTWYTDGSSYLDSGTRRAGAAVVDGHNTIWAQSLPPGTSAQKAELIALTKALELSKGKKANIYTDSRYAFATAHTHGSIYERRGWLTSEGKEIKNKAEIIALLKALFLPQEVAIIHCPGHQKGQDPVAVGNRQADRVARQAAMAEVLTLATEPDNTSHITAGKRTADGSEFEKRTADGSEFESPKKKAKVE

SEQ ID NO: 6361 - protein, 2167 aa, synthetic construct
MPAAKRVKLDGGDKKYSIGLDIGTNSVGWAVITDEYKVPSKKFKVLGNTDRHSIKKNLIGALLFDSGETAEATRLKRTARRRYTRRKNRICYLQEIFSNEMAKVDDSFFHRLEESFLVEEDKKHERHPIFGNIVDEVAYHEKYPTIYHLRKKLVDSTDKADLRLIYLALAHMIKFRGHFLIEGDLNPDNSDVDKLFIQLVQTYNQLFEENPINASGVDAKAILSARLSKSRRLENLIAQLPGEKKNGLFGNLIALSLGLTPNFKSNFDLAEDAKLQLSKDTYDDDLDNLLAQIGDQYADLFLAAKNLSDAILLSDILRVNTEITKAPLSASMIKRYDEHHQDLTLLKALVRQQLPEKYKEIFFDQSKNGYAGYIDGGASQEEFYKFIKPILEKMDGTEELLVKLNREDLLRKQRTFDNGSIPHQIHLGELHAILRRQEDFYPFLKDNREKIEKILTFRIPYYVGPLARGNSRFAWMTRKSEETITPWNFEEVVDKGASAQSFIERMTNFDKNLPNEKVLPKHSLLYEYFTVYNELTKVKYVTEGMRKPAFLSGEQKKAIVDLLFKTNRKVTVKQLKEDYFKKIECFDSVEISGVEDRFNASLGTYHDLLKIIKDKDFLDNEENEDILEDIVLTLTLFEDREMIEERLKTYAHLFDDKVMKQLKRRRYTGWGRLSRKLINGIRDKQSGKTILDFLKSDGFANRNFMQLIHDDSLTFKEDIQKAQVSGQGDSLHEHIANLAGSPAIKKGILQTVKVVDELVKVMGRHKPENIVIEMARENQTTQKGQKNSRERMKRIEEGIKELGSQILKEHPVENTQLQNEKLYLYYLQNGRDMYVDQELDINRLSDYDVDHIVPQSFLKDDSIDNKVLTRSDKARGKSDNVPSEEVVKKMKNYWRQLLNAKLITQRKFDNLTKAERGGLSELDKAGFIKRQLVETRQITKHVAQILDSRMNTKYDENDKLIREVKVITLKSKLVSDFRKDFQFYKVREINNYHHAHDAYLNAVVGTALIKKYPKLESEFVYGDYKVYDVRKMIAKSEQEIGKATAKYFFYSNIMNFFKTEITLANGEIRKRPLIETNGETGEIVWDKGRDFATVRKVLSMPQVNIVKKTEVQTGGFSKESILPKRNSDKLIARKKDWDPKKYGGFDSPTVAYSVLVVAKVEKGKSKKLKSVKELLGITIMERSSFEKNPIDFLEAKGYKEVKKDLIIKLPKYSLFELENGRKRMLASAGELQKGNELALPSKYVNFLYLASHYEKLKGSPEDNEQKQLFVEQHKHYLDEIIEQISEFSKRVILADANLDKVLSAYNKHRDKPIREQAENIIHLFTLTNLGAPAAFKYFDTTIDRKRYTSTKEVLDATLIHQSITGLYETRIDLSQLGGDGGEAAAKGGMDLLKPLTVERKGVKIKGYWNSQADITCVPKDLLQGEEPVRQQNVTTIHGTQEGDVYYVNLKIDGRRINTEVIGTTLDYAIITPGDVPWILKKPLELTIKLDLEEQQGTLLNNSILSKKGKEELKQLFEKYSALWQSWENQVGHRRIRPHKIATGTVKPTPQKQYHINPKAKPDIQIVINDLLKQGVLIQKESTMNTPVYPVPKPNGRWRMVLDYRAVNKVTPLIAVQNQHSYGILGSLFKGRYKTTIDLSNGFWAHPIVPEDYWITAFTWQGKQYCWTVLPQGFLNSPGLFNGDVVDLLQGIPNVEVYVDDVYISHDSEKEHLEYLDILFNRLKEAGYIISLKKSNIANSIVDFLGFQITNEGRGLTDTFKEKLENITAPTTLKQLQSILGLLNFARNFIPDFTELIAPLYALIPKSPKNYVPWQIEHSTTLETLITKLNGAEYLQGRKGDKTLIMKVNASYTTGYIRYYNEGEKKPISYVSIVFSKTELKFTELEKLLTTVHKGLLKALDLSMGQNIHVYSPIVSMQNIQKTPQTAKKALASRWLSWLSYLEDPRIRFFYDPQMPALKDLPAVDTGKDNKKHPSNFQHIFYTDGSAITSPTKEGHLNAGMGIVYFINKDGNLQKQQEWSISLGNHTAQFAEIAAFEFALKKCLPLGGNILVVTDSNYVAKAYNEELDVWASNGFVNNRKKPLKHISKWKSVADLKRLRPDVVVTHEPGHQKLDSSPHAYGNNLADQLATQASFKVHAGKRTADGSEFEKRTADGSEFESPKKKAKVE

SEQ ID NO: 6362 - protein, 2121 aa, synthetic construct
MPAAKRVKLDGGDKKYSIGLDIGTNSVGWAVITDEYKVPSKKFKVLGNTDRHSIKKNLIGALLFDSGETAEATRLKRTARRRYTRRKNRICYLQEIFSNEMAKVDDSFFHRLEESFLVEEDKKHERHPIFGNIVDEVAYHEKYPTIYHLRKKLVDSTDKADLRLIYLALAHMIKFRGHFLIEGDLNPDNSDVDKLFIQLVQTYNQLFEENPINASGVDAKAILSARLSKSRRLENLIAQLPGEKKNGLFGNLIALSLGLTPNFKSNFDLAEDAKLQLSKDTYDDDLDNLLAQIGDQYADLFLAAKNLSDAILLSDILRVNTEITKAPLSASMIKRYDEHHQDLTLLKALVRQQLPEKYKEIFFDQSKNGYAGYIDGGASQEEFYKFIKPILEKMDGTEELLVKLNREDLLRKQRTFDNGSIPHQIHLGELHAILRRQEDFYPFLKDNREKIEKILTFRIPYYVGPLARGNSRFAWMTRKSEETITPWNFEEVVDKGASAQSFIERMTNFDKNLPNEKVLPKHSLLYEYFTVYNELTKVKYVTEGMRKPAFLSGEQKKAIVDLLFKTNRKVTVKQLKEDYFKKIECFDSVEISGVEDRFNASLGTYHDLLKIIKDKDFLDNEENEDILEDIVLTLTLFEDREMIEERLKTYAHLFDDKVMKQLKRRRYTGWGRLSRKLINGIRDKQSGKTILDFLKSDGFANRNFMQLIHDDSLTFKEDIQKAQVSGQGDSLHEHIANLAGSPAIKKGILQTVKVVDELVKVMGRHKPENIVIEMARENQTTQKGQKNSRERMKRIEEGIKELGSQILKEHPVENTQLQNEKLYLYYLQNGRDMYVDQELDINRLSDYDVDHIVPQSFLKDDSIDNKVLTRSDKARGKSDNVPSEEVVKKMKNYWRQLLNAKLITQRKFDNLTKAERGGLSELDKAGFIKRQLVETRQITKHVAQILDSRMNTKYDENDKLIREVKVITLKSKLVSDFRKDFQFYKVREINNYHHAHDAYLNAVVGTALIKKYPKLESEFVYGDYKVYDVRKMIAKSEQEIGKATAKYFFYSNIMNFFKTEITLANGEIRKRPLIETNGETGEIVWDKGRDFATVRKVLSMPQVNIVKKTEVQTGGFSKESILPKRNSDKLIARKKDWDPKKYGGFDSPTVAYSVLVVAKVEKGKSKKLKSVKELLGITIMERSSFEKNPIDFLEAKGYKEVKKDLIIKLPKYSLFELENGRKRMLASAGELQKGNELALPSKYVNFLYLASHYEKLKGSPEDNEQKQLFVEQHKHYLDEIIEQISEFSKRVILADANLDKVLSAYNKHRDKPIREQAENIIHLFTLTNLGAPAAFKYFDTTIDRKRYTSTKEVLDATLIHQSITGLYETRIDLSQLGGDGGEAAAKGGLLGRDLLTKLKAQIQFSTEGPQVTWEDRPAMCLVLNLEEEYRLHEKPVPPSIDPSWLQLFPMVWAEKAGMGLANQVPPVVVELKSDASPVAVRQYPMSKEAREGIRPHIQRFLDLGILVPCQSPWNTPLLPVKKPGTNDYRPVQDLREVNKRVQDIHPTVPNPYNLLSSLPPSHTWYSVLDLKDAFFCLKLHPNSQPLFAFEWRDPEKGNTGQLTWTRLPQGFKNSPTLFNEALHRDLASFRALNPQVVMLQYVDDLLVAAPTYRDCKEGTRRLLQELSKLGYRVSAKKAQLCREEVTYLGYLLKGGKRWLTPARKATVMKIPTPTTPRQVREFLGTAGFCRLWIPGFASLAAPLYPLTRPKVPFTWTEAHQEAFGRIKEALLSAPALALPDLTKPFALYVDEKEGVARGVLTQTLGPWRRPVAYLSKKLDPVASGWPTCLKAIAAVALLLKDADKLTLGQNVLVIAPHNLESIVRQPPDRWMTNARMTHYQSLLLNERVSFAPPAILNPATLLPVESDDTPIHICSEILAEETGTRPDLRDQPLPGVPAWYTDGSSFIMDGRRQAGAAIVDNKRTVWASNLPEGTSAQKAELIALTQALRLAEGKSINIYTDSRYAFATAHVHGAIYKQRGWLTSAGKDIKNKEEILALLEAIHLPKRVAIIHCPGHQRGTDPVATGNRKADEAAKQAAQSTRILTETTKNAGKRTADGSEFEKRTADGSEFESPKKKAKVE

SEQ ID NO: 6363 - protein, 2212 aa, synthetic construct
MPAAKRVKLDGGDKKYSIGLDIGTNSVGWAVITDEYKVPSKKFKVLGNTDRHSIKKNLIGALLFDSGETAEATRLKRTARRRYTRRKNRICYLQEIFSNEMAKVDDSFFHRLEESFLVEEDKKHERHPIFGNIVDEVAYHEKYPTIYHLRKKLVDSTDKADLRLIYLALAHMIKFRGHFLIEGDLNPDNSDVDKLFIQLVQTYNQLFEENPINASGVDAKAILSARLSKSRRLENLIAQLPGEKKNGLFGNLIALSLGLTPNFKSNFDLAEDAKLQLSKDTYDDDLDNLLAQIGDQYADLFLAAKNLSDAILLSDILRVNTEITKAPLSASMIKRYDEHHQDLTLLKALVRQQLPEKYKEIFFDQSKNGYAGYIDGGASQEEFYKFIKPILEKMDGTEELLVKLNREDLLRKQRTFDNGSIPHQIHLGELHAILRRQEDFYPFLKDNREKIEKILTFRIPYYVGPLARGNSRFAWMTRKSEETITPWNFEEVVDKGASAQSFIERMTNFDKNLPNEKVLPKHSLLYEYFTVYNELTKVKYVTEGMRKPAFLSGEQKKAIVDLLFKTNRKVTVKQLKEDYFKKIECFDSVEISGVEDRFNASLGTYHDLLKIIKDKDFLDNEENEDILEDIVLTLTLFEDREMIEERLKTYAHLFDDKVMKQLKRRRYTGWGRLSRKLINGIRDKQSGKTILDFLKSDGFANRNFMQLIHDDSLTFKEDIQKAQVSGQGDSLHEHIANLAGSPAIKKGILQTVKVVDELVKVMGRHKPENIVIEMARENQTTQKGQKNSRERMKRIEEGIKELGSQILKEHPVENTQLQNEKLYLYYLQNGRDMYVDQELDINRLSDYDVDHIVPQSFLKDDSIDNKVLTRSDKARGKSDNVPSEEVVKKMKNYWRQLLNAKLITQRKFDNLTKAERGGLSELDKAGFIKRQLVETRQITKHVAQILDSRMNTKYDENDKLIREVKVITLKSKLVSDFRKDFQFYKVREINNYHHAHDAYLNAVVGTALIKKYPKLESEFVYGDYKVYDVRKMIAKSEQEIGKATAKYFFYSNIMNFFKTEITLANGEIRKRPLIETNGETGEIVWDKGRDFATVRKVLSMPQVNIVKKTEVQTGGFSKESILPKRNSDKLIARKKDWDPKKYGGFDSPTVAYSVLVVAKVEKGKSKKLKSVKELLGITIMERSSFEKNPIDFLEAKGYKEVKKDLIIKLPKYSLFELENGRKRMLASAGELQKGNELALPSKYVNFLYLASHYEKLKGSPEDNEQKQLFVEQHKHYLDEIIEQISEFSKRVILADANLDKVLSAYNKHRDKPIREQAENIIHLFTLTNLGAPAAFKYFDTTIDRKRYTSTKEVLDATLIHQSITGLYETRIDLSQLGGDGGEAAAKGGTLGDQGSRGSDPLPEPRVTLTVEGIPTEFLVNTGAEHSVLTKPMGKMGSKRTVVAGATGSKVYPWTTKRLLKIGQKQVTHSFLVIPECPAPLLGRDLLTKLKAQIQFSTEGPQVTWEDRPAMCLVLNLEEEYRLHEKPVPPSIDPSWLQLFPMVWAEKAGMGLANQVPPVVVELKSDASPVAVRQYPMSKEAREGIRPHIQRFLDLGILVPCQSPWNTPLLPVKKPGTNDYRPVQDLREVNKRVQDIHPTVPNPYNLLSSLPPSHTWYSVLDLKDAFFCLKLHPNSQPLFAFEWRDPEKGNTGQLTWTRLPQGFKNSPTLFNEALHRDLASFRALNPQVVMLQYVDDLLVAAPTYRDCKEGTRRLLQELSKLGYRVSAKKAQLCREEVTYLGYLLKGGKRWLTPARKATVMKIPTPTTPRQVREFLGTAGFCRLWIPGFASLAAPLYPLTRPKVPFTWTEAHQEAFGRIKEALLSAPALALPDLTKPFALYVDEKEGVARGVLTQTLGPWRRPVAYLSKKLDPVASGWPTCLKAIAAVALLLKDADKLTLGQNVLVIAPHNLESIVRQPPDRWMTNARMTHYQSLLLNERVSFAPPAILNPATLLPVESDDTPIHICSEILAEETGTRPDLRDQPLPGVPAWYTDGSSFIMDGRRQAGAAIVDNKRTVWASNLPEGTSAQKAELIALTQALRLAEGKSINIYTDSRYAFATAHVHGAIYKQRGWLTSAGKDIKNKEEILALLEAIHLPKRVAIIHCPGHQRGTDPVATGNRKADEAAKQAAQSTRILTETTKNAGKRTADGSEFEKRTADGSEFESPKKKAKVE

SEQ ID NO: 6364 - protein, 2212 aa, synthetic construct
MPAAKRVKLDGGDKKYSIGLDIGTNSVGWAVITDEYKVPSKKFKVLGNTDRHSIKKNLIGALLFDSGETAEATRLKRTARRRYTRRKNRICYLQEIFSNEMAKVDDSFFHRLEESFLVEEDKKHERHPIFGNIVDEVAYHEKYPTIYHLRKKLVDSTDKADLRLIYLALAHMIKFRGHFLIEGDLNPDNSDVDKLFIQLVQTYNQLFEENPINASGVDAKAILSARLSKSRRLENLIAQLPGEKKNGLFGNLIALSLGLTPNFKSNFDLAEDAKLQLSKDTYDDDLDNLLAQIGDQYADLFLAAKNLSDAILLSDILRVNTEITKAPLSASMIKRYDEHHQDLTLLKALVRQQLPEKYKEIFFDQSKNGYAGYIDGGASQEEFYKFIKPILEKMDGTEELLVKLNREDLLRKQRTFDNGSIPHQIHLGELHAILRRQEDFYPFLKDNREKIEKILTFRIPYYVGPLARGNSRFAWMTRKSEETITPWNFEEVVDKGASAQSFIERMTNFDKNLPNEKVLPKHSLLYEYFTVYNELTKVKYVTEGMRKPAFLSGEQKKAIVDLLFKTNRKVTVKQLKEDYFKKIECFDSVEISGVEDRFNASLGTYHDLLKIIKDKDFLDNEENEDILEDIVLTLTLFEDREMIEERLKTYAHLFDDKVMKQLKRRRYTGWGRLSRKLINGIRDKQSGKTILDFLKSDGFANRNFMQLIHDDSLTFKEDIQKAQVSGQGDSLHEHIANLAGSPAIKKGILQTVKVVDELVKVMGRHKPENIVIEMARENQTTQKGQKNSRERMKRIEEGIKELGSQILKEHPVENTQLQNEKLYLYYLQNGRDMYVDQELDINRLSDYDVDHIVPQSFLKDDSIDNKVLTRSDKARGKSDNVPSEEVVKKMKNYWRQLLNAKLITQRKFDNLTKAERGGLSELDKAGFIKRQLVETRQITKHVAQILDSRMNTKYDENDKLIREVKVITLKSKLVSDFRKDFQFYKVREINNYHHAHDAYLNAVVGTALIKKYPKLESEFVYGDYKVYDVRKMIAKSEQEIGKATAKYFFYSNIMNFFKTEITLANGEIRKRPLIETNGETGEIVWDKGRDFATVRKVLSMPQVNIVKKTEVQTGGFSKESILPKRNSDKLIARKKDWDPKKYGGFDSPTVAYSVLVVAKVEKGKSKKLKSVKELLGITIMERSSFEKNPIDFLEAKGYKEVKKDLIIKLPKYSLFELENGRKRMLASAGELQKGNELALPSKYVNFLYLASHYEKLKGSPEDNEQKQLFVEQHKHYLDEIIEQISEFSKRVILADANLDKVLSAYNKHRDKPIREQAENIIHLFTLTNLGAPAAFKYFDTTIDRKRYTSTKEVLDATLIHQSITGLYETRIDLSQLGGDGGEAAAKGGTLGDQGSRGSDPLPEPRVTLTVEGIPTEFLVNTGAEHSVLTKPMGKMGSKRTVVAGATGSKVYPWTTKRLLKIGQKQVTHSFLVIPECPAPLLGRDLLTKLKAQIQFSTEGPQVTWEDRPAMCLVLNLEEEYRLHEKPVPPSIDPSWLQLFPMVWAEKAGMGLANQVPPVVVELKSDASPVAVRQYPMSKEAREGIRPHIQRFLDLGILVPCQSPWNTPLLPVKKPGTNDYRPVQDLREVNKRVQDIHPTVPNPYNLLSSLPPSHTWYSVLDLKDAFFCLKLHPNSQPLFAFEWRDPEKGNTGQLTWTRLPQGFKNSPTLFNEALHRDLASFRALNPQVVMLQYVDDLLVAAPTYRDCKEGTRRLLQELSKLGYRVSAKKAQLCREEVTYLGYLLKGGKRWLTPARKATVMKIPTPTTPRQVREFLGKAGFCRLFIPGFASLAAPLYPLTRPKVPFTWTEAHQEAFGRIKEALLSAPALALPDLTKPFALYVDEKEGVARGVLTQTLGPWRRPVAYLSKKLDPVASGWPTCLKAIAAVALLLKDADKLTLGQNVLVIAPHNLESIVRQPPDRWMTNARMTHYQSLLLNERVSFAPPAILNPATLLPVESDDTPIHICSEILAEETGTRPDLRDQPLPGVPAWYTDGSSFIMDGRRQAGAAIVDNKRTVWASNLPEGTSAQKAELIALTQALRLAEGKSINIYTDSRYAFATAHVHGAIYKQRGWLTSAGKDIKNKEEILALLEAIHLPKRVAIIHCPGHQRGTDPVATGNRKADEAAKQAAQSTRILTETTKNAGKRTADGSEFEKRTADGSEFESPKKKAKVE

SEQ ID NO: 6365 - protein, 2090 aa, synthetic construct
MPAAKRVKLDGGDKKYSIGLDIGTNSVGWAVITDEYKVPSKKFKVLGNTDRHSIKKNLIGALLFDSGETAEATRLKRTARRRYTRRKNRICYLQEIFSNEMAKVDDSFFHRLEESFLVEEDKKHERHPIFGNIVDEVAYHEKYPTIYHLRKKLVDSTDKADLRLIYLALAHMIKFRGHFLIEGDLNPDNSDVDKLFIQLVQTYNQLFEENPINASGVDAKAILSARLSKSRRLENLIAQLPGEKKNGLFGNLIALSLGLTPNFKSNFDLAEDAKLQLSKDTYDDDLDNLLAQIGDQYADLFLAAKNLSDAILLSDILRVNTEITKAPLSASMIKRYDEHHQDLTLLKALVRQQLPEKYKEIFFDQSKNGYAGYIDGGASQEEFYKFIKPILEKMDGTEELLVKLNREDLLRKQRTFDNGSIPHQIHLGELHAILRRQEDFYPFLKDNREKIEKILTFRIPYYVGPLARGNSRFAWMTRKSEETITPWNFEEVVDKGASAQSFIERMTNFDKNLPNEKVLPKHSLLYEYFTVYNELTKVKYVTEGMRKPAFLSGEQKKAIVDLLFKTNRKVTVKQLKEDYFKKIECFDSVEISGVEDRFNASLGTYHDLLKIIKDKDFLDNEENEDILEDIVLTLTLFEDREMIEERLKTYAHLFDDKVMKQLKRRRYTGWGRLSRKLINGIRDKQSGKTILDFLKSDGFANRNFMQLIHDDSLTFKEDIQKAQVSGQGDSLHEHIANLAGSPAIKKGILQTVKVVDELVKVMGRHKPENIVIEMARENQTTQKGQKNSRERMKRIEEGIKELGSQILKEHPVENTQLQNEKLYLYYLQNGRDMYVDQELDINRLSDYDVDHIVPQSFLKDDSIDNKVLTRSDKARGKSDNVPSEEVVKKMKNYWRQLLNAKLITQRKFDNLTKAERGGLSELDKAGFIKRQLVETRQITKHVAQILDSRMNTKYDENDKLIREVKVITLKSKLVSDFRKDFQFYKVREINNYHHAHDAYLNAVVGTALIKKYPKLESEFVYGDYKVYDVRKMIAKSEQEIGKATAKYFFYSNIMNFFKTEITLANGEIRKRPLIETNGETGEIVWDKGRDFATVRKVLSMPQVNIVKKTEVQTGGFSKESILPKRNSDKLIARKKDWDPKKYGGFDSPTVAYSVLVVAKVEKGKSKKLKSVKELLGITIMERSSFEKNPIDFLEAKGYKEVKKDLIIKLPKYSLFELENGRKRMLASAGELQKGNELALPSKYVNFLYLASHYEKLKGSPEDNEQKQLFVEQHKHYLDEIIEQISEFSKRVILADANLDKVLSAYNKHRDKPIREQAENIIHLFTLTNLGAPAAFKYFDTTIDRKRYTSTKEVLDATLIHQSITGLYETRIDLSQLGGDGGEAAAKGGTLNIEDEHRLHETSKEPDVSLGSTWLSDFPQAWAETGGMGLAVRQAPLIIPLKATSTPVSIKQYPMSQEARLGIKPHIQRLLDQGILVPCQSPWNTPLLPVKKPGTNDYRPVQDLREVNKRVEDIHPTVPNPYNLLSGLPPSHQWYTVLDLKDAFFCLRLHPTSQPLFAFEWRDPEMGISGQLTWTRLPQGFKNSPTLFDEALHRDLADFRIQHPDLILLQYVDDLLLAATSELDCQQGTRALLQTLGNLGYRASAKKAQICQKQVKYLGYLLKEGQRWLTEARKETVMGQPTPKTPRQLREFLGTAGFCRLWIPGFAEMAAPLYPLTKTGTLFNWGPDQQKAYQEIKQALLTAPALGLPDLTKPFELFVDEKQGYAKGVLTQKLGPWRRPVAYLSKKLDPVAAGWPPCLRMVAAIAVLTKDAGKLTMGQPLVILAPHAVEALVKQPPDRWLSNARMTHYQALLLDTDRVQFGPVVALNPATLLPLPEEGLQHNCLDILAEAHGTRPDLTDQPLPDADHTWYTDGSSLLQEGQRKAGAAVTTETEVIWAKALPAGTSAQRAELIALTQALKMAEGKKLNVYTDSRYAFATAHIHGEIYRRRGLLTSEGKEIKNKDEILALLKALFLPKRLSIIHCPGHQKGHSAEARGNRMADQAARKAAITETPDTSTLLAGKRTADGSEFEKRTADGSEFESPKKKAKVE

SEQ ID NO: 6366 - protein, 2082 aa, synthetic construct
MPAAKRVKLDGGDKKYSIGLDIGTNSVGWAVITDEYKVPSKKFKVLGNTDRHSIKKNLIGALLFDSGETAEATRLKRTARRRYTRRKNRICYLQEIFSNEMAKVDDSFFHRLEESFLVEEDKKHERHPIFGNIVDEVAYHEKYPTIYHLRKKLVDSTDKADLRLIYLALAHMIKFRGHFLIEGDLNPDNSDVDKLFIQLVQTYNQLFEENPINASGVDAKAILSARLSKSRRLENLIAQLPGEKKNGLFGNLIALSLGLTPNFKSNFDLAEDAKLQLSKDTYDDDLDNLLAQIGDQYADLFLAAKNLSDAILLSDILRVNTEITKAPLSASMIKRYDEHHQDLTLLKALVRQQLPEKYKEIFFDQSKNGYAGYIDGGASQEEFYKFIKPILEKMDGTEELLVKLNREDLLRKQRTFDNGSIPHQIHLGELHAILRRQEDFYPFLKDNREKIEKILTFRIPYYVGPLARGNSRFAWMTRKSEETITPWNFEEVVDKGASAQSFIERMTNFDKNLPNEKVLPKHSLLYEYFTVYNELTKVKYVTEGMRKPAFLSGEQKKAIVDLLFKTNRKVTVKQLKEDYFKKIECFDSVEISGVEDRFNASLGTYHDLLKIIKDKDFLDNEENEDILEDIVLTLTLFEDREMIEERLKTYAHLFDDKVMKQLKRRRYTGWGRLSRKLINGIRDKQSGKTILDFLKSDGFANRNFMQLIHDDSLTFKEDIQKAQVSGQGDSLHEHIANLAGSPAIKKGILQTVKVVDELVKVMGRHKPENIVIEMARENQTTQKGQKNSRERMKRIEEGIKELGSQILKEHPVENTQLQNEKLYLYYLQNGRDMYVDQELDINRLSDYDVDHIVPQSFLKDDSIDNKVLTRSDKARGKSDNVPSEEVVKKMKNYWRQLLNAKLITQRKFDNLTKAERGGLSELDKAGFIKRQLVETRQITKHVAQILDSRMNTKYDENDKLIREVKVITLKSKLVSDFRKDFQFYKVREINNYHHAHDAYLNAVVGTALIKKYPKLESEFVYGDYKVYDVRKMIAKSEQEIGKATAKYFFYSNIMNFFKTEITLANGEIRKRPLIETNGETGEIVWDKGRDFATVRKVLSMPQVNIVKKTEVQTGGFSKESILPKRNSDKLIARKKDWDPKKYGGFDSPTVAYSVLVVAKVEKGKSKKLKSVKELLGITIMERSSFEKNPIDFLEAKGYKEVKKDLIIKLPKYSLFELENGRKRMLASAGELQKGNELALPSKYVNFLYLASHYEKLKGSPEDNEQKQLFVEQHKHYLDEIIEQISEFSKRVILADANLDKVLSAYNKHRDKPIREQAENIIHLFTLTNLGAPAAFKYFDTTIDRKRYTSTKEVLDATLIHQSITGLYETRIDLSQLGGDGGEAAAKGGLDDEYRLYSPLVKPDQNIQFWLEQFPQAWAETAGMGLAKQVPPQVIQLKASATPVSVRQYPLSKEAQEGIRPHVQRLIQQGILVPVQSPWNTPLLPVRKPGTNDYRPVQDLREVNKRVQDIHPTVPNPYNLLCALPPQRSWYTVLDLKDAFFCLRLHPTSQPLFAFEWRDPGTGRTGQLTWTRLPQGFKNSPTIFNEALHRDLANFRIQHPQVTLLQYVDDLLLAGATKQDCLEGTKALLLELSDLGYRASAKKAQICRREVTYLGYSLRDGQRWLTEARKKTVVQIPAPTTAKQVREFLGKAGFCRLFIPGFATLAAPLYPLTKPKGEFSWAPEHQKAFDAIKKALLSAPALALPDVTKPFTLYVDERKGVARGVLTQTLGPWRRPVAYLSKKLDPVASGWPVCLKAIAAVAILVKDADKLTLGQNITVIAPHALENIVRQPPDRWMTNARMTHYQSLLLTERVTFAPPAALNPATLLPEETDEPVTHDCHQLLIEETGVRKDLTDIPLTGEVLTWFTDGSSYVVEGKRMAGAAVVDGTRTIWASSLPEGTSAQKAELMALTQALRLAEGKSINIYTDSRYAFATAHVHGAIYKQRGWLTSAGREIKNKEEILSLLEALHLPKRLAIIHCPGHQKAKDPISRGNQMADRVAKQAAQGVNLLPAGKRTADGSEFEKRTADGSEFESPKKKAKVE

SEQ ID NO: 6367 - protein, 2084 aa, synthetic construct
MPAAKRVKLDGGDKKYSIGLDIGTNSVGWAVITDEYKVPSKKFKVLGNTDRHSIKKNLIGALLFDSGETAEATRLKRTARRRYTRRKNRICYLQEIFSNEMAKVDDSFFHRLEESFLVEEDKKHERHPIFGNIVDEVAYHEKYPTIYHLRKKLVDSTDKADLRLIYLALAHMIKFRGHFLIEGDLNPDNSDVDKLFIQLVQTYNQLFEENPINASGVDAKAILSARLSKSRRLENLIAQLPGEKKNGLFGNLIALSLGLTPNFKSNFDLAEDAKLQLSKDTYDDDLDNLLAQIGDQYADLFLAAKNLSDAILLSDILRVNTEITKAPLSASMIKRYDEHHQDLTLLKALVRQQLPEKYKEIFFDQSKNGYAGYIDGGASQEEFYKFIKPILEKMDGTEELLVKLNREDLLRKQRTFDNGSIPHQIHLGELHAILRRQEDFYPFLKDNREKIEKILTFRIPYYVGPLARGNSRFAWMTRKSEETITPWNFEEVVDKGASAQSFIERMTNFDKNLPNEKVLPKHSLLYEYFTVYNELTKVKYVTEGMRKPAFLSGEQKKAIVDLLFKTNRKVTVKQLKEDYFKKIECFDSVEISGVEDRFNASLGTYHDLLKIIKDKDFLDNEENEDILEDIVLTLTLFEDREMIEERLKTYAHLFDDKVMKQLKRRRYTGWGRLSRKLINGIRDKQSGKTILDFLKSDGFANRNFMQLIHDDSLTFKEDIQKAQVSGQGDSLHEHIANLAGSPAIKKGILQTVKVVDELVKVMGRHKPENIVIEMARENQTTQKGQKNSRERMKRIEEGIKELGSQILKEHPVENTQLQNEKLYLYYLQNGRDMYVDQELDINRLSDYDVDHIVPQSFLKDDSIDNKVLTRSDKARGKSDNVPSEEVVKKMKNYWRQLLNAKLITQRKFDNLTKAERGGLSELDKAGFIKRQLVETRQITKHVAQILDSRMNTKYDENDKLIREVKVITLKSKLVSDFRKDFQFYKVREINNYHHAHDAYLNAVVGTALIKKYPKLESEFVYGDYKVYDVRKMIAKSEQEIGKATAKYFFYSNIMNFFKTEITLANGEIRKRPLIETNGETGEIVWDKGRDFATVRKVLSMPQVNIVKKTEVQTGGFSKESILPKRNSDKLIARKKDWDPKKYGGFDSPTVAYSVLVVAKVEKGKSKKLKSVKELLGITIMERSSFEKNPIDFLEAKGYKEVKKDLIIKLPKYSLFELENGRKRMLASAGELQKGNELALPSKYVNFLYLASHYEKLKGSPEDNEQKQLFVEQHKHYLDEIIEQISEFSKRVILADANLDKVLSAYNKHRDKPIREQAENIIHLFTLTNLGAPAAFKYFDTTIDRKRYTSTKEVLDATLIHQSITGLYETRIDLSQLGGDGGEAAAKGGTLQLDDEYRLYSPLVKPDQNIQFWLEQFPQAWAETAGMGLAKQVPPQVIQLKASATPVSVRQYPLSKEAQEGIRPHVQRLIQQGILVPVQSPWNTPLLPVRKPGTNDYRPVQDLREVNKRVQDIHPTVPNPYNLLCALPPQRSWYTVLDLKDAFFCLRLHPTSQPLFAFEWRDPGTGRTGQLTWTRLPQGFKNSPTIFDEALHRDLANFRIQHPQVTLLQYVDDLLLAGATKQDCLEGTKALLLELSDLGYRASAKKAQICRREVTYLGYSLRDGQRWLTEARKKTVVQIPAPTTAKQVREFLGTAGFCRLWIPGFATLAAPLYPLTKEKGEFSWAPEHQKAFDAIKKALLSAPALALPDVTKPFTLYVDERKGVARGVLTQTLGPWRRPVAYLSKKLDPVASGWPVCLKAIAAVAILVKDADKLTLGQNITVIAPHALENIVRQPPDRWMTNARMTHYQSLLLTERVTFAPPAALNPATLLPEETDEPVTHDCHQLLIEETGVRKDLTDIPLTGEVLTWFTDGSSYVVEGKRMAGAAVVDGTRTIWASSLPEGTSAQKAELMALTQALRLAEGKSINIYTDSRYAFATAHVHGAIYKQRGLLTSAGREIKNKEEILSLLEALHLPKRLAIIHCPGHQKAKDPISRGNQMADRVAKQAAQGVNLLAGKRTADGSEFEKRTADGSEFESPKKKAKVE

SEQ ID NO: 6368 - protein, 2082 aa, synthetic construct; identical to SEQ ID NO: 6366

SEQ ID NO: 6369 - protein, 2081 aa, synthetic construct
MPAAKRVKLDGGDKKYSIGLDIGTNSVGWAVITDEYKVPSKKFKVLGNTDRHSIKKNLIGALLFDSGETAEATRLKRTARRRYTRRKNRICYLQEIFSNEMAKVDDSFFHRLEESFLVEEDKKHERHPIFGNIVDEVAYHEKYPTIYHLRKKLVDSTDKADLRLIYLALAHMIKFRGHFLIEGDLNPDNSDVDKLFIQLVQTYNQLFEENPINASGVDAKAILSARLSKSRRLENLIAQLPGEKKNGLFGNLIALSLGLTPNFKSNFDLAEDAKLQLSKDTYDDDLDNLLAQIGDQYADLFLAAKNLSDAILLSDILRVNTEITKAPLSASMIKRYDEHHQDLTLLKALVRQQLPEKYKEIFFDQSKNGYAGYIDGGASQEEFYKFIKPILEKMDGTEELLVKLNREDLLRKQRTFDNGSIPHQIHLGELHAILRRQEDFYPFLKDNREKIEKILTFRIPYYVGPLARGNSRFAWMTRKSEETITPWNFEEVVDKGASAQSFIERMTNFDKNLPNEKVLPKHSLLYEYFTVYNELTKVKYVTEGMRKPAFLSGEQKKAIVDLLFKTNRKVTVKQLKEDYFKKIECFDSVEISGVEDRFNASLGTYHDLLKIIKDKDFLDNEENEDILEDIVLTLTLFEDREMIEERLKTYAHLFDDKVMKQLKRRRYTGWGRLSRKLINGIRDKQSGKTILDFLKSDGFANRNFMQLIHDDSLTFKEDIQKAQVSGQGDSLHEHIANLAGSPAIKKGILQTVKVVDELVKVMGRHKPENIVIEMARENQTTQKGQKNSRERMKRIEEGIKELGSQILKEHPVENTQLQNEKLYLYYLQNGRDMYVDQELDINRLSDYDVDHIVPQSFLKDDSIDNKVLTRSDKARGKSDNVPSEEVVKKMKNYWRQLLNAKLITQRKFDNLTKAERGGLSELDKAGFIKRQLVETRQITKHVAQILDSRMNTKYDENDKLIREVKVITLKSKLVSDFRKDFQFYKVREINNYHHAHDAYLNAVVGTALIKKYPKLESEFVYGDYKVYDVRKMIAKSEQEIGKATAKYFFYSNIMNFFKTEITLANGEIRKRPLIETNGETGEIVWDKGRDFATVRKVLSMPQVNIVKKTEVQTGGFSKESILPKRNSDKLIARKKDWDPKKYGGFDSPTVAYSVLVVAKVEKGKSKKLKSVKELLGITIMERSSFEKNPIDFLEAKGYKEVKKDLIIKLPKYSLFELENGRKRMLASAGELQKGNELALPSKYVNFLYLASHYEKLKGSPEDNEQKQLFVEQHKHYLDEIIEQISEFSKRVILADANLDKVLSAYNKHRDKPIREQAENIIHLFTLTNLGAPAAFKYFDTTIDRKRYTSTKEVLDATLIHQSITGLYETRIDLSQLGGDGGEAAAKGGIPWLMKKPLQLTTLVPLQEYEERLLKQTMLTGSYKEKLQSLFLKYDALWQHWENQVGHRRIKPHHIATGTVNPRPQKQYPINPKAKASIQTVINDLLKQGVLIQQNSIMNTPVYPVPKPDGKWRMVLDYREVNKTIPLIAAQNQHSAGILSSIFRGKYKTTLDLSNGFWAHSITPESYWLTAFTWLGQQYCWTRLPQGFLNSPALFNADVVDLLKEVPNVQVYVDDIYISHDDPREHLEQLEKVFSLLLNAGYVVSLKKSEIAQHEVEFLGFNITKEGRGLTETFKQKLLNITPPRDLKQLQSILGLLNFARNFIPNFSELVKPLYNIIATAPGKYITWTTDNSQQLQNIISMLNSAENLEERNPEVRLIMKVNTSPSAGYIRFYNEFAKRPIMYLNYVYTKAEVKFTNTEKLLTTIHKGLIKALDLGMGQEILVYSPIVSMTKIQKTPLPERKALPIRWITWMSYLEDPRIQFHYDKTLPELQQVPTVTDDIIAKIKHPSEFSMVFYTDGSAIKHPNVNKSHNAGMGIAQVQFKPEFTVINTWSIPLGDHTAQLAEVAAVEFACKKALKIDGPVLIVTDSFYVAESVNKELPYWQSNGFFNNKKKPLKHVSKWKSIADCIQLKPDIIIIHEKGHQPTASTFHTEGNNLADKLATQGSYVVNAGKRTADGSEFEKRTADGSEFESPKKKAKVE

SEQ ID NO: 6370 - protein, 2097 aa, synthetic construct
MPAAKRVKLDGGDKKYSIGLDIGTNSVGWAVITDEYKVPSKKFKVLGNTDRHSIKKNLIGALLFDSGETAEATRLKRTARRRYTRRKNRICYLQEIFSNEMAKVDDSFFHRLEESFLVEEDKKHERHPIFGNIVDEVAYHEKYPTIYHLRKKLVDSTDKADLRLIYLALAHMIKFRGHFLIEGDLNPDNSDVDKLFIQLVQTYNQLFEENPINASGVDAKAILSARLSKSRRLENLIAQLPGEKKNGLFGNLIALSLGLTPNFKSNFDLAEDAKLQLSKDTYDDDLDNLLAQIGDQYADLFLAAKNLSDAILLSDILRVNTEITKAPLSASMIKRYDEHHQDLTLLKALVRQQLPEKYKEIFFDQSKNGYAGYIDGGASQEEFYKFIKPILEKMDGTEELLVKLNREDLLRKQRTFDNGSIPHQIHLGELHAILRRQEDFYPFLKDNREKIEKILTFRIPYYVGPLARGNSRFAWMTRKSEETITPWNFEEVVDKGASAQSFIERMTNFDKNLPNEKVLPKHSLLYEYFTVYNELTKVKYVTEGMRKPAFLSGEQKKAIVDLLFKTNRKVTVKQLKEDYFKKIECFDSVEISGVEDRFNASLGTYHDLLKIIKDKDFLDNEENEDILEDIVLTLTLFEDREMIEERLKTYAHLFDDKVMKQLKRRRYTGWGRLSRKLINGIRDKQSGKTILDFLKSDGFANRNFMQLIHDDSLTFKEDIQKAQVSGQGDSLHEHIANLAGSPAIKKGILQTVKVVDELVKVMGRHKPENIVIEMARENQTTQKGQKNSRERMKRIEEGIKELGSQILKEHPVENTQLQNEKLYLYYLQNGRDMYVDQELDINRLSDYDVDHIVPQSFLKDDSIDNKVLTRSDKARGKSDNVPSEEVVKKMKNYWRQLLNAKLITQRKFDNLTKAERGGLSELDKAGFIKRQLVETRQITKHVAQILDSRMNTKYDENDKLIREVKVITLKSKLVSDFRKDFQFYKVREINNYHHAHDAYLNAVVGTALIKKYPKLESEFVYGDYKVYDVRKMIAKSEQEIGKATAKYFFYSNIMNFFKTEITLANGEIRKRPLIETNGETGEIVWDKGRDFATVRKVLSMPQVNIVKKTEVQTGGFSKESILPKRNSDKLIARKKDWDPKKYGGFDSPTVAYSVLVVAKVEKGKSKKLKSVKELLGITIMERSSFEKNPIDFLEAKGYKEVKKDLIIKLPKYSLFELENGRKRMLASAGELQKGNELALPSKYVNFLYLASHYEKLKGSPEDNEQKQLFVEQHKHYLDEIIEQISEFSKRVILADANLDKVLSAYNKHRDKPIREQAENIIHLFTLTNLGAPAAFKYFDTTIDRKRYTSTKEVLDATLIHQSITGLYETRIDLSQLGGDGGEAAAKEAAAKGGTAPLEEEYRLFLEAPIQNVTLLEQWKREIPKVWAEINPPGLASTQAPIHVQLLSTALPVRVRQYPITLEAKRSLRETIRKFRAAGILRPVHSPWNTPLLPVRKSGTSEYRMVQDLREVNKRVETIHPTVPNPYTLLSLLPPDRIWYSVLDLKDAFFCIPLAPESQLIFAFEWADAEEGESGQLTWTRLPQGFKNSPTLFNEALNRDLQGFRLDHPSVSLLQYVDDLLIAADTQAACLSATRDLLMTLAELGYRVSGKKAQLCQEEVTYLGFKIHKGSRSLSNSRTQAILQIPVPKTKRQVREFLGKIGYCRLFIPGFAELAQPLYAATRPGNDPLVWGEKEEEAFQSLKLALTQPPALALPSLDKPFQLFVEETSGAAKGVLTQALGPWKRPVAYLSKRLDPVAAGWPRCLRAIAAAALLTREASKLTFGQDIEITSSHNLESLLRSPPDKWLTNARITQYQVLLLDPPRVRFKQTAALNPATLLPETDDTLPIHHCLDTLDSLTSTRPDLTDQPLAQAEATLFTDGSSYIRDGKRYAGAAVVTLDSVIWAEPLPIGTSAQKAELIALTKALEWSKDKSVNIYTDSRYAFATLHVHGMIYRERGWLTAGGKAIKNAPEILALLTAVWLPKRVAVMHCKGHQKDDAPTSTGNRRADEVAREVAIRPLSTQATISAGKRTADGSEFEKRTADGSEFESPKKKAKVE

SEQ ID NO: 6371 - protein, 2172 aa, synthetic construct
MPAAKRVKLDGGDKKYSIGLDIGTNSVGWAVITDEYKVPSKKFKVLGNTDRHSIKKNLIGALLFDSGETAEATRLKRTARRRYTRRKNRICYLQEIFSNEMAKVDDSFFHRLEESFLVEEDKKHERHPIFGNIVDEVAYHEKYPTIYHLRKKLVDSTDKADLRLIYLALAHMIKFRGHFLIEGDLNPDNSDVDKLFIQLVQTYNQLFEENPINASGVDAKAILSARLSKSRRLENLIAQLPGEKKNGLFGNLIALSLGLTPNFKSNFDLAEDAKLQLSKDTYDDDLDNLLAQIGDQYADLFLAAKNLSDAILLSDILRVNTEITKAPLSASMIKRYDEHHQDLTLLKALVRQQLPEKYKEIFFDQSKNGYAGYIDGGASQEEFYKFIKPILEKMDGTEELLVKLNREDLLRKQRTFDNGSIPHQIHLGELHAILRRQEDFYPFLKDNREKIEKILTFRIPYYVGPLARGNSRFAWMTRKSEETITPWNFEEVVDKGASAQSFIERMTNFDKNLPNEKVLPKHSLLYEYFTVYNELTKVKYVTEGMRKPAFLSGEQKKAIVDLLFKTNRKVTVKQLKEDYFKKIECFDSVEISGVEDRFNASLGTYHDLLKIIKDKDFLDNEENEDILEDIVLTLTLFEDREMIEERLKTYAHLFDDKVMKQLKRRRYTGWGRLSRKLINGIRDKQSGKTILDFLKSDGFANRNFMQLIHDDSLTFKEDIQKAQVSGQGDSLHEHIANLAGSPAIKKGILQTVKVVDELVKVMGRHKPENIVIEMARENQTTQKGQKNSRERMKRIEEGIKELGSQILKEHPVENTQLQNEKLYLYYLQNGRDMYVDQELDINRLSDYDVDHIVPQSFLKDDSIDNKVLTRSDKARGKSDNVPSEEVVKKMKNYWRQLLNAKLITQRKFDNLTKAERGGLSELDKAGFIKRQLVETRQITKHVAQILDSRMNTKYDENDKLIREVKVITLKSKLVSDFRKDFQFYKVREINNYHHAHDAYLNAVVGTALIKKYPKLESEFVYGDYKVYDVRKMIAKSEQEIGKATAKYFFYSNIMNFFKTEITLANGEIRKRPLIETNGETGEIVWDKGRDFATVRKVLSMPQVNIVKKTEVQTGGFSKESILPKRNSDKLIARKKDWDPKKYGGFDSPTVAYSVLVVAKVEKGKSKKLKSVKELLGITIMERSSFEKNPIDFLEAKGYKEVKKDLIIKLPKYSLFELENGRKRMLASAGELQKGNELALPSKYVNFLYLASHYEKLKGSPEDNEQKQLFVEQHKHYLDEIIEQISEFSKRVILADANLDKVLSAYNKHRDKPIREQAENIIHLFTLTNLGAPAAFKYFDTTIDRKRYTSTKEVLDATLIHQSITGLYETRIDLSQLGGDGGEAAAKEAAAKGGMDLLKPLTVERKGVKIKGYWNSQADITCVPKDLLQGEEPVRQQNVTTIHGTQEGDVYYVNLKIDGRRINTEVIGTTLDYAIITPGDVPWILKKPLELTIKLDLEEQQGTLLNNSILSKKGKEELKQLFEKYSALWQSWENQVGHRRIRPHKIATGTVKPTPQKQYHINPKAKPDIQIVINDLLKQGVLIQKESTMNTPVYPVPKPNGRWRMVLDYRAVNKVTPLIAVQNQHSYGILGSLFKGRYKTTIDLSNGFWAHPIVPEDYWITAFTWQGKQYCWTVLPQGFLNSPGLFTGDVVDLLQGIPNVEVYVDDVYISHDSEKEHLEYLDILFNRLKEAGYIISLKKSNIANSIVDFLGFQITNEGRGLTDTFKEKLENITAPTTLKQLQSILGLLNFARNFIPDFTELIAPLYALIPKSTKNYVPWQIEHSTTLETLITKLNGAEYLQGRKGDKTLIMKVNASYTTGYIRYYNEGEKKPISYVSIVFSKTELKFTELEKLLTTVHKGLLKALDLSMGQNIHVYSPIVSMQNIQKTPQTAKKALASRWLSWLSYLEDPRIRFFYDPQMPALKDLPAVDTGKDNKKHPSNFQHIFYTDGSAITSPTKEGHLNAGMGIVYFINKDGNLQKQQEWSISLGNHTAQFAEIAAFEFALKKCLPLGGNILVVTDSNYVAKAYNEELDVWASNGFVNNRKKPLKHISKWKSVADLKRLRPDVVVTHEPGHQKLDSSPHAYGNNLADQLATQASFKVHAGKRTADGSEFEKRTADGSEFESPKKKAKVE

SEQ ID NO: 6372 - protein, 2086 aa, synthetic construct
MPAAKRVKLDGGDKKYSIGLDIGTNSVGWAVITDEYKVPSKKFKVLGNTDRHSIKKNLIGALLFDSGETAEATRLKRTARRRYTRRKNRICYLQEIFSNEMAKVDDSFFHRLEESFLVEEDKKHERHPIFGNIVDEVAYHEKYPTIYHLRKKLVDSTDKADLRLIYLALAHMIKFRGHFLIEGDLNPDNSDVDKLFIQLVQTYNQLFEENPINASGVDAKAILSARLSKSRRLENLIAQLPGEKKNGLFGNLIALSLGLTPNFKSNFDLAEDAKLQLSKDTYDDDLDNLLAQIGDQYADLFLAAKNLSDAILLSDILRVNTEITKAPLSASMIKRYDEHHQDLTLLKALVRQQLPEKYKEIFFDQSKNGYAGYIDGGASQEEFYKFIKPILEKMDGTEELLVKLNREDLLRKQRTFDNGSIPHQIHLGELHAILRRQEDFYPFLKDNREKIEKILTFRIPYYVGPLARGNSRFAWMTRKSEETITPWNFEEVVDKGASAQSFIERMTNFDKNLPNEKVLPKHSLLYEYFTVYNELTKVKYVTEGMRKPAFLSGEQKKAIVDLLFKTNRKVTVKQLKEDYFKKIECFDSVEISGVEDRFNASLGTYHDLLKIIKDKDFLDNEENEDILEDIVLTLTLFEDREMIEERLKTYAHLFDDKVMKQLKRRRYTGWGRLSRKLINGIRDKQSGKTILDFLKSDGFANRNFMQLIHDDSLTFKEDIQKAQVSGQGDSLHEHIANLAGSPAIKKGILQTVKVVDELVKVMGRHKPENIVIEMARENQTTQKGQKNSRERMKRIEEGIKELGSQILKEHPVENTQLQNEKLYLYYLQNGRDMYVDQELDINRLSDYDVDHIVPQSFLKDDSIDNKVLTRSDKARGKSDNVPSEEVVKKMKNYWRQLLNAKLITQRKFDNLTKAERGGLSELDKAGFIKRQLVETRQITKHVAQILDSRMNTKYDENDKLIREVKVITLKSKLVSDFRKDFQFYKVREINNYHHAHDAYLNAVVGTALIKKYPKLESEFVYGDYKVYDVRKMIAKSEQEIGKATAKYFFYSNIMNFFKTEITLANGEIRKRPLIETNGETGEIVWDKGRDFATVRKVLSMPQVNIVKKTEVQTGGFSKESILPKRNSDKLIARKKDWDPKKYGGFDSPTVAYSVLVVAKVEKGKSKKLKSVKELLGITIMERSSFEKNPIDFLEAKGYKEVKKDLIIKLPKYSLFELENGRKRMLASAGELQKGNELALPSKYVNFLYLASHYEKLKGSPEDNEQKQLFVEQHKHYLDEIIEQISEFSKRVILADANLDKVLSAYNKHRDKPIREQAENIIHLFTLTNLGAPAAFKYFDTTIDRKRYTSTKEVLDATLIHQSITGLYETRIDLSQLGGDGGEAAAKEAAAKGGVPWILKKPLELTIKLDLEEQQGTLLNNSILSKKGKEELKQLFEKYSALWQSWENQVGHRRIRPHKIATGTVKPTPQKQYHINPKAKPDIQIVINDLLKQGVLIQKESTMNTPVYPVPKPNGRWRMVLDYRAVNKVTPLIAVQNQHSYGILGSLFKGRYKTTIDLSNGFWAHPIVPEDYWITAFTWQGKQYCWTVLPQGFLNSPGLFTGDVVDLLQGIPNVEVYVDDVYISHDSEKEHLEYLDILFNRLKEAGYIISLKKSNIANSIVDFLGFQITNEGRGLTDTFKEKLENITAPTTLKQLQSILGLLNFARNFIPDFTELIAPLYALIPKSTKNYVPWQIEHSTTLETLITKLNGAEYLQGRKGDKTLIMKVNASYTTGYIRYYNEGEKKPISYVSIVFSKTELKFTELEKLLTTVHKGLLKALDLSMGQNIHVYSPIVSMQNIQKTPQTAKKALASRWLSWLSYLEDPRIRFFYDPQMPALKDLPAVDTGKDNKKHPSNFQHIFYTDGSAITSPTKEGHLNAGMGIVYFINKDGNLQKQQEWSISLGNHTAQFAEIAAFEFALKKCLPLGGNILVVTDSNYVAKAYNEELDVWASNGFVNNRKKPLKHISKWKSVADLKRLRPDVVVTHEPGHQKLDSSPHAYGNNLADQLATQASFKVHAGKRTADGSEFEKRTADGSEFESPKKKAKVE

SEQ ID NO: 6373 - protein, 2172 aa, synthetic construct
MPAAKRVKLDGGDKKYSIGLDIGTNSVGWAVITDEYKVPSKKFKVLGNTDRHSIKKNLIGALLFDSGETAEATRLKRTARRRYTRRKNRICYLQEIFSNEMAKVDDSFFHRLEESFLVEEDKKHERHPIFGNIVDEVAYHEKYPTIYHLRKKLVDSTDKADLRLIYLALAHMIKFRGHFLIEGDLNPDNSDVDKLFIQLVQTYNQLFEENPINASGVDAKAILSARLSKSRRLENLIAQLPGEKKNGLFGNLIALSLGLTPNFKSNFDLAEDAKLQLSKDTYDDDLDNLLAQIGDQYADLFLAAKNLSDAILLSDILRVNTEITKAPLSASMIKRYDEHHQDLTLLKALVRQQLPEKYKEIFFDQSKNGYAGYIDGGASQEEFYKFIKPILEKMDGTEELLVKLNREDLLRKQRTFDNGSIPHQIHLGELHAILRRQEDFYPFLKDNREKIEKILTFRIPYYVGPLARGNSRFAWMTRKSEETITPWNFEEVVDKGASAQSFIERMTNFDKNLPNEKVLPKHSLLYEYFTVYNELTKVKYVTEGMRKPAFLSGEQKKAIVDLLFKTNRKVTVKQLKEDYFKKIECFDSVEISGVEDRFNASLGTYHDLLKIIKDKDFLDNEENEDILEDIVLTLTLFEDREMIEERLKTYAHLFDDKVMKQLKRRRYTGWGRLSRKLINGIRDKQSGKTILDFLKSDGFANRNFMQLIHDDSLTFKEDIQKAQVSGQGDSLHEHIANLAGSPAIKKGILQTVKVVDELVKVMGRHKPENIVIEMARENQTTQKGQKNSRERMKRIEEGIKELGSQILKEHPVENTQLQNEKLYLYYLQNGRDMYVDQELDINRLSDYDVDHIVPQSFLKDDSIDNKVLTRSDKARGKSDNVPSEEVVKKMKNYWRQLLNAKLITQRKFDNLTKAERGGLSELDKAGFIKRQLVETRQITKHVAQILDSRMNTKYDENDKLIREVKVITLKSKLVSDFRKDFQFYKVREINNYHHAHDAYLNAVVGTALIKKYPKLESEFVYGDYKVYDVRKMIAKSEQEIGKATAKYFFYSNIMNFFKTEITLANGEIRKRPLIETNGETGEIVWDKGRDFATVRKVLSMPQVNIVKKTEVQTGGFSKESILPKRNSDKLIARKKDWDPKKYGGFDSPTVAYSVLVVAKVEKGKSKKLKSVKELLGITIMERSSFEKNPIDFLEAKGYKEVKKDLIIKLPKYSLFELENGRKRMLASAGELQKGNELALPSKYVNFLYLASHYEKLKGSPEDNEQKQLFVEQHKHYLDEIIEQISEFSKRVILADANLDKVLSAYNKHRDKPIREQAENIIHLFTLTNLGAPAAFKYFDTTIDRKRYTSTKEVLDATLIHQSITGLYETRIDLSQLGGDGGEAAAKEAAAKGGMDLLKPLTVERKGVKIKGYWNSQADITCVPKDLLQGEEPVRQQNVTTIHGTQEGDVYYVNLKIDGRRINTEVIGTTLDYAIITPGDVPWILKKPLELTIKLDLEEQQGTLLNNSILSKKGKEELKQLFEKYSALWQSWENQVGHRRIRPHKIATGTVKPTPQKQYHINPKAKPDIQIVINDLLKQGVLIQKESTMNTPVYPVPKPNGRWRMVLDYRAVNKVTPLIAVQNQHSYGILGSLFKGRYKTTIDLSNGFWAHPIVPEDYWITAFTWQGKQYCWTVLPQGFLNSPGLFNGDVVDLLQGIPNVEVYVDDVYISHDSEKEHLEYLDILFNRLKEAGYIISLKKSNIANSIVDFLGFQITNEGRGLTDTFKEKLENITAPTTLKQLQSILGLLNFARNFIPDFTELIAPLYALIPKSPKNYVPWQIEHSTTLETLITKLNGAEYLQGRKGDKTLIMKVNASYTTGYIRYYNEGEKKPISYVSIVFSKTELKFTELEKLLTTVHKGLLKALDLSMGQNIHVYSPIVSMQNIQKTPQTAKKALASRWLSWLSYLEDPRIRFFYDPQMPALKDLPAVDTGKDNKKHPSNFQHIFYTDGSAITSPTKEGHLNAGMGIVYFINKDGNLQKQQEWSISLGNHTAQFAEIAAFEFALKKCLPLGGNILVVTDSNYVAKAYNEELDVWASNGFVNNRKKPLKHISKWKSVADLKRLRPDVVVTHEPGHQKLDSSPHAYGNNLADQLATQASFKVHAGKRTADGSEFEKRTADGSEFESPKKKAKVE

SEQ ID NO: 6374 - protein, 2093 aa, synthetic construct
MPAAKRVKLDGGDKKYSIGLDIGTNSVGWAVITDEYKVPSKKFKVLGNTDRHSIKKNLIGALLFDSGETAEATRLKRTARRRYTRRKNRICYLQEIFSNEMAKVDDSFFHRLEESFLVEEDKKHERHPIFGNIVDEVAYHEKYPTIYHLRKKLVDSTDKADLRLIYLALAHMIKFRGHFLIEGDLNPDNSDVDKLFIQLVQTYNQLFEENPINASGVDAKAILSARLSKSRRLENLIAQLPGEKKNGLFGNLIALSLGLTPNFKSNFDLAEDAKLQLSKDTYDDDLDNLLAQIGDQYADLFLAAKNLSDAILLSDILRVNTEITKAPLSASMIKRYDEHHQDLTLLKALVRQQLPEKYKEIFFDQSKNGYAGYIDGGASQEEFYKFIKPILEKMDGTEELLVKLNREDLLRKQRTFDNGSIPHQIHLGELHAILRRQEDFYPFLKDNREKIEKILTFRIPYYVGPLARGNSRFAWMTRKSEETITPWNFEEVVDKGASAQSFIERMTNFDKNLPNEKVLPKHSLLYEYFTVYNELTKVKYVTEGMRKPAFLSGEQKKAIVDLLFKTNRKVTVKQLKEDYFKKIECFDSVEISGVEDRFNASLGTYHDLLKIIKDKDFLDNEENEDILEDIVLTLTLFEDREMIEERLKTYAHLFDDKVMKQLKRRRYTGWGRLSRKLINGIRDKQSGKTILDFLKSDGFANRNFMQLIHDDSLTFKEDIQKAQVSGQGDSLHEHIANLAGSPAIKKGILQTVKVVDELVKVMGRHKPENIVIEMARENQTTQKGQKNSRERMKRIEEGIKELGSQILKEHPVENTQLQNEKLYLYYLQNGRDMYVDQELDINRLSDYDVDHIVPQSFLKDDSIDNKVLTRSDKARGKSDNVPSEEVVKKMKNYWRQLLNAKLITQRKFDNLTKAERGGLSELDKAGFIKRQLVETRQITKHVAQILDSRMNTKYDENDKLIREVKVITLKSKLVSDFRKDFQFYKVREINNYHHAHDAYLNAVVGTALIKKYPKLESEFVYGDYKVYDVRKMIAKSEQEIGKATAKYFFYSNIMNFFKTEITLANGEIRKRPLIETNGETGEIVWDKGRDFATVRKVLSMPQVNIVKKTEVQTGGFSKESILPKRNSDKLIARKKDWDPKKYGGFDSPTVAYSVLVVAKVEKGKSKKLKSVKELLGITIMERSSFEKNPIDFLEAKGYKEVKKDLIIKLPKYSLFELENGRKRMLASAGELQKGNELALPSKYVNFLYLASHYEKLKGSPEDNEQKQLFVEQHKHYLDEIIEQISEFSKRVILADANLDKVLSAYNKHRDKPIREQAENIIHLFTLTNLGAPAAFKYFDTTIDRKRYTSTKEVLDATLIHQSITGLYETRIDLSQLGGDGGEAAAKEAAAKGGVLNLEEEYRLHEKPVPSSIDPSWLQLFPTVWAERAGMGLANQVPPVVVELRSGASPVAVRQYPMSKEAREGIRPHIQKFLDLGVLVPCRSPWNTPLLPVKKPGTNDYRPVQDLREINKRVQDIHPTVPNPYNLLSSLPPSYTWYSVLDLKDAFFCLRLHPNSQPLFAFEWKDPEKGNTGQLTWTRLPQGFKNSPTLFNEALHRDLAPFRALNPQVVLLQYVDDLLVAAPTYEDCKKGTQKLLQELSKLGYRVSAKKAQLCQREVTYLGYLLKEGKRWLTPARKATVMKIPVPTTPRQVREFLGKAGFCRLFIPGFASLAAPLYPLTKPSIPFIWTEEHQQAFDHIKKALLSAPALALPDLTKPFTLYIDERAGVARGVLTQTLGPWRRPVAYLSKKLDPVASGWPTCLKAVAAVALLLKDADKLTLGQNVTVIASHSLESIVRQPPDRWMTNARMTHYQSLLLNERVSFAPPAVLNPATLLPVESEATPVHRCSEILAEETGTRRDLEDQPLPGVPTWYTDGSSFITEGKRRAGAPIVDGKRTVWASSLPEGTSAQKAELVALTQALRLAEGKNINIYTDSRYAFATAHIHGAIYKQRGWLTSAGKDIKNKEEILALLEAIHLPRRVAIIHCPGHQRGSNPVATGNRRADEAAKQAALSTRVLAGTTKPAGKRTADGSEFEKRTADGSEFESPKKKAKVE

SEQ ID NO: 6375 - protein, 2126 aa, synthetic construct
MPAAKRVKLDGGDKKYSIGLDIGTNSVGWAVITDEYKVPSKKFKVLGNTDRHSIKKNLIGALLFDSGETAEATRLKRTARRRYTRRKNRICYLQEIFSNEMAKVDDSFFHRLEESFLVEEDKKHERHPIFGNIVDEVAYHEKYPTIYHLRKKLVDSTDKADLRLIYLALAHMIKFRGHFLIEGDLNPDNSDVDKLFIQLVQTYNQLFEENPINASGVDAKAILSARLSKSRRLENLIAQLPGEKKNGLFGNLIALSLGLTPNFKSNFDLAEDAKLQLSKDTYDDDLDNLLAQIGDQYADLFLAAKNLSDAILLSDILRVNTEITKAPLSASMIKRYDEHHQDLTLLKALVRQQLPEKYKEIFFDQSKNGYAGYIDGGASQEEFYKFIKPILEKMDGTEELLVKLNREDLLRKQRTFDNGSIPHQIHLGELHAILRRQEDFYPFLKDNREKIEKILTFRIPYYVGPLARGNSRFAWMTRKSEETITPWNFEEVVDKGASAQSFIERMTNFDKNLPNEKVLPKHSLLYEYFTVYNELTKVKYVTEGMRKPAFLSGEQKKAIVDLLFKTNRKVTVKQLKEDYFKKIECFDSVEISGVEDRFNASLGTYHDLLKIIKDKDFLDNEENEDILEDIVLTLTLFEDREMIEERLKTYAHLFDDKVMKQLKRRRYTGWGRLSRKLINGIRDKQSGKTILDFLKSDGFANRNFMQLIHDDSLTFKEDIQKAQVSGQGDSLHEHIANLAGSPAIKKGILQTVKVVDELVKVMGRHKPENIVIEMARENQTTQKGQKNSRERMKRIEEGIKELGSQILKEHPVENTQLQNEKLYLYYLQNGRDMYVDQELDINRLSDYDVDHIVPQSFLKDDSIDNKVLTRSDKARGKSDNVPSEEVVKKMKNYWRQLLNAKLITQRKFDNLTKAERGGLSELDKAGFIKRQLVETRQITKHVAQILDSRMNTKYDENDKLIREVKVITLKSKLVSDFRKDFQFYKVREINNYHHAHDAYLNAVVGTALIKKYPKLESEFVYGDYKVYDVRKMIAKSEQEIGKATAKYFFYSNIMNFFKTEITLANGEIRKRPLIETNGETGEIVWDKGRDFATVRKVLSMPQVNIVKKTEVQTGGFSKESILPKRNSDKLIARKKDWDPKKYGGFDSPTVAYSVLVVAKVEKGKSKKLKSVKELLGITIMERSSFEKNPIDFLEAKGYKEVKKDLIIKLPKYSLFELENGRKRMLASAGELQKGNELALPSKYVNFLYLASHYEKLKGSPEDNEQKQLFVEQHKHYLDEIIEQISEFSKRVILADANLDKVLSAYNKHRDKPIREQAENIIHLFTLTNLGAPAAFKYFDTTIDRKRYTSTKEVLDATLIHQSITGLYETRIDLSQLGGDGGEAAAKEAAAKGGLLGRDLLTKLKAQIQFSTEGPQVTWEDRPAMCLVLNLEEEYRLHEKPVPPSIDPSWLQLFPMVWAEKAGMGLANQVPPVVVELKSDASPVAVRQYPMSKEAREGIRPHIQRFLDLGILVPCQSPWNTPLLPVKKPGTNDYRPVQDLREVNKRVQDIHPTVPNPYNLLSSLPPSHTWYSVLDLKDAFFCLKLHPNSQPLFAFEWRDPEKGNTGQLTWTRLPQGFKNSPTLFNEALHRDLASFRALNPQVVMLQYVDDLLVAAPTYRDCKEGTRRLLQELSKLGYRVSAKKAQLCREEVTYLGYLLKGGKRWLTPARKATVMKIPTPTTPRQVREFLGTAGFCRLWIPGFASLAAPLYPLTRPKVPFTWTEAHQEAFGRIKEALLSAPALALPDLTKPFALYVDEKEGVARGVLTQTLGPWRRPVAYLSKKLDPVASGWPTCLKAIAAVALLLKDADKLTLGQNVLVIAPHNLESIVRQPPDRWMTNARMTHYQSLLLNERVSFAPPAILNPATLLPVESDDTPIHICSEILAEETGTRPDLRDQPLPGVPAWYTDGSSFIMDGRRQAGAAIVDNKRTVWASNLPEGTSAQKAELIALTQALRLAEGKSINIYTDSRYAFATAHVHGAIYKQRGWLTSAGKDIKNKEEILALLEAIHLPKRVAIIHCPGHQRGTDPVATGNRKADEAAKQAAQSTRILTETTKNAGKRTADGSEFEKRTADGSEFESPKKKAKVE

SEQ ID NO: 6376 - protein, 2126 aa, synthetic construct
MPAAKRVKLDGGDKKYSIGLDIGTNSVGWAVITDEYKVPSKKFKVLGNTDRHSIKKNLIGALLFDSGETAEATRLKRTARRRYTRRKNRICYLQEIFSNEMAKVDDSFFHRLEESFLVEEDKKHERHPIFGNIVDEVAYHEKYPTIYHLRKKLVDSTDKADLRLIYLALAHMIKFRGHFLIEGDLNPDNSDVDKLFIQLVQTYNQLFEENPINASGVDAKAILSARLSKSRRLENLIAQLPGEKKNGLFGNLIALSLGLTPNFKSNFDLAEDAKLQLSKDTYDDDLDNLLAQIGDQYADLFLAAKNLSDAILLSDILRVNTEITKAPLSASMIKRYDEHHQDLTLLKALVRQQLPEKYKEIFFDQSKNGYAGYIDGGASQEEFYKFIKPILEKMDGTEELLVKLNREDLLRKQRTFDNGSIPHQIHLGELHAILRRQEDFYPFLKDNREKIEKILTFRIPYYVGPLARGNSRFAWMTRKSEETITPWNFEEVVDKGASAQSFIERMTNFDKNLPNEKVLPKHSLLYEYFTVYNELTKVKYVTEGMRKPAFLSGEQKKAIVDLLFKTNRKVTVKQLKEDYFKKIECFDSVEISGVEDRFNASLGTYHDLLKIIKDKDFLDNEENEDILEDIVLTLTLFEDREMIEERLKTYAHLFDDKVMKQLKRRRYTGWGRLSRKLINGIRDKQSGKTILDFLKSDGFANRNFMQLIHDDSLTFKEDIQKAQVSGQGDSLHEHIANLAGSPAIKKGILQTVKVVDELVKVMGRHKPENIVIEMARENQTTQKGQKNSRERMKRIEEGIKELGSQILKEHPVENTQLQNEKLYLYYLQNGRDMYVDQELDINRLSDYDVDHIVPQSFLKDDSIDNKVLTRSDKARGKSDNVPSEEVVKKMKNYWRQLLNAKLITQRKFDNLTKAERGGLSELDKAGFIKRQLVETRQITKHVAQILDSRMNTKYDENDKLIREVKVITLKSKLVSDFRKDFQFYKVREINNYHHAHDAYLNAVVGTALIKKYPKLESEFVYGDYKVYDVRKMIAKSEQEIGKATAKYFFYSNIMNFFKTEITLANGEIRKRPLIETNGETGEIVWDKGRDFATVRKVLSMPQVNIVKKTEVQTGGFSKESILPKRNSDKLIARKKDWDPKKYGGFDSPTVAYSVLVVAKVEKGKSKKLKSVKELLGITIMERSSFEKNPIDFLEAKGYKEVKKDLIIKLPKYSLFELENGRKRMLASAGELQKGNELALPSKYVNFLYLASHYEKLKGSPEDNEQKQLFVEQHKHYLDEIIEQISEFSKRVILADANLDKVLSAYNKHRDKPIREQAENIIHLFTLTNLGAPAAFKYFDTTIDRKRYTSTKEVLDATLIHQSITGLYETRIDLSQLGGDGGEAAAKEAAAKGGLLGRDLLTKLKAQIQFSTEGPQVTWEDRPAMCLVLNLEEEYRLHEKPVPPSIDPSWLQLFPMVWAEKAGMGLANQVPPVVVELKSDASPVAVRQYPMSKEAREGIRPHIQRFLDLGILVPCQSPWNTPLLPVKKPGTNDYRPVQDLREVNKRVQDIHPTVPNPYNLLSSLPPSHTWYSVLDLKDAFFCLKLHPNSQPLFAFEWRDPEKGNTGQLTWTRLPQGFKNSPTLFNEALHRDLASFRALNPQVVMLQYVDDLLVAAPTYRDCKEGTRRLLQELSKLGYRVSAKKAQLCREEVTYLGYLLKGGKRWLTPARKATVMKIPTPTTPRQVREFLGKAGFCRLFIPGFASLAAPLYPLTRPKVPFTWTEAHQEAFGRIKEALLSAPALALPDLTKPFALYVDEKEGVARGVLTQTLGPWRRPVAYLSKKLDPVASGWPTCLKAIAAVALLLKDADKLTLGQNVLVIAPHNLESIVRQPPDRWMTNARMTHYQSLLLNERVSFAPPAILNPATLLPVESDDTPIHICSEILAEETGTRPDLRDQPLPGVPAWYTDGSSFIMDGRRQAGAAIVDNKRTVWASNLPEGTSAQKAELIALTQALRLAEGKSINIYTDSRYAFATAHVHGAIYKQRGWLTSAGKDIKNKEEILALLEAIHLPKRVAIIHCPGHQRGTDPVATGNRKADEAAKQAAQSTRILTETTKNAGKRTADGSEFEKRTADGSEFESPKKKAKVE

SEQ ID NO: 6377 - protein, 2095 aa, synthetic construct
MPAAKRVKLDGGDKKYSIGLDIGTNSVGWAVITDEYKVPSKKFKVLGNTDRHSIKKNLIGALLFDSGETAEATRLKRTARRRYTRRKNRICYLQEIFSNEMAKVDDSFFHRLEESFLVEEDKKHERHPIFGNIVDEVAYHEKYPTIYHLRKKLVDSTDKADLRLIYLALAHMIKFRGHFLIEGDLNPDNSDVDKLFIQLVQTYNQLFEENPINASGVDAKAILSARLSKSRRLENLIAQLPGEKKNGLFGNLIALSLGLTPNFKSNFDLAEDAKLQLSKDTYDDDLDNLLAQIGDQYADLFLAAKNLSDAILLSDILRVNTEITKAPLSASMIKRYDEHHQDLTLLKALVRQQLPEKYKEIFFDQSKNGYAGYIDGGASQEEFYKFIKPILEKMDGTEELLVKLNREDLLRKQRTFDNGSIPHQIHLGELHAILRRQEDFYPFLKDNREKIEKILTFRIPYYVGPLARGNSRFAWMTRKSEETITPWNFEEVVDKGASAQSFIERMTNFDKNLPNEKVLPKHSLLYEYFTVYNELTKVKYVTEGMRKPAFLSGEQKKAIVDLLFKTNRKVTVKQLKEDYFKKIECFDSVEISGVEDRFNASLGTYHDLLKIIKDKDFLDNEENEDILEDIVLTLTLFEDREMIEERLKTYAHLFDDKVMKQLKRRRYTGWGRLSRKLINGIRDKQSGKTILDFLKSDGFANRNFMQLIHDDSLTFKEDIQKAQVSGQGDSLHEHIANLAGSPAIKKGILQTVKVVDELVKVMGRHKPENIVIEMARENQTTQKGQKNSRERMKRIEEGIKELGSQILKEHPVENTQLQNEKLYLYYLQNGRDMYVDQELDINRLSDYDVDHIVPQSFLKDDSIDNKVLTRSDKARGKSDNVPSEEVVKKMKNYWRQLLNAKLITQRKFDNLTKAERGGLSELDKAGFIKRQLVETRQITKHVAQILDSRMNTKYDENDKLIREVKVITLKSKLVSDFRKDFQFYKVREINNYHHAHDAYLNAVVGTALIKKYPKLESEFVYGDYKVYDVRKMIAKSEQEIGKATAKYFFYSNIMNFFKTEITLANGEIRKRPLIETNGETGEIVWDKGRDFATVRKVLSMPQVNIVKKTEVQTGGFSKESILPKRNSDKLIARKKDWDPKKYGGFDSPTVAYSVLVVAKVEKGKSKKLKSVKELLGITIMERSSFEKNPIDFLEAKGYKEVKKDLIIKLPKYSLFELENGRKRMLASAGELQKGNELALPSKYVNFLYLASHYEKLKGSPEDNEQKQLFVEQHKHYLDEIIEQISEFSKRVILADANLDKVLSAYNKHRDKPIREQAENIIHLFTLTNLGAPAAFKYFDTTIDRKRYTSTKEVLDATLIHQSITGLYETRIDLSQLGGDGGEAAAKEAAAKGGTLNLEDEYRLYETSAEPEVSPGSTWLSDFPQAWAETGGMGLAVRQAPLIIPLKATSTPVSIKQYPMSQEAKLGIKPHIQRLLDQGILVPCQSPWNTPLLPVKKPGTNDYRPVQDLREVNKRVEDIHPTVPNPYNLLSGLPPSHRWYTVLDLKDAFFCLRLHPTSQPLFAFEWRDPGMGISGQLTWTRLPQGFKNSPTLFNEALHRDLADFRIQHPDLILLQYVDDILLAATSELDCQQGTRALLLTLGNLGYRASAKKAQLCQKQVKYLGYLLKEGQRWLTEARKETVMGQPTPKTPRQLREFLGKAGFCRLFIPGFAEMAAPLYPLTKPGTLFNWGPDQQKAYQEIKQALLTAPALGLPDLTKPFELFVDEKQGYAKGVLTQKLGPWRRPVAYLSKKLDPVAAGWPPCLRMVAAIAVLRKDAGKLTMGQPLVILAPHAVEALVKQPPDRWLSNARMTHYQAMLLDTDRVQFGPVVALNPATLLPLPEEGAPHDCLEILAETHGTRPDLTDQPIPDADHTWYTDGSSFLQEGQRKAGAAVTTETEVIWARALPAGTSAQRAELIALTQALKMAEGKRLNVYTDSRYAFATAHIHGEIYRRRGWLTSEGREIKNKSEILALLKALFLPKRLSIIHCLGHQKGDSAEARGNRLADQAAREAAIKTPPDTSTLLAGKRTADGSEFEKRTADGSEFESPKKKAKVE

SEQ ID NO: 6378 - protein, 2095 aa, synthetic construct
MPAAKRVKLDGGDKKYSIGLDIGTNSVGWAVITDEYKVPSKKFKVLGNTDRHSIKKNLIGALLFDSGETAEATRLKRTARRRYTRRKNRICYLQEIFSNEMAKVDDSFFHRLEESFLVEEDKKHERHPIFGNIVDEVAYHEKYPTIYHLRKKLVDSTDKADLRLIYLALAHMIKFRGHFLIEGDLNPDNSDVDKLFIQLVQTYNQLFEENPINASGVDAKAILSARLSKSRRLENLIAQLPGEKKNGLFGNLIALSLGLTPNFKSNFDLAEDAKLQLSKDTYDDDLDNLLAQIGDQYADLFLAAKNLSDAILLSDILRVNTEITKAPLSASMIKRYDEHHQDLTLLKALVRQQLPEKYKEIFFDQSKNGYAGYIDGGASQEEFYKFIKPILEKMDGTEELLVKLNREDLLRKQRTFDNGSIPHQIHLGELHAILRRQEDFYPFLKDNREKIEKILTFRIPYYVGPLARGNSRFAWMTRKSEETITPWNFEEVVDKGASAQSFIERMTNFDKNLPNEKVLPKHSLLYEYFTVYNELTKVKYVTEGMRKPAFLSGEQKKAIVDLLFKTNRKVTVKQLKEDYFKKIECFDSVEISGVEDRFNASLGTYHDLLKIIKDKDFLDNEENEDILEDIVLTLTLFEDREMIEERLKTYAHLFDDKVMKQLKRRRYTGWGRLSRKLINGIRDKQSGKTILDFLKSDGFANRNFMQLIHDDSLTFKEDIQKAQVSGQGDSLHEHIANLAGSPAIKKGILQTVKVVDELVKVMGRHKPENIVIEMARENQTTQKGQKNSRERMKRIEEGIKELGSQILKEHPVENTQLQNEKLYLYYLQNGRDMYVDQELDINRLSDYDVDHIVPQSFLKDDSIDNKVLTRSDKARGKSDNVPSEEVVKKMKNYWRQLLNAKLITQRKFDNLTKAERGGLSELDKAGFIKRQLVETRQITKHVAQILDSRMNTKYDENDKLIREVKVITLKSKLVSDFRKDFQFYKVREINNYHHAHDAYLNAVVGTALIKKYPKLESEFVYGDYKVYDVRKMIAKSEQEIGKATAKYFFYSNIMNFFKTEITLANGEIRKRPLIETNGETGEIVWDKGRDFATVRKVLSMPQVNIVKKTEVQTGGFSKESILPKRNSDKLIARKKDWDPKKYGGFDSPTVAYSVLVVAKVEKGKSKKLKSVKELLGITIMERSSFEKNPIDFLEAKGYKEVKKDLIIKLPKYSLFELENGRKRMLASAGELQKGNELALPSKYVNFLYLASHYEKLKGSPEDNEQKQLFVEQHKHYLDEIIEQISEFSKRVILADANLDKVLSAYNKHRDKPIREQAENIIHLFTLTNLGAPAAFKYFDTTIDRKRYTSTKEVLDATLIHQSITGLYETRIDLSQLGGDGGEAAAKEAAAKGGTLGIEDEYRLHETSTEPDVSLGSTWLSDFPQAWAETGGMGLAVRQAPLIIPLKATSTPVSIQQYPMSHEARLGIKPHIQRLLDQGILVPCQSPWNTPLLPVKKPGTNDYRPVQDLREVNKRVEDIHPTVPNPYNLLSGLPPSHQWYTVLDLKDAFFCLRLHPTSQPLFAFEWRDPGMGISGQLTWTRLPQGFKNSPTLFNEALHRDLADFRIQHPDLILLQYVDDILLAATSELDCQQGTRALLQTLGDLGYRASAKKAQICQKQVKYLGYLLREGQRWLTEARKETVMGQPVPKTPRQLREFLGTAGFCRLWIPGFAEMAAPLYPLTKPGTLFSWGPDQQKAYQEIKQALLTAPALGLPDLTKPFELFVDEKQGYAKGVLTQKLGPWRRPVAYLSKKLDPVAAGWPPCLRMVAAIAVLTKDAGKLTMGQPLVILAPHAVEALVKQPPDRWLSNARMTHYQAMLLDTDRVQFGPVVALNPATLLPLPEEGAPHDCLEILAETHGTRPDLTDQPIPDADHTWYTDGSSFLQEGQRKAGAAVTTETEVIWAGALPAGTSAQRAELIALTQALKMAEGKRLNVYTDSRYAFATAHIHGEIYRRRGWLTSEGREIKNKSEILALLKALFLPKRLSIIHCLGHQKGDSAEARGNRLADQAAREAAIKTPPDTSTLLAGKRTADGSEFEKRTADGSEFESPKKKAKVE

SEQ ID NO: 6379 - protein, 2087 aa, synthetic construct
MPAAKRVKLDGGDKKYSIGLDIGTNSVGWAVITDEYKVPSKKFKVLGNTDRHSIKKNLIGALLFDSGETAEATRLKRTARRRYTRRKNRICYLQEIFSNEMAKVDDSFFHRLEESFLVEEDKKHERHPIFGNIVDEVAYHEKYPTIYHLRKKLVDSTDKADLRLIYLALAHMIKFRGHFLIEGDLNPDNSDVDKLFIQLVQTYNQLFEENPINASGVDAKAILSARLSKSRRLENLIAQLPGEKKNGLFGNLIALSLGLTPNFKSNFDLAEDAKLQLSKDTYDDDLDNLLAQIGDQYADLFLAAKNLSDAILLSDILRVNTEITKAPLSASMIKRYDEHHQDLTLLKALVRQQLPEKYKEIFFDQSKNGYAGYIDGGASQEEFYKFIKPILEKMDGTEELLVKLNREDLLRKQRTFDNGSIPHQIHLGELHAILRRQEDFYPFLKDNREKIEKILTFRIPYYVGPLARGNSRFAWMTRKSEETITPWNFEEVVDKGASAQSFIERMTNFDKNLPNEKVLPKHSLLYEYFTVYNELTKVKYVTEGMRKPAFLSGEQKKAIVDLLFKTNRKVTVKQLKEDYFKKIECFDSVEISGVEDRFNASLGTYHDLLKIIKDKDFLDNEENEDILEDIVLTLTLFEDREMIEERLKTYAHLFDDKVMKQLKRRRYTGWGRLSRKLINGIRDKQSGKTILDFLKSDGFANRNFMQLIHDDSLTFKEDIQKAQVSGQGDSLHEHIANLAGSPAIKKGILQTVKVVDELVKVMGRHKPENIVIEMARENQTTQKGQKNSRERMKRIEEGIKELGSQILKEHPVENTQLQNEKLYLYYLQNGRDMYVDQELDINRLSDYDVDHIVPQSFLKDDSIDNKVLTRSDKARGKSDNVPSEEVVKKMKNYWRQLLNAKLITQRKFDNLTKAERGGLSELDKAGFIKRQLVETRQITKHVAQILDSRMNTKYDENDKLIREVKVITLKSKLVSDFRKDFQFYKVREINNYHHAHDAYLNAVVGTALIKKYPKLESEFVYGDYKVYDVRKMIAKSEQEIGKATAKYFFYSNIMNFFKTEITLANGEIRKRPLIETNGETGEIVWDKGRDFATVRKVLSMPQVNIVKKTEVQTGGFSKESILPKRNSDKLIARKKDWDPKKYGGFDSPTVAYSVLVVAKVEKGKSKKLKSVKELLGITIMERSSFEKNPIDFLEAKGYKEVKKDLIIKLPKYSLFELENGRKRMLASAGELQKGNELALPSKYVNFLYLASHYEKLKGSPEDNEQKQLFVEQHKHYLDEIIEQISEFSKRVILADANLDKVLSAYNKHRDKPIREQAENIIHLFTLTNLGAPAAFKYFDTTIDRKRYTSTKEVLDATLIHQSITGLYETRIDLSQLGGDGGEAAAKEAAAKGGLDDEYRLYSPLVKPDQNIQFWLEQFPQAWAETAGMGLAKQVPPQVIQLKASATPVSVRQYPLSKEAQEGIRPHVQRLIQQGILVPVQSPWNTPLLPVRKPGTNDYRPVQDLREVNKRVQDIHPTVPNPYNLLCALPPQRSWYTVLDLKDAFFCLRLHPTSQPLFAFEWRDPGTGRTGQLTWTRLPQGFKNSPTIFNEALHRDLANFRIQHPQVTLLQYVDDLLLAGATKQDCLEGTKALLLELSDLGYRASAKKAQICRREVTYLGYSLRDGQRWLTEARKKTVVQIPAPTTAKQVREFLGKAGFCRLFIPGFATLAAPLYPLTKPKGEFSWAPEHQKAFDAIKKALLSAPALALPDVTKPFTLYVDERKGVARGVLTQTLGPWRRPVAYLSKKLDPVASGWPVCLKAIAAVAILVKDADKLTLGQNITVIAPHALENIVRQPPDRWMTNARMTHYQSLLLTERVTFAPPAALNPATLLPEETDEPVTHDCHQLLIEETGVRKDLTDIPLTGEVLTWFTDGSSYVVEGKRMAGAAVVDGTRTIWASSLPEGTSAQKAELMALTQALRLAEGKSINIYTDSRYAFATAHVHGAIYKQRGWLTSAGREIKNKEEILSLLEALHLPKRLAIIHCPGHQKAKDPISRGNQMADRVAKQAAQGVNLLPAGKRTADGSEFEKRTADGSEFESPKKKAKVE

SEQ ID NO: 6380 - protein, 2089 aa, synthetic construct
MPAAKRVKLDGGDKKYSIGLDIGTNSVGWAVITDEYKVPSKKFKVLGNTDRHSIKKNLIGALLFDSGETAEATRLKRTARRRYTRRKNRICYLQEIFSNEMAKVDDSFFHRLEESFLVEEDKKHERHPIFGNIVDEVAYHEKYPTIYHLRKKLVDSTDKADLRLIYLALAHMIKFRGHFLIEGDLNPDNSDVDKLFIQLVQTYNQLFEENPINASGVDAKAILSARLSKSRRLENLIAQLPGEKKNGLFGNLIALSLGLTPNFKSNFDLAEDAKLQLSKDTYDDDLDNLLAQIGDQYADLFLAAKNLSDAILLSDILRVNTEITKAPLSASMIKRYDEHHQDLTLLKALVRQQLPEKYKEIFFDQSKNGYAGYIDGGASQEEFYKFIKPILEKMDGTEELLVKLNREDLLRKQRTFDNGSIPHQIHLGELHAILRRQEDFYPFLKDNREKIEKILTFRIPYYVGPLARGNSRFAWMTRKSEETITPWNFEEVVDKGASAQSFIERMTNFDKNLPNEKVLPKHSLLYEYFTVYNELTKVKYVTEGMRKPAFLSGEQKKAIVDLLFKTNRKVTVKQLKEDYFKKIECFDSVEISGVEDRFNASLGTYHDLLKIIKDKDFLDNEENEDILEDIVLTLTLFEDREMIEERLKTYAHLFDDKVMKQLKRRRYTGWGRLSRKLINGIRDKQSGKTILDFLKSDGFANRNFMQLIHDDSLTFKEDIQKAQVSGQGDSLHEHIANLAGSPAIKKGILQTVKVVDELVKVMGRHKPENIVIEMARENQTTQKGQKNSRERMKRIEEGIKELGSQILKEHPVENTQLQNEKLYLYYLQNGRDMYVDQELDINRLSDYDVDHIVPQSFLKDDSIDNKVLTRSDKARGKSDNVPSEEVVKKMKNYWRQLLNAKLITQRKFDNLTKAERGGLSELDKAGFIKRQLVETRQITKHVAQILDSRMNTKYDENDKLIREVKVITLKSKLVSDFRKDFQFYKVREINNYHHAHDAYLNAVVGTALIKKYPKLESEFVYGDYKVYDVRKMIAKSEQEIGKATAKYFFYSNIMNFFKTEITLANGEIRKRPLIETNGETGEIVWDKGRDFATVRKVLSMPQVNIVKKTEVQTGGFSKESILPKRNSDKLIARKKDWDPKKYGGFDSPTVAYSVLVVAKVEKGKSKKLKSVKELLGITIMERSSFEKNPIDFLEAKGYKEVKKDLIIKLPKYSLFELENGRKRMLASAGELQKGNELALPSKYVNFLYLASHYEKLKGSPEDNEQKQLFVEQHKHYLDEIIEQISEFSKRVILADANLDKVLSAYNKHRDKPIREQAENIIHLFTLTNLGAPAAFKYFDTTIDRKRYTSTKEVLDATLIHQSITGLYETRIDLSQLGGDGGEAAAKEAAAKGGTLQLDDEYRLYSPLVKPDQNIQFWLEQFPQAWAETAGMGLAKQVPPQVIQLKASATPVSVRQYPLSKEAQEGIRPHVQRLIQQGILVPVQSPWNTPLLPVRKPGTNDYRPVQDLREVNKRVQDIHPTVPNPYNLLCALPPQRSWYTVLDLKDAFFCLRLHPTSQPLFAFEWRDPGTGRTGQLTWTRLPQGFKNSPTIFDEALHRDLANFRIQHPQVTLLQYVDDLLLAGATKQDCLEGTKALLLELSDLGYRASAKKAQICRREVTYLGYSLRDGQRWLTEARKKTVVQIPAPTTAKQVREFLGTAGFCRLWIPGFATLAAPLYPLTKEKGEFSWAPEHQKAFDAIKKALLSAPALALPDVTKPFTLYVDERKGVARGVLTQTLGPWRRPVAYLSKKLDPVASGWPVCLKAIAAVAILVKDADKLTLGQNITVIAPHALENIVRQPPDRWMTNARMTHYQSLLLTERVTFAPPAALNPATLLPEETDEPVTHDCHQLLIEETGVRKDLTDIPLTGEVLTWFTDGSSYVVEGKRMAGAAVVDGTRTIWASSLPEGTSAQKAELMALTQALRLAEGKSINIYTDSRYAFATAHVHGAIYKQRGLLTSAGREIKNKEEILSLLEALHLPKRLAIIHCPGHQKAKDPISRGNQMADRVAKQAAQGVNLLAGKRTADGSEFEKRTADGSEFESPKKKAKVE

SEQ ID NO: 6381 - protein, 2087 aa, synthetic construct; identical to SEQ ID NO: 6379

SEQ ID NO: 6382 - protein, 2175 aa, synthetic construct
MPAAKRVKLDGGDKKYSIGLDIGTNSVGWAVITDEYKVPSKKFKVLGNTDRHSIKKNLIGALLFDSGETAEATRLKRTARRRYTRRKNRICYLQEIFSNEMAKVDDSFFHRLEESFLVEEDKKHERHPIFGNIVDEVAYHEKYPTIYHLRKKLVDSTDKADLRLIYLALAHMIKFRGHFLIEGDLNPDNSDVDKLFIQLVQTYNQLFEENPINASGVDAKAILSARLSKSRRLENLIAQLPGEKKNGLFGNLIALSLGLTPNFKSNFDLAEDAKLQLSKDTYDDDLDNLLAQIGDQYADLFLAAKNLSDAILLSDILRVNTEITKAPLSASMIKRYDEHHQDLTLLKALVRQQLPEKYKEIFFDQSKNGYAGYIDGGASQEEFYKFIKPILEKMDGTEELLVKLNREDLLRKQRTFDNGSIPHQIHLGELHAILRRQEDFYPFLKDNREKIEKILTFRIPYYVGPLARGNSRFAWMTRKSEETITPWNFEEVVDKGASAQSFIERMTNFDKNLPNEKVLPKHSLLYEYFTVYNELTKVKYVTEGMRKPAFLSGEQKKAIVDLLFKTNRKVTVKQLKEDYFKKIECFDSVEISGVEDRFNASLGTYHDLLKIIKDKDFLDNEENEDILEDIVLTLTLFEDREMIEERLKTYAHLFDDKVMKQLKRRRYTGWGRLSRKLINGIRDKQSGKTILDFLKSDGFANRNFMQLIHDDSLTFKEDIQKAQVSGQGDSLHEHIANLAGSPAIKKGILQTVKVVDELVKVMGRHKPENIVIEMARENQTTQKGQKNSRERMKRIEEGIKELGSQILKEHPVENTQLQNEKLYLYYLQNGRDMYVDQELDINRLSDYDVDHIVPQSFLKDDSIDNKVLTRSDKARGKSDNVPSEEVVKKMKNYWRQLLNAKLITQRKFDNLTKAERGGLSELDKAGFIKRQLVETRQITKHVAQILDSRMNTKYDENDKLIREVKVITLKSKLVSDFRKDFQFYKVREINNYHHAHDAYLNAVVGTALIKKYPKLESEFVYGDYKVYDVRKMIAKSEQEIGKATAKYFFYSNIMNFFKTEITLANGEIRKRPLIETNGETGEIVWDKGRDFATVRKVLSMPQVNIVKKTEVQTGGFSKESILPKRNSDKLIARKKDWDPKKYGGFDSPTVAYSVLVVAKVEKGKSKKLKSVKELLGITIMERSSFEKNPIDFLEAKGYKEVKKDLIIKLPKYSLFELENGRKRMLASAGELQKGNELALPSKYVNFLYLASHYEKLKGSPEDNEQKQLFVEQHKHYLDEIIEQISEFSKRVILADANLDKVLSAYNKHRDKPIREQAENIIHLFTLTNLGAPAAFKYFDTTIDRKRYTSTKEVLDATLIHQSITGLYETRIDLSQLGGDGGEAAAKEAAAKGGMDPLQLLQPLEAEIKGTKLKAHWNSGATITCVPQAFLEEEVPIKNIWIKTIHGEKEQPVYYLTFKIQGRKVEAEVISSPYDYILVSPSDIPWLMKKPLQLTTLVPLQEYEERLLKQTMLTGSYKEKLQSLFLKYDALWQHWENQVGHRRIKPHHIATGTVNPRPQKQYPINPKAKASIQTVINDLLKQGVLIQQNSIMNTPVYPVPKPDGKWRMVLDYREVNKTIPLIAAQNQHSAGILSSIFRGKYKTTLDLSNGFWAHSITPESYWLTAFTWLGQQYCWTRLPQGFLNSPALFNADVVDLLKEVPNVQVYVDDIYISHDDPREHLEQLEKVFSLLLNAGYVVSLKKSEIAQHEVEFLGFNITKEGRGLTETFKQKLLNITPPRDLKQLQSILGKLNFARNFIPNFSELVKPLYNIIATAPGKYITWTTDNSQQLQNIISMLNSAENLEERNPEVRLIMKVNTSPSAGYIRFYNEFAKRPIMYLNYVYTKAEVKFTNTEKLLTTIHKGLIKALDLGMGQEILVYSPIVSMTKIQKTPLPERKALPIRWITWMSYLEDPRIQFHYDKTLPELQQVPTVTDDIIAKIKHPSEFSMVFYTDGSAIKHPNVNKSHNAGMGIAQVQFKPEFTVINTWSIPLGDHTAQLAEVAAVEFACKKALKIDGPVLIVTDSFYVAESVNKELPYWQSNGFFNNKKKPLKHVSKWKSIADCIQLKPDIIIIHEKGHQPTASTFHTEGNNLADKLATQGSYVVNAGKRTADGSEFEKRTADGSEFESPKKKAKVE

SEQ ID NO: 6383 - protein, 2095 aa, synthetic construct
MPAAKRVKLDGGDKKYSIGLDIGTNSVGWAVITDEYKVPSKKFKVLGNTDRHSIKKNLIGALLFDSGETAEATRLKRTARRRYTRRKNRICYLQEIFSNEMAKVDDSFFHRLEESFLVEEDKKHERHPIFGNIVDEVAYHEKYPTIYHLRKKLVDSTDKADLRLIYLALAHMIKFRGHFLIEGDLNPDNSDVDKLFIQLVQTYNQLFEENPINASGVDAKAILSARLSKSRRLENLIAQLPGEKKNGLFGNLIALSLGLTPNFKSNFDLAEDAKLQLSKDTYDDDLDNLLAQIGDQYADLFLAAKNLSDAILLSDILRVNTEITKAPLSASMIKRYDEHHQDLTLLKALVRQQLPEKYKEIFFDQSKNGYAGYIDGGASQEEFYKFIKPILEKMDGTEELLVKLNREDLLRKQRTFDNGSIPHQIHLGELHAILRRQEDFYPFLKDNREKIEKILTFRIPYYVGPLARGNSRFAWMTRKSEETITPWNFEEVVDKGASAQSFIERMTNFDKNLPNEKVLPKHSLLYEYFTVYNELTKVKYVTEGMRKPAFLSGEQKKAIVDLLFKTNRKVTVKQLKEDYFKKIECFDSVEISGVEDRFNASLGTYHDLLKIIKDKDFLDNEENEDILEDIVLTLTLFEDREMIEERLKTYAHLFDDKVMKQLKRRRYTGWGRLSRKLINGIRDKQSGKTILDFLKSDGFANRNFMQLIHDDSLTFKEDIQKAQVSGQGDSLHEHIANLAGSPAIKKGILQTVKVVDELVKVMGRHKPENIVIEMARENQTTQKGQKNSRERMKRIEEGIKELGSQILKEHPVENTQLQNEKLYLYYLQNGRDMYVDQELDINRLSDYDVDHIVPQSFLKDDSIDNKVLTRSDKARGKSDNVPSEEVVKKMKNYWRQLLNAKLITQRKFDNLTKAERGGLSELDKAGFIKRQLVETRQITKHVAQILDSRMNTKYDENDKLIREVKVITLKSKLVSDFRKDFQFYKVREINNYHHAHDAYLNAVVGTALIKKYPKLESEFVYGDYKVYDVRKMIAKSEQEIGKATAKYFFYSNIMNFFKTEITLANGEIRKRPLIETNGETGEIVWDKGRDFATVRKVLSMPQVNIVKKTEVQTGGFSKESILPKRNSDKLIARKKDWDPKKYGGFDSPTVAYSVLVVAKVEKGKSKKLKSVKELLGITIMERSSFEKNPIDFLEAKGYKEVKKDLIIKLPKYSLFELENGRKRMLASAGELQKGNELALPSKYVNFLYLASHYEKLKGSPEDNEQKQLFVEQHKHYLDEIIEQISEFSKRVILADANLDKVLSAYNKHRDKPIREQAENIIHLFTLTNLGAPAAFKYFDTTIDRKRYTSTKEVLDATLIHQSITGLYETRIDLSQLGGDGGEAAAKEAAAKGGTLNIEDEYRLHETSKEPDVPLGSTWLSDFPQAWAETGGMGLAVRQAPLIIPLKATSTPVSIKQYPMSQEARLGIKPHIQRLLDQGILVPCQSPWNTPLLPVKKPGTNDYRPVQDLREVNKRVEDIHPTVPNPYNLLSGLPPSHQWYTVLDLKDAFFCLRLHPTSQPLFAFEWRDPEMGISGQLTWTRLPQGFKNSPTLFNEALHRDLADFRIQHPDLILLQYVDDLLLAATSEQDCQRGTRALLQTLGNLGYRASAKKAQICQKQVKYLGYLLKEGQRWLTEARKETVMGQPTPKTPRQLREFLGKAGFCRLFIPGFAEMAAPLYPLTKPGTLFNWGPDQQKAYQEIKQALLTAPALGLPDLTKPFELFVDEKQGYAKGVLTQKLGPWRRPVAYLSKKLDPVAAGWPPCLRMVAAIAVLTKDAGKLTMGQPLVILAPHAVEALVKQPPDRWLSNARMTHYQAMLLDTDRVQFGPVVALNPATLLPLPEKEAPHDCLEILAETHGTRPDLTDQPIPDADYTWYTDGSSFLQEGQRRAGAAVTTETEVIWARALPAGTSAQRAELIALTQALKMAEGKKLNVYTDSRYAFATAHVHGEIYRRRGWLTSEGREIKNKNEILALLKALFLPKRLSIIHCPGHQKGNSAEARGNRMADQAAREAAMKAVLETSTLLAGKRTADGSEFEKRTADGSEFESPKKKAKVE

SEQ ID NO: 6384 - protein, 2102 aa, synthetic construct
MPAAKRVKLDGGDKKYSIGLDIGTNSVGWAVITDEYKVPSKKFKVLGNTDRHSIKKNLIGALLFDSGETAEATRLKRTARRRYTRRKNRICYLQEIFSNEMAKVDDSFFHRLEESFLVEEDKKHERHPIFGNIVDEVAYHEKYPTIYHLRKKLVDSTDKADLRLIYLALAHMIKFRGHFLIEGDLNPDNSDVDKLFIQLVQTYNQLFEENPINASGVDAKAILSARLSKSRRLENLIAQLPGEKKNGLFGNLIALSLGLTPNFKSNFDLAEDAKLQLSKDTYDDDLDNLLAQIGDQYADLFLAAKNLSDAILLSDILRVNTEITKAPLSASMIKRYDEHHQDLTLLKALVRQQLPEKYKEIFFDQSKNGYAGYIDGGASQEEFYKFIKPILEKMDGTEELLVKLNREDLLRKQRTFDNGSIPHQIHLGELHAILRRQEDFYPFLKDNREKIEKILTFRIPYYVGPLARGNSRFAWMTRKSEETITPWNFEEVVDKGASAQSFIERMTNFDKNLPNEKVLPKHSLLYEYFTVYNELTKVKYVTEGMRKPAFLSGEQKKAIVDLLFKTNRKVTVKQLKEDYFKKIECFDSVEISGVEDRFNASLGTYHDLLKIIKDKDFLDNEENEDILEDIVLTLTLFEDREMIEERLKTYAHLFDDKVMKQLKRRRYTGWGRLSRKLINGIRDKQSGKTILDFLKSDGFANRNFMQLIHDDSLTFKEDIQKAQVSGQGDSLHEHIANLAGSPAIKKGILQTVKVVDELVKVMGRHKPENIVIEMARENQTTQKGQKNSRERMKRIEEGIKELGSQILKEHPVENTQLQNEKLYLYYLQNGRDMYVDQELDINRLSDYDVDHIVPQSFLKDDSIDNKVLTRSDKARGKSDNVPSEEVVKKMKNYWRQLLNAKLITQRKFDNLTKAERGGLSELDKAGFIKRQLVETRQITKHVAQILDSRMNTKYDENDKLIREVKVITLKSKLVSDFRKDFQFYKVREINNYHHAHDAYLNAVVGTALIKKYPKLESEFVYGDYKVYDVRKMIAKSEQEIGKATAKYFFYSNIMNFFKTEITLANGEIRKRPLIETNGETGEIVWDKGRDFATVRKVLSMPQVNIVKKTEVQTGGFSKESILPKRNSDKLIARKKDWDPKKYGGFDSPTVAYSVLVVAKVEKGKSKKLKSVKELLGITIMERSSFEKNPIDFLEAKGYKEVKKDLIIKLPKYSLFELENGRKRMLASAGELQKGNELALPSKYVNFLYLASHYEKLKGSPEDNEQKQLFVEQHKHYLDEIIEQISEFSKRVILADANLDKVLSAYNKHRDKPIREQAENIIHLFTLTNLGAPAAFKYFDTTIDRKRYTSTKEVLDATLIHQSITGLYETRIDLSQLGGDGGEAAAKEAAAKEAAAKGGTAPLEEEYRLFLEAPIQNVTLLEQWKREIPKVWAEINPPGLASTQAPIHVQLLSTALPVRVRQYPITLEAKRSLRETIRKFRAAGILRPVHSPWNTPLLPVRKSGTSEYRMVQDLREVNKRVETIHPTVPNPYTLLSLLPPDRIWYSVLDLKDAFFCIPLAPESQLIFAFEWADAEEGESGQLTWTRLPQGFKNSPTLFNEALNRDLQGFRLDHPSVSLLQYVDDLLIAADTQAACLSATRDLLMTLAELGYRVSGKKAQLCQEEVTYLGFKIHKGSRSLSNSRTQAILQIPVPKTKRQVREFLGTIGYCRLWIPGFAELAQPLYAATRPGNDPLVWGEKEEEAFQSLKLALTQPPALALPSLDKPFQLFVEETSGAAKGVLTQALGPWKRPVAYLSKRLDPVAAGWPRCLRAIAAAALLTREASKLTFGQDIEITSSHNLESLLRSPPDKWLTNARITQYQVLLLDPPRVRFKQTAALNPATLLPETDDTLPIHHCLDTLDSLTSTRPDLTDQPLAQAEATLFTDGSSYIRDGKRYAGAAVVTLDSVIWAEPLPIGTSAQKAELIALTKALEWSKDKSVNIYTDSRYAFATLHVHGMIYRERGWLTAGGKAIKNAPEILALLTAVWLPKRVAVMHCKGHQKDDAPTSTGNRRADEVAREVAIRPLSTQATISAGKRTADGSEFEKRTADGSEFESPKKKAKVE

SEQ ID NO: 6385 - protein, 2102 aa, synthetic construct
MPAAKRVKLDGGDKKYSIGLDIGTNSVGWAVITDEYKVPSKKFKVLGNTDRHSIKKNLIGALLFDSGETAEATRLKRTARRRYTRRKNRICYLQEIFSNEMAKVDDSFFHRLEESFLVEEDKKHERHPIFGNIVDEVAYHEKYPTIYHLRKKLVDSTDKADLRLIYLALAHMIKFRGHFLIEGDLNPDNSDVDKLFIQLVQTYNQLFEENPINASGVDAKAILSARLSKSRRLENLIAQLPGEKKNGLFGNLIALSLGLTPNFKSNFDLAEDAKLQLSKDTYDDDLDNLLAQIGDQYADLFLAAKNLSDAILLSDILRVNTEITKAPLSASMIKRYDEHHQDLTLLKALVRQQLPEKYKEIFFDQSKNGYAGYIDGGASQEEFYKFIKPILEKMDGTEELLVKLNREDLLRKQRTFDNGSIPHQIHLGELHAILRRQEDFYPFLKDNREKIEKILTFRIPYYVGPLARGNSRFAWMTRKSEETITPWNFEEVVDKGASAQSFIERMTNFDKNLPNEKVLPKHSLLYEYFTVYNELTKVKYVTEGMRKPAFLSGEQKKAIVDLLFKTNRKVTVKQLKEDYFKKIECFDSVEISGVEDRFNASLGTYHDLLKIIKDKDFLDNEENEDILEDIVLTLTLFEDREMIEERLKTYAHLFDDKVMKQLKRRRYTGWGRLSRKLINGIRDKQSGKTILDFLKSDGFANRNFMQLIHDDSLTFKEDIQKAQVSGQGDSLHEHIANLAGSPAIKKGILQTVKVVDELVKVMGRHKPENIVIEMARENQTTQKGQKNSRERMKRIEEGIKELGSQILKEHPVENTQLQNEKLYLYYLQNGRDMYVDQELDINRLSDYDVDHIVPQSFLKDDSIDNKVLTRSDKARGKSDNVPSEEVVKKMKNYWRQLLNAKLITQRKFDNLTKAERGGLSELDKAGFIKRQLVETRQITKHVAQILDSRMNTKYDENDKLIREVKVITLKSKLVSDFRKDFQFYKVREINNYHHAHDAYLNAVVGTALIKKYPKLESEFVYGDYKVYDVRKMIAKSEQEIGKATAKYFFYSNIMNFFKTEITLANGEIRKRPLIETNGETGEIVWDKGRDFATVRKVLSMPQVNIVKKTEVQTGGFSKESILPKRNSDKLIARKKDWDPKKYGGFDSPTVAYSVLVVAKVEKGKSKKLKSVKELLGITIMERSSFEKNPIDFLEAKGYKEVKKDLIIKLPKYSLFELENGRKRMLASAGELQKGNELALPSKYVNFLYLASHYEKLKGSPEDNEQKQLFVEQHKHYLDEIIEQISEFSKRVILADANLDKVLSAYNKHRDKPIREQAENIIHLFTLTNLGAPAAFKYFDTTIDRKRYTSTKEVLDATLIHQSITGLYETRIDLSQLGGDGGEAAAKEAAAKEAAAKGGTAPLEEEYRLFLEAPIQNVTLLEQWKREIPKVWAEINPPGLASTQAPIHVQLLSTALPVRVRQYPITLEAKRSLRETIRKFRAAGILRPVHSPWNTPLLPVRKSGTSEYRMVQDLREVNKRVETIHPTVPNPYTLLSLLPPDRIWYSVLDLKDAFFCIPLAPESQLIFAFEWADAEEGESGQLTWTRLPQGFKNSPTLFNEALNRDLQGFRLDHPSVSLLQYVDDLLIAADTQAACLSATRDLLMTLAELGYRVSGKKAQLCQEEVTYLGFKIHKGSRSLSNSRTQAILQIPVPKTKRQVREFLGKIGYCRLFIPGFAELAQPLYAATRPGNDPLVWGEKEEEAFQSLKLALTQPPALALPSLDKPFQLFVEETSGAAKGVLTQALGPWKRPVAYLSKRLDPVAAGWPRCLRAIAAAALLTREASKLTFGQDIEITSSHNLESLLRSPPDKWLTNARITQYQVLLLDPPRVRFKQTAALNPATLLPETDDTLPIHHCLDTLDSLTSTRPDLTDQPLAQAEATLFTDGSSYIRDGKRYAGAAVVTLDSVIWAEPLPIGTSAQKAELIALTKALEWSKDKSVNIYTDSRYAFATLHVHGMIYRERGWLTAGGKAIKNAPEILALLTAVWLPKRVAVMHCKGHQKDDAPTSTGNRRADEVAREVAIRPLSTQATISAGKRTADGSEFEKRTADGSEFESPKKKAKVE

SEQ ID NO: 6386 - protein, 2106 aa, synthetic construct
MPAAKRVKLDGGDKKYSIGLDIGTNSVGWAVITDEYKVPSKKFKVLGNTDRHSIKKNLIGALLFDSGETAEATRLKRTARRRYTRRKNRICYLQEIFSNEMAKVDDSFFHRLEESFLVEEDKKHERHPIFGNIVDEVAYHEKYPTIYHLRKKLVDSTDKADLRLIYLALAHMIKFRGHFLIEGDLNPDNSDVDKLFIQLVQTYNQLFEENPINASGVDAKAILSARLSKSRRLENLIAQLPGEKKNGLFGNLIALSLGLTPNFKSNFDLAEDAKLQLSKDTYDDDLDNLLAQIGDQYADLFLAAKNLSDAILLSDILRVNTEITKAPLSASMIKRYDEHHQDLTLLKALVRQQLPEKYKEIFFDQSKNGYAGYIDGGASQEEFYKFIKPILEKMDGTEELLVKLNREDLLRKQRTFDNGSIPHQIHLGELHAILRRQEDFYPFLKDNREKIEKILTFRIPYYVGPLARGNSRFAWMTRKSEETITPWNFEEVVDKGASAQSFIERMTNFDKNLPNEKVLPKHSLLYEYFTVYNELTKVKYVTEGMRKPAFLSGEQKKAIVDLLFKTNRKVTVKQLKEDYFKKIECFDSVEISGVEDRFNASLGTYHDLLKIIKDKDFLDNEENEDILEDIVLTLTLFEDREMIEERLKTYAHLFDDKVMKQLKRRRYTGWGRLSRKLINGIRDKQSGKTILDFLKSDGFANRNFMQLIHDDSLTFKEDIQKAQVSGQGDSLHEHIANLAGSPAIKKGILQTVKVVDELVKVMGRHKPENIVIEMARENQTTQKGQKNSRERMKRIEEGIKELGSQILKEHPVENTQLQNEKLYLYYLQNGRDMYVDQELDINRLSDYDVDHIVPQSFLKDDSIDNKVLTRSDKARGKSDNVPSEEVVKKMKNYWRQLLNAKLITQRKFDNLTKAERGGLSELDKAGFIKRQLVETRQITKHVAQILDSRMNTKYDENDKLIREVKVITLKSKLVSDFRKDFQFYKVREINNYHHAHDAYLNAVVGTALIKKYPKLESEFVYGDYKVYDVRKMIAKSEQEIGKATAKYFFYSNIMNFFKTEITLANGEIRKRPLIETNGETGEIVWDKGRDFATVRKVLSMPQVNIVKKTEVQTGGFSKESILPKRNSDKLIARKKDWDPKKYGGFDSPTVAYSVLVVAKVEKGKSKKLKSVKELLGITIMERSSFEKNPIDFLEAKGYKEVKKDLIIKLPKYSLFELENGRKRMLASAGELQKGNELALPSKYVNFLYLASHYEKLKGSPEDNEQKQLFVEQHKHYLDEIIEQISEFSKRVILADANLDKVLSAYNKHRDKPIREQAENIIHLFTLTNLGAPAAFKYFDTTIDRKRYTSTKEVLDATLIHQSITGLYETRIDLSQLGGDGGEAAAKEAAAKEAAAKGGTVSLQDEHRLFDIPVTTSLPDVWLQDFPQAWAETGGLGRAKCQAPIIIDLKPTAVPVSIKQYPMSLEAHMGIRQHIIKFLELGVLRPCRSPWNTPLLPVKKPGTQDYRPVQDLREINKRTVDIHPTVPNPYNLLSTLKPDYSWYTVLDLKDAFFCLPLAPQSQELFAFEWKDPERGISGQLTWTRLPQGFKNSPTLFNEALHRDLTDFRTQHPEVTLLQYVDDLLLAAPTKKACTQGTRHLLQELGEKGYRASAKKAQICQTKVTYLGYILSEGKRWLTPGRIETVARIPPPRNPREVREFLGTAGFCRLWIPGFAELAAPLYALTKPSTPFTWQTEHQLAFEALKKALLSAPALGLPDTSKPFTLFLDERQGIAKGVLTQKLGPWKRPVAYLSKKLDPVAAGWPPCLRIMAATAMLVKDSAKLTLGQPLTVITPHTLEAIVRQPPDRWITNARLTHYQALLLDTDRVQFGPPVTLNPATLLPVPENQPSPHDCRQVLAETHGTREDLKDQELPDADHTWYTDGSSYLDSGTRRAGAAVVDGHNTIWAQSLPPGTSAQKAELIALTKALELSKGKKANIYTDSRYAFATAHTHGSIYERRGWLTSEGKEIKNKAEIIALLKALFLPQEVAIIHCPGHQKGQDPVAVGNRQADRVARQAAMAEVLTLATEPDNTSHITAGKRTADGSEFEKRTADGSEFESPKKKAKVE

SEQ ID NO: 6387 - protein, 2091 aa, synthetic construct
MPAAKRVKLDGGDKKYSIGLDIGTNSVGWAVITDEYKVPSKKFKVLGNTDRHSIKKNLIGALLFDSGETAEATRLKRTARRRYTRRKNRICYLQEIFSNEMAKVDDSFFHRLEESFLVEEDKKHERHPIFGNIVDEVAYHEKYPTIYHLRKKLVDSTDKADLRLIYLALAHMIKFRGHFLIEGDLNPDNSDVDKLFIQLVQTYNQLFEENPINASGVDAKAILSARLSKSRRLENLIAQLPGEKKNGLFGNLIALSLGLTPNFKSNFDLAEDAKLQLSKDTYDDDLDNLLAQIGDQYADLFLAAKNLSDAILLSDILRVNTEITKAPLSASMIKRYDEHHQDLTLLKALVRQQLPEKYKEIFFDQSKNGYAGYIDGGASQEEFYKFIKPILEKMDGTEELLVKLNREDLLRKQRTFDNGSIPHQIHLGELHAILRRQEDFYPFLKDNREKIEKILTFRIPYYVGPLARGNSRFAWMTRKSEETITPWNFEEVVDKGASAQSFIERMTNFDKNLPNEKVLPKHSLLYEYFTVYNELTKVKYVTEGMRKPAFLSGEQKKAIVDLLFKTNRKVTVKQLKEDYFKKIECFDSVEISGVEDRFNASLGTYHDLLKIIKDKDFLDNEENEDILEDIVLTLTLFEDREMIEERLKTYAHLFDDKVMKQLKRRRYTGWGRLSRKLINGIRDKQSGKTILDFLKSDGFANRNFMQLIHDDSLTFKEDIQKAQVSGQGDSLHEHIANLAGSPAIKKGILQTVKVVDELVKVMGRHKPENIVIEMARENQTTQKGQKNSRERMKRIEEGIKELGSQILKEHPVENTQLQNEKLYLYYLQNGRDMYVDQELDINRLSDYDVDHIVPQSFLKDDSIDNKVLTRSDKARGKSDNVPSEEVVKKMKNYWRQLLNAKLITQRKFDNLTKAERGGLSELDKAGFIKRQLVETRQITKHVAQILDSRMNTKYDENDKLIREVKVITLKSKLVSDFRKDFQFYKVREINNYHHAHDAYLNAVVGTALIKKYPKLESEFVYGDYKVYDVRKMIAKSEQEIGKATAKYFFYSNIMNFFKTEITLANGEIRKRPLIETNGETGEIVWDKGRDFATVRKVLSMPQVNIVKKTEVQTGGFSKESILPKRNSDKLIARKKDWDPKKYGGFDSPTVAYSVLVVAKVEKGKSKKLKSVKELLGITIMERSSFEKNPIDFLEAKGYKEVKKDLIIKLPKYSLFELENGRKRMLASAGELQKGNELALPSKYVNFLYLASHYEKLKGSPEDNEQKQLFVEQHKHYLDEIIEQISEFSKRVILADANLDKVLSAYNKHRDKPIREQAENIIHLFTLTNLGAPAAFKYFDTTIDRKRYTSTKEVLDATLIHQSITGLYETRIDLSQLGGDGGEAAAKEAAAKEAAAKGGVPWILKKPLELTIKLDLEEQQGTLLNNSILSKKGKEELKQLFEKYSALWQSWENQVGHRRIRPHKIATGTVKPTPQKQYHINPKAKPDIQIVINDLLKQGVLIQKESTMNTPVYPVPKPNGRWRMVLDYRAVNKVTPLIAVQNQHSYGILGSLFKGRYKTTIDLSNGFWAHPIVPEDYWITAFTWQGKQYCWTVLPQGFLNSPGLFTGDVVDLLQGIPNVEVYVDDVYISHDSEKEHLEYLDILFNRLKEAGYIISLKKSNIANSIVDFLGFQITNEGRGLTDTFKEKLENITAPTTLKQLQSILGLLNFARNFIPDFTELIAPLYALIPKSTKNYVPWQIEHSTTLETLITKLNGAEYLQGRKGDKTLIMKVNASYTTGYIRYYNEGEKKPISYVSIVFSKTELKFTELEKLLTTVHKGLLKALDLSMGQNIHVYSPIVSMQNIQKTPQTAKKALASRWLSWLSYLEDPRIRFFYDPQMPALKDLPAVDTGKDNKKHPSNFQHIFYTDGSAITSPTKEGHLNAGMGIVYFINKDGNLQKQQEWSISLGNHTAQFAEIAAFEFALKKCLPLGGNILVVTDSNYVAKAYNEELDVWASNGFVNNRKKPLKHISKWKSVADLKRLRPDVVVTHEPGHQKLDSSPHAYGNNLADQLATQASFKVHAGKRTADGSEFEKRTADGSEFESPKKKAKVE

SEQ ID NO: 6388 - protein, 2091 aa, synthetic construct
MPAAKRVKLDGGDKKYSIGLDIGTNSVGWAVITDEYKVPSKKFKVLGNTDRHSIKKNLIGALLFDSGETAEATRLKRTARRRYTRRKNRICYLQEIFSNEMAKVDDSFFHRLEESFLVEEDKKHERHPIFGNIVDEVAYHEKYPTIYHLRKKLVDSTDKADLRLIYLALAHMIKFRGHFLIEGDLNPDNSDVDKLFIQLVQTYNQLFEENPINASGVDAKAILSARLSKSRRLENLIAQLPGEKKNGLFGNLIALSLGLTPNFKSNFDLAEDAKLQLSKDTYDDDLDNLLAQIGDQYADLFLAAKNLSDAILLSDILRVNTEITKAPLSASMIKRYDEHHQDLTLLKALVRQQLPEKYKEIFFDQSKNGYAGYIDGGASQEEFYKFIKPILEKMDGTEELLVKLNREDLLRKQRTFDNGSIPHQIHLGELHAILRRQEDFYPFLKDNREKIEKILTFRIPYYVGPLARGNSRFAWMTRKSEETITPWNFEEVVDKGASAQSFIERMTNFDKNLPNEKVLPKHSLLYEYFTVYNELTKVKYVTEGMRKPAFLSGEQKKAIVDLLFKTNRKVTVKQLKEDYFKKIECFDSVEISGVEDRFNASLGTYHDLLKIIKDKDFLDNEENEDILEDIVLTLTLFEDREMIEERLKTYAHLFDDKVMKQLKRRRYTGWGRLSRKLINGIRDKQSGKTILDFLKSDGFANRNFMQLIHDDSLTFKEDIQKAQVSGQGDSLHEHIANLAGSPAIKKGILQTVKVVDELVKVMGRHKPENIVIEMARENQTTQKGQKNSRERMKRIEEGIKELGSQILKEHPVENTQLQNEKLYLYYLQNGRDMYVDQELDINRLSDYDVDHIVPQSFLKDDSIDNKVLTRSDKARGKSDNVPSEEVVKKMKNYWRQLLNAKLITQRKFDNLTKAERGGLSELDKAGFIKRQLVETRQITKHVAQILDSRMNTKYDENDKLIREVKVITLKSKLVSDFRKDFQFYKVREINNYHHAHDAYLNAVVGTALIKKYPKLESEFVYGDYKVYDVRKMIAKSEQEIGKATAKYFFYSNIMNFFKTEITLANGEIRKRPLIETNGETGEIVWDKGRDFATVRKVLSMPQVNIVKKTEVQTGGFSKESILPKRNSDKLIARKKDWDPKKYGGFDSPTVAYSVLVVAKVEKGKSKKLKSVKELLGITIMERSSFEKNPIDFLEAKGYKEVKKDLIIKLPKYSLFELENGRKRMLASAGELQKGNELALPSKYVNFLYLASHYEKLKGSPEDNEQKQLFVEQHKHYLDEIIEQISEFSKRVILADANLDKVLSAYNKHRDKPIREQAENIIHLFTLTNLGAPAAFKYFDTTIDRKRYTSTKEVLDATLIHQSITGLYETRIDLSQLGGDGGEAAAKEAAAKEAAAKGGVPWLTQQPLQLTILVPLQEYQEKILSKTALPEDQKQQLKTLFVKYDNLWQHWENQVGHRKIRPHNIATGDYPPRPQKQYPINPKAKPSIQIVIDDLLKQGVLTPQNSTMNTPVYPVPKPDGRWRMVLDYREVNKTIPLTAAQNQHSAGILATIVRQKYKTTLDLANGFWAHPITPESYWLTAFTWQGKQYCWTRLPQGFLNSPALFNADVVDLLKEIPNVQVYVDDIYLSHDDPKEHVQQLEKVFQILLQAGYVVSLKKSEIGQKTVEFLGFNITKEGRGLTDTFKTKLLNITPPKDLKQLQSILGLLNFARNFIPNFAELVQPLYNLIAPAKGKYIEWSEENTKQLNMVIEALNTASNLEERLPEQRLVIKVNTSPSAGYVRYYNETGKKPIMYLNYVFSKAELKFSMLEKLLTTMHKALIKAMDLAMGQEILVYSPIVSMTKIQKTPLPERKALPIRWITWMTYLEDPRIQFHYDKTLPELKHIPDVYTSSQSPVKHPSQYEGVFYTDGSAIKSPDPTKSNNAGMGIVHATYKPEYQVLNQWSIPLGNHTAQMAEIAAVEFACKKALKIPGPVLVITDSFYVAESANKELPYWKSNGFVNNKKKPLKHISKWKSIAECLSMKPDITIQHEKGISLQIPVFILKGNALADKLATQGSYVVNAGKRTADGSEFEKRTADGSEFESPKKKAKVE

SEQ ID NO: 6389 - protein, 2091 aa, synthetic construct
MPAAKRVKLDGGDKKYSIGLDIGTNSVGWAVITDEYKVPSKKFKVLGNTDRHSIKKNLIGALLFDSGETAEATRLKRTARRRYTRRKNRICYLQEIFSNEMAKVDDSFFHRLEESFLVEEDKKHERHPIFGNIVDEVAYHEKYPTIYHLRKKLVDSTDKADLRLIYLALAHMIKFRGHFLIEGDLNPDNSDVDKLFIQLVQTYNQLFEENPINASGVDAKAILSARLSKSRRLENLIAQLPGEKKNGLFGNLIALSLGLTPNFKSNFDLAEDAKLQLSKDTYDDDLDNLLAQIGDQYADLFLAAKNLSDAILLSDILRVNTEITKAPLSASMIKRYDEHHQDLTLLKALVRQQLPEKYKEIFFDQSKNGYAGYIDGGASQEEFYKFIKPILEKMDGTEELLVKLNREDLLRKQRTFDNGSIPHQIHLGELHAILRRQEDFYPFLKDNREKIEKILTFRIPYYVGPLARGNSRFAWMTRKSEETITPWNFEEVVDKGASAQSFIERMTNFDKNLPNEKVLPKHSLLYEYFTVYNELTKVKYVTEGMRKPAFLSGEQKKAIVDLLFKTNRKVTVKQLKEDYFKKIECFDSVEISGVEDRFNASLGTYHDLLKIIKDKDFLDNEENEDILEDIVLTLTLFEDREMIEERLKTYAHLFDDKVMKQLKRRRYTGWGRLSRKLINGIRDKQSGKTILDFLKSDGFANRNFMQLIHDDSLTFKEDIQKAQVSGQGDSLHEHIANLAGSPAIKKGILQTVKVVDELVKVMGRHKPENIVIEMARENQTTQKGQKNSRERMKRIEEGIKELGSQILKEHPVENTQLQNEKLYLYYLQNGRDMYVDQELDINRLSDYDVDHIVPQSFLKDDSIDNKVLTRSDKARGKSDNVPSEEVVKKMKNYWRQLLNAKLITQRKFDNLTKAERGGLSELDKAGFIKRQLVETRQITKHVAQILDSRMNTKYDENDKLIREVKVITLKSKLVSDFRKDFQFYKVREINNYHHAHDAYLNAVVGTALIKKYPKLESEFVYGDYKVYDVRKMIAKSEQEIGKATAKYFFYSNIMNFFKTEITLANGEIRKRPLIETNGETGEIVWDKGRDFATVRKVLSMPQVNIVKKTEVQTGGFSKESILPKRNSDKLIARKKDWDPKKYGGFDSPTVAYSVLVVAKVEKGKSKKLKSVKELLGITIMERSSFEKNPIDFLEAKGYKEVKKDLIIKLPKYSLFELENGRKRMLASAGELQKGNELALPSKYVNFLYLASHYEKLKGSPEDNEQKQLFVEQHKHYLDEIIEQISEFSKRVILADANLDKVLSAYNKHRDKPIREQAENIIHLFTLTNLGAPAAFKYFDTTIDRKRYTSTKEVLDATLIHQSITGLYETRIDLSQLGGDGGEAAAKEAAAKEAAAKGGVPWLTQQPLQLTILVPLQEYQEKILSKTALPEDQKQQLKTLFVKYDNLWQHWENQVGHRKIRPHNIATGDYPPRPQKQYPINPKAKPSIQIVIDDLLKQGVLTPQNSTMNTPVYPVPKPDGRWRMVLDYREVNKTIPLTAAQNQHSAGILATIVRQKYKTTLDLANGFWAHPITPESYWLTAFTWQGKQYCWTRLPQGFLNSPALFNADVVDLLKEIPNVQVYVDDIYLSHDDPKEHVQQLEKVFQILLQAGYVVSLKKSEIGQKTVEFLGFNITKEGRGLTDTFKTKLLNITPPKDLKQLQSILGKLNFARNFIPNFAELVQPLYNLIAPAKGKYIEWSEENTKQLNMVIEALNTASNLEERLPEQRLVIKVNTSPSAGYVRYYNETGKKPIMYLNYVFSKAELKFSMLEKLLTTMHKALIKAMDLAMGQEILVYSPIVSMTKIQKTPLPERKALPIRWITWMTYLEDPRIQFHYDKTLPELKHIPDVYTSSQSPVKHPSQYEGVFYTDGSAIKSPDPTKSNNAGMGIVHATYKPEYQVLNQWSIPLGNHTAQMAEIAAVEFACKKALKIPGPVLVITDSFYVAESANKELPYWKSNGFVNNKKKPLKHISKWKSIAECLSMKPDITIQHEKGISLQIPVFILKGNALADKLATQGSYVVNAGKRTADGSEFEKRTADGSEFESPKKKAKVE

SEQ ID NO: 6390 - protein, 2222 aa, synthetic construct
MPAAKRVKLDGGDKKYSIGLDIGTNSVGWAVITDEYKVPSKKFKVLGNTDRHSIKKNLIGALLFDSGETAEATRLKRTARRRYTRRKNRICYLQEIFSNEMAKVDDSFFHRLEESFLVEEDKKHERHPIFGNIVDEVAYHEKYPTIYHLRKKLVDSTDKADLRLIYLALAHMIKFRGHFLIEGDLNPDNSDVDKLFIQLVQTYNQLFEENPINASGVDAKAILSARLSKSRRLENLIAQLPGEKKNGLFGNLIALSLGLTPNFKSNFDLAEDAKLQLSKDTYDDDLDNLLAQIGDQYADLFLAAKNLSDAILLSDILRVNTEITKAPLSASMIKRYDEHHQDLTLLKALVRQQLPEKYKEIFFDQSKNGYAGYIDGGASQEEFYKFIKPILEKMDGTEELLVKLNREDLLRKQRTFDNGSIPHQIHLGELHAILRRQEDFYPFLKDNREKIEKILTFRIPYYVGPLARGNSRFAWMTRKSEETITPWNFEEVVDKGASAQSFIERMTNFDKNLPNEKVLPKHSLLYEYFTVYNELTKVKYVTEGMRKPAFLSGEQKKAIVDLLFKTNRKVTVKQLKEDYFKKIECFDSVEISGVEDRFNASLGTYHDLLKIIKDKDFLDNEENEDILEDIVLTLTLFEDREMIEERLKTYAHLFDDKVMKQLKRRRYTGWGRLSRKLINGIRDKQSGKTILDFLKSDGFANRNFMQLIHDDSLTFKEDIQKAQVSGQGDSLHEHIANLAGSPAIKKGILQTVKVVDELVKVMGRHKPENIVIEMARENQTTQKGQKNSRERMKRIEEGIKELGSQILKEHPVENTQLQNEKLYLYYLQNGRDMYVDQELDINRLSDYDVDHIVPQSFLKDDSIDNKVLTRSDKARGKSDNVPSEEVVKKMKNYWRQLLNAKLITQRKFDNLTKAERGGLSELDKAGFIKRQLVETRQITKHVAQILDSRMNTKYDENDKLIREVKVITLKSKLVSDFRKDFQFYKVREINNYHHAHDAYLNAVVGTALIKKYPKLESEFVYGDYKVYDVRKMIAKSEQEIGKATAKYFFYSNIMNFFKTEITLANGEIRKRPLIETNGETGEIVWDKGRDFATVRKVLSMPQVNIVKKTEVQTGGFSKESILPKRNSDKLIARKKDWDPKKYGGFDSPTVAYSVLVVAKVEKGKSKKLKSVKELLGITIMERSSFEKNPIDFLEAKGYKEVKKDLIIKLPKYSLFELENGRKRMLASAGELQKGNELALPSKYVNFLYLASHYEKLKGSPEDNEQKQLFVEQHKHYLDEIIEQISEFSKRVILADANLDKVLSAYNKHRDKPIREQAENIIHLFTLTNLGAPAAFKYFDTTIDRKRYTSTKEVLDATLIHQSITGLYETRIDLSQLGGDGGEAAAKEAAAKEAAAKGGTLGDQGSRGSDPLPEPRVTLTVEGIPTEFLVNTGAEHSVLTKPMGKMGSKRTVVAGATGSKVYPWTTKRLLKIGQKQVTHSFLVIPECPAPLLGRDLLTKLKAQIQFSTEGPQVTWEDRPAMCLVLNLEEEYRLHEKPVPPSIDPSWLQLFPMVWAEKAGMGLANQVPPVVVELKSDASPVAVRQYPMSKEAREGIRPHIQRFLDLGILVPCQSPWNTPLLPVKKPGTNDYRPVQDLREVNKRVQDIHPTVPNPYNLLSSLPPSHTWYSVLDLKDAFFCLKLHPNSQPLFAFEWRDPEKGNTGQLTWTRLPQGFKNSPTLFDEALHRDLASFRALNPQVVMLQYVDDLLVAAPTYRDCKEGTRRLLQELSKLGYRVSAKKAQLCREEVTYLGYLLKGGKRWLTPARKATVMKIPTPTTPRQVREFLGTAGFCRLWIPGFASLAAPLYPLTREKVPFTWTEAHQEAFGRIKEALLSAPALALPDLTKPFALYVDEKEGVARGVLTQTLGPWRRPVAYLSKKLDPVASGWPTCLKAIAAVALLLKDADKLTLGQNVLVIAPHNLESIVRQPPDRWMTNARMTHYQSLLLNERVSFAPPAILNPATLLPVESDDTPIHICSEILAEETGTRPDLRDQPLPGVPAWYTDGSSFIMDGRRQAGAAIVDNKRTVWASNLPEGTSAQKAELIALTQALRLAEGKSINIYTDSRYAFATAHVHGAIYKQRGLLTSAGKDIKNKEEILALLEAIHLPKRVAIIHCPGHQRGTDPVATGNRKADEAAKQAAQSTRILTETTKNAGKRTADGSEFEKRTADGSEFESPKKKAKVE

SEQ ID NO: 6391 - protein, 2131 aa, synthetic construct
MPAAKRVKLDGGDKKYSIGLDIGTNSVGWAVITDEYKVPSKKFKVLGNTDRHSIKKNLIGALLFDSGETAEATRLKRTARRRYTRRKNRICYLQEIFSNEMAKVDDSFFHRLEESFLVEEDKKHERHPIFGNIVDEVAYHEKYPTIYHLRKKLVDSTDKADLRLIYLALAHMIKFRGHFLIEGDLNPDNSDVDKLFIQLVQTYNQLFEENPINASGVDAKAILSARLSKSRRLENLIAQLPGEKKNGLFGNLIALSLGLTPNFKSNFDLAEDAKLQLSKDTYDDDLDNLLAQIGDQYADLFLAAKNLSDAILLSDILRVNTEITKAPLSASMIKRYDEHHQDLTLLKALVRQQLPEKYKEIFFDQSKNGYAGYIDGGASQEEFYKFIKPILEKMDGTEELLVKLNREDLLRKQRTFDNGSIPHQIHLGELHAILRRQEDFYPFLKDNREKIEKILTFRIPYYVGPLARGNSRFAWMTRKSEETITPWNFEEVVDKGASAQSFIERMTNFDKNLPNEKVLPKHSLLYEYFTVYNELTKVKYVTEGMRKPAFLSGEQKKAIVDLLFKTNRKVTVKQLKEDYFKKIECFDSVEISGVEDRFNASLGTYHDLLKIIKDKDFLDNEENEDILEDIVLTLTLFEDREMIEERLKTYAHLFDDKVMKQLKRRRYTGWGRLSRKLINGIRDKQSGKTILDFLKSDGFANRNFMQLIHDDSLTFKEDIQKAQVSGQGDSLHEHIANLAGSPAIKKGILQTVKVVDELVKVMGRHKPENIVIEMARENQTTQKGQKNSRERMKRIEEGIKELGSQILKEHPVENTQLQNEKLYLYYLQNGRDMYVDQELDINRLSDYDVDHIVPQSFLKDDSIDNKVLTRSDKARGKSDNVPSEEVVKKMKNYWRQLLNAKLITQRKFDNLTKAERGGLSELDKAGFIKRQLVETRQITKHVAQILDSRMNTKYDENDKLIREVKVITLKSKLVSDFRKDFQFYKVREINNYHHAHDAYLNAVVGTALIKKYPKLESEFVYGDYKVYDVRKMIAKSEQEIGKATAKYFFYSNIMNFFKTEITLANGEIRKRPLIETNGETGEIVWDKGRDFATVRKVLSMPQVNIVKKTEVQTGGFSKESILPKRNSDKLIARKKDWDPKKYGGFDSPTVAYSVLVVAKVEKGKSKKLKSVKELLGITIMERSSFEKNPIDFLEAKGYKEVKKDLIIKLPKYSLFELENGRKRMLASAGELQKGNELALPSKYVNFLYLASHYEKLKGSPEDNEQKQLFVEQHKHYLDEIIEQISEFSKRVILADANLDKVLSAYNKHRDKPIREQAENIIHLFTLTNLGAPAAFKYFDTTIDRKRYTSTKEVLDATLIHQSITGLYETRIDLSQLGGDGGEAAAKEAAAKEAAAKGGLLGRDLLTKLKAQIQFSTEGPQVTWEDRPAMCLVLNLEEEYRLHEKPVPPSIDPSWLQLFPMVWAEKAGMGLANQVPPVVVELKSDASPVAVRQYPMSKEAREGIRPHIQRFLDLGILVPCQSPWNTPLLPVKKPGTNDYRPVQDLREVNKRVQDIHPTVPNPYNLLSSLPPSHTWYSVLDLKDAFFCLKLHPNSQPLFAFEWRDPEKGNTGQLTWTRLPQGFKNSPTLFNEALHRDLASFRALNPQVVMLQYVDDLLVAAPTYRDCKEGTRRLLQELSKLGYRVSAKKAQLCREEVTYLGYLLKGGKRWLTPARKATVMKIPTPTTPRQVREFLGKAGFCRLFIPGFASLAAPLYPLTRPKVPFTWTEAHQEAFGRIKEALLSAPALALPDLTKPFALYVDEKEGVARGVLTQTLGPWRRPVAYLSKKLDPVASGWPTCLKAIAAVALLLKDADKLTLGQNVLVIAPHNLESIVRQPPDRWMTNARMTHYQSLLLNERVSFAPPAILNPATLLPVESDDTPIHICSEILAEETGTRPDLRDQPLPGVPAWYTDGSSFIMDGRRQAGAAIVDNKRTVWASNLPEGTSAQKAELIALTQALRLAEGKSINIYTDSRYAFATAHVHGAIYKQRGWLTSAGKDIKNKEEILALLEAIHLPKRVAIIHCPGHQRGTDPVATGNRKADEAAKQAAQSTRILTETTKNAGKRTADGSEFEKRTADGSEFESPKKKAKVE

SEQ ID NO: 6392 - protein, 2222 aa, synthetic construct
MPAAKRVKLDGGDKKYSIGLDIGTNSVGWAVITDEYKVPSKKFKVLGNTDRHSIKKNLIGALLFDSGETAEATRLKRTARRRYTRRKNRICYLQEIFSNEMAKVDDSFFHRLEESFLVEEDKKHERHPIFGNIVDEVAYHEKYPTIYHLRKKLVDSTDKADLRLIYLALAHMIKFRGHFLIEGDLNPDNSDVDKLFIQLVQTYNQLFEENPINASGVDAKAILSARLSKSRRLENLIAQLPGEKKNGLFGNLIALSLGLTPNFKSNFDLAEDAKLQLSKDTYDDDLDNLLAQIGDQYADLFLAAKNLSDAILLSDILRVNTEITKAPLSASMIKRYDEHHQDLTLLKALVRQQLPEKYKEIFFDQSKNGYAGYIDGGASQEEFYKFIKPILEKMDGTEELLVKLNREDLLRKQRTFDNGSIPHQIHLGELHAILRRQEDFYPFLKDNREKIEKILTFRIPYYVGPLARGNSRFAWMTRKSEETITPWNFEEVVDKGASAQSFIERMTNFDKNLPNEKVLPKHSLLYEYFTVYNELTKVKYVTEGMRKPAFLSGEQKKAIVDLLFKTNRKVTVKQLKEDYFKKIECFDSVEISGVEDRFNASLGTYHDLLKIIKDKDFLDNEENEDILEDIVLTLTLFEDREMIEERLKTYAHLFDDKVMKQLKRRRYTGWGRLSRKLINGIRDKQSGKTILDFLKSDGFANRNFMQLIHDDSLTFKEDIQKAQVSGQGDSLHEHIANLAGSPAIKKGILQTVKVVDELVKVMGRHKPENIVIEMARENQTTQKGQKNSRERMKRIEEGIKELGSQILKEHPVENTQLQNEKLYLYYLQNGRDMYVDQELDINRLSDYDVDHIVPQSFLKDDSIDNKVLTRSDKARGKSDNVPSEEVVKKMKNYWRQLLNAKLITQRKFDNLTKAERGGLSELDKAGFIKRQLVETRQITKHVAQILDSRMNTKYDENDKLIREVKVITLKSKLVSDFRKDFQFYKVREINNYHHAHDAYLNAVVGTALIKKYPKLESEFVYGDYKVYDVRKMIAKSEQEIGKATAKYFFYSNIMNFFKTEITLANGEIRKRPLIETNGETGEIVWDKGRDFATVRKVLSMPQVNIVKKTEVQTGGFSKESILPKRNSDKLIARKKDWDPKKYGGFDSPTVAYSVLVVAKVEKGKSKKLKSVKELLGITIMERSSFEKNPIDFLEAKGYKEVKKDLIIKLPKYSLFELENGRKRMLASAGELQKGNELALPSKYVNFLYLASHYEKLKGSPEDNEQKQLFVEQHKHYLDEIIEQISEFSKRVILADANLDKVLSAYNKHRDKPIREQAENIIHLFTLTNLGAPAAFKYFDTTIDRKRYTSTKEVLDATLIHQSITGLYETRIDLSQLGGDGGEAAAKEAAAKEAAAKGGTLGDQGSRGSDPLPEPRVTLTVEGIPTEFLVNTGAEHSVLTKPMGKMGSKRTVVAGATGSKVYPWTTKRLLKIGQKQVTHSFLVIPECPAPLLGRDLLTKLKAQIQFSTEGPQVTWEDRPAMCLVLNLEEEYRLHEKPVPPSIDPSWLQLFPMVWAEKAGMGLANQVPPVVVELKSDASPVAVRQYPMSKEAREGIRPHIQRFLDLGILVPCQSPWNTPLLPVKKPGTNDYRPVQDLREVNKRVQDIHPTVPNPYNLLSSLPPSHTWYSVLDLKDAFFCLKLHPNSQPLFAFEWRDPEKGNTGQLTWTRLPQGFKNSPTLFNEALHRDLASFRALNPQVVMLQYVDDLLVAAPTYRDCKEGTRRLLQELSKLGYRVSAKKAQLCREEVTYLGYLLKGGKRWLTPARKATVMKIPTPTTPRQVREFLGKAGFCRLFIPGFASLAAPLYPLTRPKVPFTWTEAHQEAFGRIKEALLSAPALALPDLTKPFALYVDEKEGVARGVLTQTLGPWRRPVAYLSKKLDPVASGWPTCLKAIAAVALLLKDADKLTLGQNVLVIAPHNLESIVRQPPDRWMTNARMTHYQSLLLNERVSFAPPAILNPATLLPVESDDTPIHICSEILAEETGTRPDLRDQPLPGVPAWYTDGSSFIMDGRRQAGAAIVDNKRTVWASNLPEGTSAQKAELIALTQALRLAEGKSINIYTDSRYAFATAHVHGAIYKQRGWLTSAGKDIKNKEEILALLEAIHLPKRVAIIHCPGHQRGTDPVATGNRKADEAAKQAAQSTRILTETTKNAGKRTADGSEFEKRTADGSEFESPKKKAKVE

SEQ ID NO: 6393 - protein, 2100 aa, synthetic construct
MPAAKRVKLDGGDKKYSIGLDIGTNSVGWAVITDEYKVPSKKFKVLGNTDRHSIKKNLIGALLFDSGETAEATRLKRTARRRYTRRKNRICYLQEIFSNEMAKVDDSFFHRLEESFLVEEDKKHERHPIFGNIVDEVAYHEKYPTIYHLRKKLVDSTDKADLRLIYLALAHMIKFRGHFLIEGDLNPDNSDVDKLFIQLVQTYNQLFEENPINASGVDAKAILSARLSKSRRLENLIAQLPGEKKNGLFGNLIALSLGLTPNFKSNFDLAEDAKLQLSKDTYDDDLDNLLAQIGDQYADLFLAAKNLSDAILLSDILRVNTEITKAPLSASMIKRYDEHHQDLTLLKALVRQQLPEKYKEIFFDQSKNGYAGYIDGGASQEEFYKFIKPILEKMDGTEELLVKLNREDLLRKQRTFDNGSIPHQIHLGELHAILRRQEDFYPFLKDNREKIEKILTFRIPYYVGPLARGNSRFAWMTRKSEETITPWNFEEVVDKGASAQSFIERMTNFDKNLPNEKVLPKHSLLYEYFTVYNELTKVKYVTEGMRKPAFLSGEQKKAIVDLLFKTNRKVTVKQLKEDYFKKIECFDSVEISGVEDRFNASLGTYHDLLKIIKDKDFLDNEENEDILEDIVLTLTLFEDREMIEERLKTYAHLFDDKVMKQLKRRRYTGWGRLSRKLINGIRDKQSGKTILDFLKSDGFANRNFMQLIHDDSLTFKEDIQKAQVSGQGDSLHEHIANLAGSPAIKKGILQTVKVVDELVKVMGRHKPENIVIEMARENQTTQKGQKNSRERMKRIEEGIKELGSQILKEHPVENTQLQNEKLYLYYLQNGRDMYVDQELDINRLSDYDVDHIVPQSFLKDDSIDNKVLTRSDKARGKSDNVPSEEVVKKMKNYWRQLLNAKLITQRKFDNLTKAERGGLSELDKAGFIKRQLVETRQITKHVAQILDSRMNTKYDENDKLIREVKVITLKSKLVSDFRKDFQFYKVREINNYHHAHDAYLNAVVGTALIKKYPKLESEFVYGDYKVYDVRKMIAKSEQEIGKATAKYFFYSNIMNFFKTEITLANGEIRKRPLIETNGETGEIVWDKGRDFATVRKVLSMPQVNIVKKTEVQTGGFSKESILPKRNSDKLIARKKDWDPKKYGGFDSPTVAYSVLVVAKVEKGKSKKLKSVKELLGITIMERSSFEKNPIDFLEAKGYKEVKKDLIIKLPKYSLFELENGRKRMLASAGELQKGNELALPSKYVNFLYLASHYEKLKGSPEDNEQKQLFVEQHKHYLDEIIEQISEFSKRVILADANLDKVLSAYNKHRDKPIREQAENIIHLFTLTNLGAPAAFKYFDTTIDRKRYTSTKEVLDATLIHQSITGLYETRIDLSQLGGDGGEAAAKEAAAKEAAAKGGLGIEDEYRLHETSTEPDVSLGSTWLSDFPQAWAETGGMGLAVRQAPLIIPLKATSTPVSIQQYPMSHEARLGIKPHIQRLLDQGILVPCQSPWNTPLLPVKKPGTNDYRPVQDLREVNKRVEDIHPTVPNPYNLLSGLPPSHQWYTVLDLKDAFFCLRLHPTSQPLFAFEWRDPGMGISGQLTWTRLPQGFKNSPTLFNEALHRDLADFRIQHPDLILLQYVDDILLAATSELDCQQGTRALLQTLGDLGYRASAKKAQICQKQVKYLGYLLREGQRWLTEARKETVMGQPVPKTPRQLREFLGKAGFCRLFIPGFAEMAAPLYPLTKPGTLFSWGPDQQKAYQEIKQALLTAPALGLPDLTKPFELFVDEKQGYAKGVLTQKLGPWRRPVAYLSKKLDPVAAGWPPCLRMVAAIAVLTKDAGKLTMGQPLVILAPHAVEALVKQPPDRWLSNARMTHYQAMLLDTDRVQFGPVVALNPATLLPLPEEGAPHDCLEILAETHGTRPDLTDQPIPDADHTWYTDGSSFLQEGQRKAGAAVTTETEVIWAGALPAGTSAQRAELIALTQALKMAEGKRLNVYTDSRYAFATAHIHGEIYRRRGWLTSEGREIKNKSEILALLKALFLPKRLSIIHCLGHQKGDSAEARGNRLADQAAREAAIKTPPDTSTLLIAGKRTADGSEFEKRTADGSEFESPKKKAKVE

SEQ ID NO: 6394 - protein, 2100 aa, synthetic construct; identical to SEQ ID NO: 6393

SEQ ID NO: 6395 - protein, 2100 aa, synthetic construct
MPAAKRVKLDGGDKKYSIGLDIGTNSVGWAVITDEYKVPSKKFKVLGNTDRHSIKKNLIGALLFDSGETAEATRLKRTARRRYTRRKNRICYLQEIFSNEMAKVDDSFFHRLEESFLVEEDKKHERHPIFGNIVDEVAYHEKYPTIYHLRKKLVDSTDKADLRLIYLALAHMIKFRGHFLIEGDLNPDNSDVDKLFIQLVQTYNQLFEENPINASGVDAKAILSARLSKSRRLENLIAQLPGEKKNGLFGNLIALSLGLTPNFKSNFDLAEDAKLQLSKDTYDDDLDNLLAQIGDQYADLFLAAKNLSDAILLSDILRVNTEITKAPLSASMIKRYDEHHQDLTLLKALVRQQLPEKYKEIFFDQSKNGYAGYIDGGASQEEFYKFIKPILEKMDGTEELLVKLNREDLLRKQRTFDNGSIPHQIHLGELHAILRRQEDFYPFLKDNREKIEKILTFRIPYYVGPLARGNSRFAWMTRKSEETITPWNFEEVVDKGASAQSFIERMTNFDKNLPNEKVLPKHSLLYEYFTVYNELTKVKYVTEGMRKPAFLSGEQKKAIVDLLFKTNRKVTVKQLKEDYFKKIECFDSVEISGVEDRFNASLGTYHDLLKIIKDKDFLDNEENEDILEDIVLTLTLFEDREMIEERLKTYAHLFDDKVMKQLKRRRYTGWGRLSRKLINGIRDKQSGKTILDFLKSDGFANRNFMQLIHDDSLTFKEDIQKAQVSGQGDSLHEHIANLAGSPAIKKGILQTVKVVDELVKVMGRHKPENIVIEMARENQTTQKGQKNSRERMKRIEEGIKELGSQILKEHPVENTQLQNEKLYLYYLQNGRDMYVDQELDINRLSDYDVDHIVPQSFLKDDSIDNKVLTRSDKARGKSDNVPSEEVVKKMKNYWRQLLNAKLITQRKFDNLTKAERGGLSELDKAGFIKRQLVETRQITKHVAQILDSRMNTKYDENDKLIREVKVITLKSKLVSDFRKDFQFYKVREINNYHHAHDAYLNAVVGTALIKKYPKLESEFVYGDYKVYDVRKMIAKSEQEIGKATAKYFFYSNIMNFFKTEITLANGEIRKRPLIETNGETGEIVWDKGRDFATVRKVLSMPQVNIVKKTEVQTGGFSKESILPKRNSDKLIARKKDWDPKKYGGFDSPTVAYSVLVVAKVEKGKSKKLKSVKELLGITIMERSSFEKNPIDFLEAKGYKEVKKDLIIKLPKYSLFELENGRKRMLASAGELQKGNELALPSKYVNFLYLASHYEKLKGSPEDNEQKQLFVEQHKHYLDEIIEQISEFSKRVILADANLDKVLSAYNKHRDKPIREQAENIIHLFTLTNLGAPAAFKYFDTTIDRKRYTSTKEVLDATLIHQSITGLYETRIDLSQLGGDGGEAAAKEAAAKEAAAKGGTLNIEDEYRLHETSKGPDVPLGSTWLSDFPQAWAETGGMGLAVRQAPLIIPLKATSTPVSIKQYPMSQEARLGIKPHIQRLLDQGILVPCQSPWNTPLLPVKKPGTNDYRPVQDLREVNKRVEDIHPTVPNPYNLLSGLPPSHQWYTVLDLKDAFFCLRLHPTSQSLFAFEWRDPEMGISGQLTWTRLPQGFKNSPTLFNEALHRDLADFRIQHPDLILLQYVDDLLLAATSELDCQQGTRALLQTLGDLGYRASAKKAQICQKQVKYLGYLLKEGQRWLTEARKETVMGQPTPKTPRQLREFLGTAGFCRLWIPGFAEMAAPLYPLTKPGTLFEWGPDQQKAYQEIKQALLTAPALGLPDLTKPFELFVDEKQGYAKGVLTQKLGPWRRPVAYLSKKLDPVAAGWPPCLRMVAAIAVLTKDAGKLTMGQPLVILAPHAVEALVKQPPDRWLSNARMTHYQALLLDTDRVQFGPIVALNPATLLPLPEEGLQHDCLDILAEAHGTRPDLTDQPLPDADHTWYTDGSSFLQEGQRKAGAAVTTETEVVWAKALPAGTSAQRAELIALTQALKMAEGKKLNVYTDSRYAFATAHIHGEIYRRRGWLTSEGKEIKNKDEILALLKALFLPKRLSIIHCPGHQKGNRAEARGNRMADQAAREVATRETPETSTLLAGKRTADGSEFEKRTADGSEFESPKKKAKVE

SEQ ID NO: 6396 - protein, 2100 aa, synthetic construct
MPAAKRVKLDGGDKKYSIGLDIGTNSVGWAVITDEYKVPSKKFKVLGNTDRHSIKKNLIGALLFDSGETAEATRLKRTARRRYTRRKNRICYLQEIFSNEMAKVDDSFFHRLEESFLVEEDKKHERHPIFGNIVDEVAYHEKYPTIYHLRKKLVDSTDKADLRLIYLALAHMIKFRGHFLIEGDLNPDNSDVDKLFIQLVQTYNQLFEENPINASGVDAKAILSARLSKSRRLENLIAQLPGEKKNGLFGNLIALSLGLTPNFKSNFDLAEDAKLQLSKDTYDDDLDNLLAQIGDQYADLFLAAKNLSDAILLSDILRVNTEITKAPLSASMIKRYDEHHQDLTLLKALVRQQLPEKYKEIFFDQSKNGYAGYIDGGASQEEFYKFIKPILEKMDGTEELLVKLNREDLLRKQRTFDNGSIPHQIHLGELHAILRRQEDFYPFLKDNREKIEKILTFRIPYYVGPLARGNSRFAWMTRKSEETITPWNFEEVVDKGASAQSFIERMTNFDKNLPNEKVLPKHSLLYEYFTVYNELTKVKYVTEGMRKPAFLSGEQKKAIVDLLFKTNRKVTVKQLKEDYFKKIECFDSVEISGVEDRFNASLGTYHDLLKIIKDKDFLDNEENEDILEDIVLTLTLFEDREMIEERLKTYAHLFDDKVMKQLKRRRYTGWGRLSRKLINGIRDKQSGKTILDFLKSDGFANRNFMQLIHDDSLTFKEDIQKAQVSGQGDSLHEHIANLAGSPAIKKGILQTVKVVDELVKVMGRHKPENIVIEMARENQTTQKGQKNSRERMKRIEEGIKELGSQILKEHPVENTQLQNEKLYLYYLQNGRDMYVDQELDINRLSDYDVDHIVPQSFLKDDSIDNKVLTRSDKARGKSDNVPSEEVVKKMKNYWRQLLNAKLITQRKFDNLTKAERGGLSELDKAGFIKRQLVETRQITKHVAQILDSRMNTKYDENDKLIREVKVITLKSKLVSDFRKDFQFYKVREINNYHHAHDAYLNAVVGTALIKKYPKLESEFVYGDYKVYDVRKMIAKSEQEIGKATAKYFFYSNIMNFFKTEITLANGEIRKRPLIETNGETGEIVWDKGRDFATVRKVLSMPQVNIVKKTEVQTGGFSKESILPKRNSDKLIARKKDWDPKKYGGFDSPTVAYSVLVVAKVEKGKSKKLKSVKELLGITIMERSSFEKNPIDFLEAKGYKEVKKDLIIKLPKYSLFELENGRKRMLASAGELQKGNELALPSKYVNFLYLASHYEKLKGSPEDNEQKQLFVEQHKHYLDEIIEQISEFSKRVILADANLDKVLSAYNKHRDKPIREQAENIIHLFTLTNLGAPAAFKYFDTTIDRKRYTSTKEVLDATLIHQSITGLYETRIDLSQLGGDGGEAAAKEAAAKEAAAKGGTLNIEDEYRLHEISTEPDVSPGSTWLSDFPQAWAETGGMGLAVRQAPLIIPLKATSTPVSIKQYPMSQEAKLGIKPHIQRLLDQGILVPCQSPWNTPLLPVKKPGTNDYRPVQGLREVNKRVEDIHPTVPNPYNLLSGLPTSHRWYTVLDLKDAFFCLRLHPTSQPLFASEWRDPGMGISGQLTWTRLPQGFKNSPTLFDEALHRGLADFRIQHPDLILLQYVDDLLLAATSELDCQQGTRALLKTLGNLGYRASAKKAQICQKQVKYLGYLLREGQRWLTEARKETVMGQPTPKTPRQLREFLGTAGFCRLWIPRFAEMAAPLYPLTKTGTLFNWGPDQQKAYHEIKQALLTAPALGLPDLTKPFELFVDEKQGYAKGVLTQKLGPWRRPVAYLSKKLDPVAAGWPPCLRMVAAIAVLTKDAGKLTMGQPLVILAPHAVEALVKQPPDRWLSNARMTHYQAMLLDTDRVQFGPVVALNPATLLPLPEEGAPHDCLEILAETHGTEPDLTDQPIPDADHTWYTDGSSFLQEGQRKAGAAVTTETEVIWARALPAGTSAQRAELIALTQALKMAEGKRLNVYTDSRYAFATAHIHGEIYKRRGLLTSEGREIKNKSEILALLKALFLPKRLSIIHCLGHQKGDSAEARGNRLADQAAREAAIKTPPDTSTLLAGKRTADGSEFEKRTADGSEFESPKKKAKVE

SEQ ID NO: 6397 - protein, 2120 aa, synthetic construct
MPAAKRVKLDGGDKKYSIGLDIGTNSVGWAVITDEYKVPSKKFKVLGNTDRHSIKKNLIGALLFDSGETAEATRLKRTARRRYTRRKNRICYLQEIFSNEMAKVDDSFFHRLEESFLVEEDKKHERHPIFGNIVDEVAYHEKYPTIYHLRKKLVDSTDKADLRLIYLALAHMIKFRGHFLIEGDLNPDNSDVDKLFIQLVQTYNQLFEENPINASGVDAKAILSARLSKSRRLENLIAQLPGEKKNGLFGNLIALSLGLTPNFKSNFDLAEDAKLQLSKDTYDDDLDNLLAQIGDQYADLFLAAKNLSDAILLSDILRVNTEITKAPLSASMIKRYDEHHQDLTLLKALVRQQLPEKYKEIFFDQSKNGYAGYIDGGASQEEFYKFIKPILEKMDGTEELLVKLNREDLLRKQRTFDNGSIPHQIHLGELHAILRRQEDFYPFLKDNREKIEKILTFRIPYYVGPLARGNSRFAWMTRKSEETITPWNFEEVVDKGASAQSFIERMTNFDKNLPNEKVLPKHSLLYEYFTVYNELTKVKYVTEGMRKPAFLSGEQKKAIVDLLFKTNRKVTVKQLKEDYFKKIECFDSVEISGVEDRFNASLGTYHDLLKIIKDKDFLDNEENEDILEDIVLTLTLFEDREMIEERLKTYAHLFDDKVMKQLKRRRYTGWGRLSRKLINGIRDKQSGKTILDFLKSDGFANRNFMQLIHDDSLTFKEDIQKAQVSGQGDSLHEHIANLAGSPAIKKGILQTVKVVDELVKVMGRHKPENIVIEMARENQTTQKGQKNSRERMKRIEEGIKELGSQILKEHPVENTQLQNEKLYLYYLQNGRDMYVDQELDINRLSDYDVDHIVPQSFLKDDSIDNKVLTRSDKARGKSDNVPSEEVVKKMKNYWRQLLNAKLITQRKFDNLTKAERGGLSELDKAGFIKRQLVETRQITKHVAQILDSRMNTKYDENDKLIREVKVITLKSKLVSDFRKDFQFYKVREINNYHHAHDAYLNAVVGTALIKKYPKLESEFVYGDYKVYDVRKMIAKSEQEIGKATAKYFFYSNIMNFFKTEITLANGEIRKRPLIETNGETGEIVWDKGRDFATVRKVLSMPQVNIVKKTEVQTGGFSKESILPKRNSDKLIARKKDWDPKKYGGFDSPTVAYSVLVVAKVEKGKSKKLKSVKELLGITIMERSSFEKNPIDFLEAKGYKEVKKDLIIKLPKYSLFELENGRKRMLASAGELQKGNELALPSKYVNFLYLASHYEKLKGSPEDNEQKQLFVEQHKHYLDEIIEQISEFSKRVILADANLDKVLSAYNKHRDKPIREQAENIIHLFTLTNLGAPAAFKYFDTTIDRKRYTSTKEVLDATLIHQSITGLYETRIDLSQLGGDGGEAAAKEAAAKEAAAKGGVQEISDSRPMLHIYLNGRRFLGLLDTGADKTCIAGRDWPANWPIHQTESSLQGLGMACGVARSSQPLRWQHEDKSGIIHPFVIPTLPFTLWGRDIMKDIKVRLMTDSPDDSQDLMIGAIESNLFADQISWKSDQPVWLNQWPLKQEKLQALQQLVTEQLQLGHLEESNSPWNTPVFVIKKKSGKWRLLQDLRAVNATMHDMGALQPGLPSPVAVPKGWEIIIIDLQDCFFNIKLHPEDCKRFAFSVPSPNFKRPYQRFQWKVLPQGMKNSPTLCQKFVDKAILTVRDKYQDSYIVHYMDDILLAHPSRSIVDEILTSMIQALNKHGLVVSTEKIQKYDNLKYLGTHIQGDSVSYQKLQIRTDKLRTLNDFQKLLGNINWIRPFLKLTTGELKPLFEILNGDSNPISTRKLTPEACKALQLMNERLSTARVKRLDLSQPWSLCILKTEYTPTACLWQDGVVEWIHLPHISPKVITPYDIFCTQLIIKGRHRSKELFSKDPDYIVVPYTKVQFDLLLQEKEDWPISLLGFLGEVHFHLPKDPLLTFTLQTAIIFPHMTSTTPLEKGIVIFTDGSANGRSVTYIQGREPIIKENTQNTAQQAEIVAVITAFEEVSQPFNLYTDSKYVTGLFPEIETATLSPRTKIYTELKHLQRLIHKRQEKFYIGHIRGHTGLPGPLAQGNAYADSLTRILTAAGKRTADGSEFEKRTADGSEFESPKKKAKVE

SEQ ID NO: 6398 - protein, 2091 aa, synthetic construct
MPAAKRVKLDGGDKKYSIGLDIGTNSVGWAVITDEYKVPSKKFKVLGNTDRHSIKKNLIGALLFDSGETAEATRLKRTARRRYTRRKNRICYLQEIFSNEMAKVDDSFFHRLEESFLVEEDKKHERHPIFGNIVDEVAYHEKYPTIYHLRKKLVDSTDKADLRLIYLALAHMIKFRGHFLIEGDLNPDNSDVDKLFIQLVQTYNQLFEENPINASGVDAKAILSARLSKSRRLENLIAQLPGEKKNGLFGNLIALSLGLTPNFKSNFDLAEDAKLQLSKDTYDDDLDNLLAQIGDQYADLFLAAKNLSDAILLSDILRVNTEITKAPLSASMIKRYDEHHQDLTLLKALVRQQLPEKYKEIFFDQSKNGYAGYIDGGASQEEFYKFIKPILEKMDGTEELLVKLNREDLLRKQRTFDNGSIPHQIHLGELHAILRRQEDFYPFLKDNREKIEKILTFRIPYYVGPLARGNSRFAWMTRKSEETITPWNFEEVVDKGASAQSFIERMTNFDKNLPNEKVLPKHSLLYEYFTVYNELTKVKYVTEGMRKPAFLSGEQKKAIVDLLFKTNRKVTVKQLKEDYFKKIECFDSVEISGVEDRFNASLGTYHDLLKIIKDKDFLDNEENEDILEDIVLTLTLFEDREMIEERLKTYAHLFDDKVMKQLKRRRYTGWGRLSRKLINGIRDKQSGKTILDFLKSDGFANRNFMQLIHDDSLTFKEDIQKAQVSGQGDSLHEHIANLAGSPAIKKGILQTVKVVDELVKVMGRHKPENIVIEMARENQTTQKGQKNSRERMKRIEEGIKELGSQILKEHPVENTQLQNEKLYLYYLQNGRDMYVDQELDINRLSDYDVDHIVPQSFLKDDSIDNKVLTRSDKARGKSDNVPSEEVVKKMKNYWRQLLNAKLITQRKFDNLTKAERGGLSELDKAGFIKRQLVETRQITKHVAQILDSRMNTKYDENDKLIREVKVITLKSKLVSDFRKDFQFYKVREINNYHHAHDAYLNAVVGTALIKKYPKLESEFVYGDYKVYDVRKMIAKSEQEIGKATAKYFFYSNIMNFFKTEITLANGEIRKRPLIETNGETGEIVWDKGRDFATVRKVLSMPQVNIVKKTEVQTGGFSKESILPKRNSDKLIARKKDWDPKKYGGFDSPTVAYSVLVVAKVEKGKSKKLKSVKELLGITIMERSSFEKNPIDFLEAKGYKEVKKDLIIKLPKYSLFELENGRKRMLASAGELQKGNELALPSKYVNFLYLASHYEKLKGSPEDNEQKQLFVEQHKHYLDEIIEQISEFSKRVILADANLDKVLSAYNKHRDKPIREQAENIIHLFTLTNLGAPAAFKYFDTTIDRKRYTSTKEVLDATLIHQSITGLYETRIDLSQLGGDGGEAAAKEAAAKEAAAKGGIPWLMKKPLQLTTLVPLQEYEERLLKQTMLTGSYKEKLQSLFLKYDALWQHWENQVGHRRIKPHHIATGTVNPRPQKQYPINPKAKASIQTVINDLLKQGVLIQQNSIMNTPVYPVPKPDGKWRMVLDYREVNKTIPLIAAQNQHSAGILSSIFRGKYKTTLDLSNGFWAHSITPESYWLTAFTWLGQQYCWTRLPQGFLNSPALFNADVVDLLKEVPNVQVYVDDIYISHDDPREHLEQLEKVFSLLLNAGYVVSLKKSEIAQHEVEFLGFNITKEGRGLTETFKQKLLNITPPRDLKQLQSILGKLNFARNFIPNFSELVKPLYNIIATAPGKYITWTTDNSQQLQNIISMLNSAENLEERNPEVRLIMKVNTSPSAGYIRFYNEFAKRPIMYLNYVYTKAEVKFTNTEKLLTTIHKGLIKALDLGMGQEILVYSPIVSMTKIQKTPLPERKALPIRWITWMSYLEDPRIQFHYDKTLPELQQVPTVTDDIIAKIKHPSEFSMVFYTDGSAIKHPNVNKSHNAGMGIAQVQFKPEFTVINTWSIPLGDHTAQLAEVAAVEFACKKALKIDGPVLIVTDSFYVAESVNKELPYWQSNGFFNNKKKPLKHVSKWKSIADCIQLKPDIIIIHEKGHQPTASTFHTEGNNLADKLATQGSYVVNAGKRTADGSEFEKRTADGSEFESPKKKAKVE

SEQ ID NO: 6399 - protein, 2180 aa, synthetic construct
MPAAKRVKLDGGDKKYSIGLDIGTNSVGWAVITDEYKVPSKKFKVLGNTDRHSIKKNLIGALLFDSGETAEATRLKRTARRRYTRRKNRICYLQEIFSNEMAKVDDSFFHRLEESFLVEEDKKHERHPIFGNIVDEVAYHEKYPTIYHLRKKLVDSTDKADLRLIYLALAHMIKFRGHFLIEGDLNPDNSDVDKLFIQLVQTYNQLFEENPINASGVDAKAILSARLSKSRRLENLIAQLPGEKKNGLFGNLIALSLGLTPNFKSNFDLAEDAKLQLSKDTYDDDLDNLLAQIGDQYADLFLAAKNLSDAILLSDILRVNTEITKAPLSASMIKRYDEHHQDLTLLKALVRQQLPEKYKEIFFDQSKNGYAGYIDGGASQEEFYKFIKPILEKMDGTEELLVKLNREDLLRKQRTFDNGSIPHQIHLGELHAILRRQEDFYPFLKDNREKIEKILTFRIPYYVGPLARGNSRFAWMTRKSEETITPWNFEEVVDKGASAQSFIERMTNFDKNLPNEKVLPKHSLLYEYFTVYNELTKVKYVTEGMRKPAFLSGEQKKAIVDLLFKTNRKVTVKQLKEDYFKKIECFDSVEISGVEDRFNASLGTYHDLLKIIKDKDFLDNEENEDILEDIVLTLTLFEDREMIEERLKTYAHLFDDKVMKQLKRRRYTGWGRLSRKLINGIRDKQSGKTILDFLKSDGFANRNFMQLIHDDSLTFKEDIQKAQVSGQGDSLHEHIANLAGSPAIKKGILQTVKVVDELVKVMGRHKPENIVIEMARENQTTQKGQKNSRERMKRIEEGIKELGSQILKEHPVENTQLQNEKLYLYYLQNGRDMYVDQELDINRLSDYDVDHIVPQSFLKDDSIDNKVLTRSDKARGKSDNVPSEEVVKKMKNYWRQLLNAKLITQRKFDNLTKAERGGLSELDKAGFIKRQLVETRQITKHVAQILDSRMNTKYDENDKLIREVKVITLKSKLVSDFRKDFQFYKVREINNYHHAHDAYLNAVVGTALIKKYPKLESEFVYGDYKVYDVRKMIAKSEQEIGKATAKYFFYSNIMNFFKTEITLANGEIRKRPLIETNGETGEIVWDKGRDFATVRKVLSMPQVNIVKKTEVQTGGFSKESILPKRNSDKLIARKKDWDPKKYGGFDSPTVAYSVLVVAKVEKGKSKKLKSVKELLGITIMERSSFEKNPIDFLEAKGYKEVKKDLIIKLPKYSLFELENGRKRMLASAGELQKGNELALPSKYVNFLYLASHYEKLKGSPEDNEQKQLFVEQHKHYLDEIIEQISEFSKRVILADANLDKVLSAYNKHRDKPIREQAENIIHLFTLTNLGAPAAFKYFDTTIDRKRYTSTKEVLDATLIHQSITGLYETRIDLSQLGGDGGEAAAKEAAAKEAAAKGGMDPLQLLQPLEAEIKGTKLKAHWNSGATITCVPQAFLEEEVPIKNIWIKTIHGEKEQPVYYLTFKIQGRKVEAEVISSPYDYILVSPSDIPWLMKKPLQLTTLVPLQEYEERLLKQTMLTGSYKEKLQSLFLKYDALWQHWENQVGHRRIKPHHIATGTVNPRPQKQYPINPKAKASIQTVINDLLKQGVLIQQNSIMNTPVYPVPKPDGKWRMVLDYREVNKTIPLIAAQNQHSAGILSSIFRGKYKTTLDLSNGFWAHSITPESYWLTAFTWLGQQYCWTRLPQGFLNSPALFNADVVDLLKEVPNVQVYVDDIYISHDDPREHLEQLEKVFSLLLNAGYVVSLKKSEIAQHEVEFLGFNITKEGRGLTETFKQKLLNITPPRDLKQLQSILGKLNFARNFIPNFSELVKPLYNIIATAPGKYITWTTDNSQQLQNIISMLNSAENLEERNPEVRLIMKVNTSPSAGYIRFYNEFAKRPIMYLNYVYTKAEVKFTNTEKLLTTIHKGLIKALDLGMGQEILVYSPIVSMTKIQKTPLPERKALPIRWITWMSYLEDPRIQFHYDKTLPELQQVPTVTDDIIAKIKHPSEFSMVFYTDGSAIKHPNVNKSHNAGMGIAQVQFKPEFTVINTWSIPLGDHTAQLAEVAAVEFACKKALKIDGPVLIVTDSFYVAESVNKELPYWQSNGFFNNKKKPLKHVSKWKSIADCIQLKPDIIIIHEKGHQPTASTFHTEGNNLADKLATQGSYVVNAGKRTADGSEFEKRTADGSEFESPKKKAKVE

SEQ ID NO: 6400 - protein, 2180 aa, synthetic construct
MPAAKRVKLDGGDKKYSIGLDIGTNSVGWAVITDEYKVPSKKFKVLGNTDRHSIKKNLIGALLFDSGETAEATRLKRTARRRYTRRKNRICYLQEIFSNEMAKVDDSFFHRLEESFLVEEDKKHERHPIFGNIVDEVAYHEKYPTIYHLRKKLVDSTDKADLRLIYLALAHMIKFRGHFLIEGDLNPDNSDVDKLFIQLVQTYNQLFEENPINASGVDAKAILSARLSKSRRLENLIAQLPGEKKNGLFGNLIALSLGLTPNFKSNFDLAEDAKLQLSKDTYDDDLDNLLAQIGDQYADLFLAAKNLSDAILLSDILRVNTEITKAPLSASMIKRYDEHHQDLTLLKALVRQQLPEKYKEIFFDQSKNGYAGYIDGGASQEEFYKFIKPILEKMDGTEELLVKLNREDLLRKQRTFDNGSIPHQIHLGELHAILRRQEDFYPFLKDNREKIEKILTFRIPYYVGPLARGNSRFAWMTRKSEETITPWNFEEVVDKGASAQSFIERMTNFDKNLPNEKVLPKHSLLYEYFTVYNELTKVKYVTEGMRKPAFLSGEQKKAIVDLLFKTNRKVTVKQLKEDYFKKIECFDSVEISGVEDRFNASLGTYHDLLKIIKDKDFLDNEENEDILEDIVLTLTLFEDREMIEERLKTYAHLFDDKVMKQLKRRRYTGWGRLSRKLINGIRDKQSGKTILDFLKSDGFANRNFMQLIHDDSLTFKEDIQKAQVSGQGDSLHEHIANLAGSPAIKKGILQTVKVVDELVKVMGRHKPENIVIEMARENQTTQKGQKNSRERMKRIEEGIKELGSQILKEHPVENTQLQNEKLYLYYLQNGRDMYVDQELDINRLSDYDVDHIVPQSFLKDDSIDNKVLTRSDKARGKSDNVPSEEVVKKMKNYWRQLLNAKLITQRKFDNLTKAERGGLSELDKAGFIKRQLVETRQITKHVAQILDSRMNTKYDENDKLIREVKVITLKSKLVSDFRKDFQFYKVREINNYHHAHDAYLNAVVGTALIKKYPKLESEFVYGDYKVYDVRKMIAKSEQEIGKATAKYFFYSNIMNFFKTEITLANGEIRKRPLIETNGETGEIVWDKGRDFATVRKVLSMPQVNIVKKTEVQTGGFSKESILPKRNSDKLIARKKDWDPKKYGGFDSPTVAYSVLVVAKVEKGKSKKLKSVKELLGITIMERSSFEKNPIDFLEAKGYKEVKKDLIIKLPKYSLFELENGRKRMLASAGELQKGNELALPSKYVNFLYLASHYEKLKGSPEDNEQKQLFVEQHKHYLDEIIEQISEFSKRVILADANLDKVLSAYNKHRDKPIREQAENIIHLFTLTNLGAPAAFKYFDTTIDRKRYTSTKEVLDATLIHQSITGLYETRIDLSQLGGDGGEAAAKEAAAKEAAAKGGMNPLQLLQPLPAEVKGTKLLAHWNSGATITCIPESFLEDEQPIKQTLIKTIHGEKQQNVYYLTFKVKGRKVEAEVIASPYEYILLSPTDVPWLTQQPLQLTILVPLQEYQDRILNKTALPEEQKQQLKALFTKYDNLWQHWENQVGHRKIRPHNIATGDYPPRPQKQYPINPKAKPSIQIVIDDLLKQGVLTPQNSTMNTPVYPVPKPDGRWRMVLDYREVNKTIPLTAAQNQHSAGILATIVRQKYKTTLDLANGFWAHPITPDSYWLTAFTWQGKQYCWTRLPQGFLNSPALFTADAVDLLKEVPNVQVYVDDIYLSHDNPHEHIQQLEKVFQILLQAGYVVSLKKSEIGQRTVEFLGFNITKEGRGLTDTFKTKLLNVTPPKDLKQLQSILGLLNFARNFIPNFAELVQTLYNLIASSKGKYIEWTEDNTKQLNKVIEALNTASNLEERLPDQRLVIKVNTSPSAGYVRYYNESGKKPIMYLNYVFSKAELKFSMLEKLLTTMHKALIKAMDLAMGQEILVYSPIVSMTKIQKTPLPERKALPIRWITWMTYLEDPRIQFHYDKTLPELKHIPDVYTSSIPPLKHPSQYEGVFCTDGSAIKSPDPTKSNNAGMGIVHAIYNPEYKILNQWSIPLGHHTAQMAEIAAVEFACKKALKVPGPVLVITDSFYVAESANKELPYWKSNGFVNNKKEPLKHISKWKSIAECLSIKPDITIQHEKGHQPINTSIHTEGNALADKLATQGSYVVNAGKRTADGSEFEKRTADGSEFESPKKKAKVE

SEQ ID NO: 6401 - protein, 2098 aa, synthetic construct
MPAAKRVKLDGGDKKYSIGLDIGTNSVGWAVITDEYKVPSKKFKVLGNTDRHSIKKNLIGALLFDSGETAEATRLKRTARRRYTRRKNRICYLQEIFSNEMAKVDDSFFHRLEESFLVEEDKKHERHPIFGNIVDEVAYHEKYPTIYHLRKKLVDSTDKADLRLIYLALAHMIKFRGHFLIEGDLNPDNSDVDKLFIQLVQTYNQLFEENPINASGVDAKAILSARLSKSRRLENLIAQLPGEKKNGLFGNLIALSLGLTPNFKSNFDLAEDAKLQLSKDTYDDDLDNLLAQIGDQYADLFLAAKNLSDAILLSDILRVNTEITKAPLSASMIKRYDEHHQDLTLLKALVRQQLPEKYKEIFFDQSKNGYAGYIDGGASQEEFYKFIKPILEKMDGTEELLVKLNREDLLRKQRTFDNGSIPHQIHLGELHAILRRQEDFYPFLKDNREKIEKILTFRIPYYVGPLARGNSRFAWMTRKSEETITPWNFEEVVDKGASAQSFIERMTNFDKNLPNEKVLPKHSLLYEYFTVYNELTKVKYVTEGMRKPAFLSGEQKKAIVDLLFKTNRKVTVKQLKEDYFKKIECFDSVEISGVEDRFNASLGTYHDLLKIIKDKDFLDNEENEDILEDIVLTLTLFEDREMIEERLKTYAHLFDDKVMKQLKRRRYTGWGRLSRKLINGIRDKQSGKTILDFLKSDGFANRNFMQLIHDDSLTFKEDIQKAQVSGQGDSLHEHIANLAGSPAIKKGILQTVKVVDELVKVMGRHKPENIVIEMARENQTTQKGQKNSRERMKRIEEGIKELGSQILKEHPVENTQLQNEKLYLYYLQNGRDMYVDQELDINRLSDYDVDHIVPQSFLKDDSIDNKVLTRSDKARGKSDNVPSEEVVKKMKNYWRQLLNAKLITQRKFDNLTKAERGGLSELDKAGFIKRQLVETRQITKHVAQILDSRMNTKYDENDKLIREVKVITLKSKLVSDFRKDFQFYKVREINNYHHAHDAYLNAVVGTALIKKYPKLESEFVYGDYKVYDVRKMIAKSEQEIGKATAKYFFYSNIMNFFKTEITLANGEIRKRPLIETNGETGEIVWDKGRDFATVRKVLSMPQVNIVKKTEVQTGGFSKESILPKRNSDKLIARKKDWDPKKYGGFDSPTVAYSVLVVAKVEKGKSKKLKSVKELLGITIMERSSFEKNPIDFLEAKGYKEVKKDLIIKLPKYSLFELENGRKRMLASAGELQKGNELALPSKYVNFLYLASHYEKLKGSPEDNEQKQLFVEQHKHYLDEIIEQISEFSKRVILADANLDKVLSAYNKHRDKPIREQAENIIHLFTLTNLGAPAAFKYFDTTIDRKRYTSTKEVLDATLIHQSITGLYETRIDLSQLGGDGGEAAAKEAAAKEAAAKGGVLNLEEEYRLHEKPVPSSIDPSWLQLFPTVWAERAGMGLANQVPPVVVELRSGASPVAVRQYPMSKEAREGIRPHIQRFLDLGVLVPCQSPWNTPLLPVKKPGTNDYRPVQDLREINKRVQDIHPTVPNPYNLLSSLPPSHTWYSVLDLKDAFFCLKLHPNSQPLFAFEWRDPEKGNTGQLTWTRLPQGFKNSPTLFNEALHRDLAPFRALNPQVVLLQYVDDLLVAAPTYRDCKEGTQKLLQELSKLGYRVSAKKAQLCQKEVTYLGYLLKEGKRWLTPARKATVMKIPPPTTPRQVREFLGTAGFCRLWIPGFASLAAPLYPLTKPSIPFIWTEEHQKAFDRIKEALLSAPALALPDLTKPFTLYVDERAGVARGVLTQTLGPWRRPVAYLSKKLDPVASGWPTCLKAVAAVALLLKDADKLTLGQNVTVIASHSLESIVRQPPDRWMTNARMTHYQSLLLNERVSFAPPAVLNPATLLPVESEATPVHRCSEILAEETGTRRDLKDQPLPGVPAWYTDGSSFIAEGKRRAGAAIVDGKRTVWASSLPEGTSAQKAELVALTQALRLAEGKDINIYTDSRYAFATAHIHGAIYKQRGWLTSAGKDIKNKEEILALLEAIHLPKRVAIIHCPGHQKGNDPVATGNRRADEAAKQAALSTRVLAETTKPAGKRTADGSEFEKRTADGSEFESPKKKAKVE

SEQ ID NO: 6402 - protein, 2100 aa, synthetic construct; identical to SEQ ID NO: 4506

SEQ ID NO: 6403 - protein, 2107 aa, synthetic construct
MPAAKRVKLDGGDKKYSIGLDIGTNSVGWAVITDEYKVPSKKFKVLGNTDRHSIKKNLIGALLFDSGETAEATRLKRTARRRYTRRKNRICYLQEIFSNEMAKVDDSFFHRLEESFLVEEDKKHERHPIFGNIVDEVAYHEKYPTIYHLRKKLVDSTDKADLRLIYLALAHMIKFRGHFLIEGDLNPDNSDVDKLFIQLVQTYNQLFEENPINASGVDAKAILSARLSKSRRLENLIAQLPGEKKNGLFGNLIALSLGLTPNFKSNFDLAEDAKLQLSKDTYDDDLDNLLAQIGDQYADLFLAAKNLSDAILLSDILRVNTEITKAPLSASMIKRYDEHHQDLTLLKALVRQQLPEKYKEIFFDQSKNGYAGYIDGGASQEEFYKFIKPILEKMDGTEELLVKLNREDLLRKQRTFDNGSIPHQIHLGELHAILRRQEDFYPFLKDNREKIEKILTFRIPYYVGPLARGNSRFAWMTRKSEETITPWNFEEVVDKGASAQSFIERMTNFDKNLPNEKVLPKHSLLYEYFTVYNELTKVKYVTEGMRKPAFLSGEQKKAIVDLLFKTNRKVTVKQLKEDYFKKIECFDSVEISGVEDRFNASLGTYHDLLKIIKDKDFLDNEENEDILEDIVLTLTLFEDREMIEERLKTYAHLFDDKVMKQLKRRRYTGWGRLSRKLINGIRDKQSGKTILDFLKSDGFANRNFMQLIHDDSLTFKEDIQKAQVSGQGDSLHEHIANLAGSPAIKKGILQTVKVVDELVKVMGRHKPENIVIEMARENQTTQKGQKNSRERMKRIEEGIKELGSQILKEHPVENTQLQNEKLYLYYLQNGRDMYVDQELDINRLSDYDVDHIVPQSFLKDDSIDNKVLTRSDKARGKSDNVPSEEVVKKMKNYWRQLLNAKLITQRKFDNLTKAERGGLSELDKAGFIKRQLVETRQITKHVAQILDSRMNTKYDENDKLIREVKVITLKSKLVSDFRKDFQFYKVREINNYHHAHDAYLNAVVGTALIKKYPKLESEFVYGDYKVYDVRKMIAKSEQEIGKATAKYFFYSNIMNFFKTEITLANGEIRKRPLIETNGETGEIVWDKGRDFATVRKVLSMPQVNIVKKTEVQTGGFSKESILPKRNSDKLIARKKDWDPKKYGGFDSPTVAYSVLVVAKVEKGKSKKLKSVKELLGITIMERSSFEKNPIDFLEAKGYKEVKKDLIIKLPKYSLFELENGRKRMLASAGELQKGNELALPSKYVNFLYLASHYEKLKGSPEDNEQKQLFVEQHKHYLDEIIEQISEFSKRVILADANLDKVLSAYNKHRDKPIREQAENIIHLFTLTNLGAPAAFKYFDTTIDRKRYTSTKEVLDATLIHQSITGLYETRIDLSQLGGDGGEAAAKEAAAKEAAAKEAAAKGGTAPLEEEYRLFLEAPIQNVTLLEQWKREIPKVWAEINPPGLASTQAPIHVQLLSTALPVRVRQYPITLEAKRSLRETIRKFRAAGILRPVHSPWNTPLLPVRKSGTSEYRMVQDLREVNKRVETIHPTVPNPYTLLSLLPPDRIWYSVLDLKDAFFCIPLAPESQLIFAFEWADAEEGESGQLTWTRLPQGFKNSPTLFDEALNRDLQGFRLDHPSVSLLQYVDDLLIAADTQAACLSATRDLLMTLAELGYRVSGKKAQLCQEEVTYLGFKIHKGSRSLSNSRTQAILQIPVPKTKRQVREFLGTIGYCRLWIPGFAELAQPLYAATRGGNDPLVWGEKEEEAFQSLKLALTQPPALALPSLDKPFQLFVEETSGAAKGVLTQALGPWKRPVAYLSKRLDPVAAGWPRCLRAIAAAALLTREASKLTFGQDIEITSSHNLESLLRSPPDKWLTNARITQYQVLLLDPPRVRFKQTAALNPATLLPETDDTLPIHHCLDTLDSLTSTRPDLTDQPLAQAEATLFTDGSSYIRDGKRYAGAAVVTLDSVIWAEPLPIGTSAQKAELIALTKALEWSKDKSVNIYTDSRYAFATLHVHGMIYRERGLLTAGGKAIKNAPEILALLTAVWLPKRVAVMHCKGHQKDDAPTSTGNRRADEVAREVAIRPLSTQATISAGKRTADGSEFEKRTADGSEFESPKKKAKVE

SEQ ID NO: 6404 - protein, 2107 aa, synthetic construct
MPAAKRVKLDGGDKKYSIGLDIGTNSVGWAVITDEYKVPSKKFKVLGNTDRHSIKKNLIGALLFDSGETAEATRLKRTARRRYTRRKNRICYLQEIFSNEMAKVDDSFFHRLEESFLVEEDKKHERHPIFGNIVDEVAYHEKYPTIYHLRKKLVDSTDKADLRLIYLALAHMIKFRGHFLIEGDLNPDNSDVDKLFIQLVQTYNQLFEENPINASGVDAKAILSARLSKSRRLENLIAQLPGEKKNGLFGNLIALSLGLTPNFKSNFDLAEDAKLQLSKDTYDDDLDNLLAQIGDQYADLFLAAKNLSDAILLSDILRVNTEITKAPLSASMIKRYDEHHQDLTLLKALVRQQLPEKYKEIFFDQSKNGYAGYIDGGASQEEFYKFIKPILEKMDGTEELLVKLNREDLLRKQRTFDNGSIPHQIHLGELHAILRRQEDFYPFLKDNREKIEKILTFRIPYYVGPLARGNSRFAWMTRKSEETITPWNFEEVVDKGASAQSFIERMTNFDKNLPNEKVLPKHSLLYEYFTVYNELTKVKYVTEGMRKPAFLSGEQKKAIVDLLFKTNRKVTVKQLKEDYFKKIECFDSVEISGVEDRFNASLGTYHDLLKIIKDKDFLDNEENEDILEDIVLTLTLFEDREMIEERLKTYAHLFDDKVMKQLKRRRYTGWGRLSRKLINGIRDKQSGKTILDFLKSDGFANRNFMQLIHDDSLTFKEDIQKAQVSGQGDSLHEHIANLAGSPAIKKGILQTVKVVDELVKVMGRHKPENIVIEMARENQTTQKGQKNSRERMKRIEEGIKELGSQILKEHPVENTQLQNEKLYLYYLQNGRDMYVDQELDINRLSDYDVDHIVPQSFLKDDSIDNKVLTRSDKARGKSDNVPSEEVVKKMKNYWRQLLNAKLITQRKFDNLTKAERGGLSELDKAGFIKRQLVETRQITKHVAQILDSRMNTKYDENDKLIREVKVITLKSKLVSDFRKDFQFYKVREINNYHHAHDAYLNAVVGTALIKKYPKLESEFVYGDYKVYDVRKMIAKSEQEIGKATAKYFFYSNIMNFFKTEITLANGEIRKRPLIETNGETGEIVWDKGRDFATVRKVLSMPQVNIVKKTEVQTGGFSKESILPKRNSDKLIARKKDWDPKKYGGFDSPTVAYSVLVVAKVEKGKSKKLKSVKELLGITIMERSSFEKNPIDFLEAKGYKEVKKDLIIKLPKYSLFELENGRKRMLASAGELQKGNELALPSKYVNFLYLASHYEKLKGSPEDNEQKQLFVEQHKHYLDEIIEQISEFSKRVILADANLDKVLSAYNKHRDKPIREQAENIIHLFTLTNLGAPAAFKYFDTTIDRKRYTSTKEVLDATLIHQSITGLYETRIDLSQLGGDGGEAAAKEAAAKEAAAKEAAAKGGTAPLEEEYRLFLEAPIQNVTLLEQWKREIPKVWAEINPPGLASTQAPIHVQLLSTALPVRVRQYPITLEAKRSLRETIRKFRAAGILRPVHSPWNTPLLPVRKSGTSEYRMVQDLREVNKRVETIHPTVPNPYTLLSLLPPDRIWYSVLDLKDAFFCIPLAPESQLIFAFEWADAEEGESGQLTWTRLPQGFKNSPTLFNEALNRDLQGFRLDHPSVSLLQYVDDLLIAADTQAACLSATRDLLMTLAELGYRVSGKKAQLCQEEVTYLGFKIHKGSRSLSNSRTQAILQIPVPKTKRQVREFLGKIGYCRLFIPGFAELAQPLYAATRPGNDPLVWGEKEEEAFQSLKLALTQPPALALPSLDKPFQLFVEETSGAAKGVLTQALGPWKRPVAYLSKRLDPVAAGWPRCLRAIAAAALLTREASKLTFGQDIEITSSHNLESLLRSPPDKWLTNARITQYQVLLLDPPRVRFKQTAALNPATLLPETDDTLPIHHCLDTLDSLTSTRPDLTDQPLAQAEATLFTDGSSYIRDGKRYAGAAVVTLDSVIWAEPLPIGTSAQKAELIALTKALEWSKDKSVNIYTDSRYAFATLHVHGMIYRERGWLTAGGKAIKNAPEILALLTAVWLPKRVAVMHCKGHQKDDAPTSTGNRRADEVAREVAIRPLSTQATISAGKRTADGSEFEKRTADGSEFESPKKKAKVE

SEQ ID NO: 6405 - protein, 2096 aa, synthetic construct
MPAAKRVKLDGGDKKYSIGLDIGTNSVGWAVITDEYKVPSKKFKVLGNTDRHSIKKNLIGALLFDSGETAEATRLKRTARRRYTRRKNRICYLQEIFSNEMAKVDDSFFHRLEESFLVEEDKKHERHPIFGNIVDEVAYHEKYPTIYHLRKKLVDSTDKADLRLIYLALAHMIKFRGHFLIEGDLNPDNSDVDKLFIQLVQTYNQLFEENPINASGVDAKAILSARLSKSRRLENLIAQLPGEKKNGLFGNLIALSLGLTPNFKSNFDLAEDAKLQLSKDTYDDDLDNLLAQIGDQYADLFLAAKNLSDAILLSDILRVNTEITKAPLSASMIKRYDEHHQDLTLLKALVRQQLPEKYKEIFFDQSKNGYAGYIDGGASQEEFYKFIKPILEKMDGTEELLVKLNREDLLRKQRTFDNGSIPHQIHLGELHAILRRQEDFYPFLKDNREKIEKILTFRIPYYVGPLARGNSRFAWMTRKSEETITPWNFEEVVDKGASAQSFIERMTNFDKNLPNEKVLPKHSLLYEYFTVYNELTKVKYVTEGMRKPAFLSGEQKKAIVDLLFKTNRKVTVKQLKEDYFKKIECFDSVEISGVEDRFNASLGTYHDLLKIIKDKDFLDNEENEDILEDIVLTLTLFEDREMIEERLKTYAHLFDDKVMKQLKRRRYTGWGRLSRKLINGIRDKQSGKTILDFLKSDGFANRNFMQLIHDDSLTFKEDIQKAQVSGQGDSLHEHIANLAGSPAIKKGILQTVKVVDELVKVMGRHKPENIVIEMARENQTTQKGQKNSRERMKRIEEGIKELGSQILKEHPVENTQLQNEKLYLYYLQNGRDMYVDQELDINRLSDYDVDHIVPQSFLKDDSIDNKVLTRSDKARGKSDNVPSEEVVKKMKNYWRQLLNAKLITQRKFDNLTKAERGGLSELDKAGFIKRQLVETRQITKHVAQILDSRMNTKYDENDKLIREVKVITLKSKLVSDFRKDFQFYKVREINNYHHAHDAYLNAVVGTALIKKYPKLESEFVYGDYKVYDVRKMIAKSEQEIGKATAKYFFYSNIMNFFKTEITLANGEIRKRPLIETNGETGEIVWDKGRDFATVRKVLSMPQVNIVKKTEVQTGGFSKESILPKRNSDKLIARKKDWDPKKYGGFDSPTVAYSVLVVAKVEKGKSKKLKSVKELLGITIMERSSFEKNPIDFLEAKGYKEVKKDLIIKLPKYSLFELENGRKRMLASAGELQKGNELALPSKYVNFLYLASHYEKLKGSPEDNEQKQLFVEQHKHYLDEIIEQISEFSKRVILADANLDKVLSAYNKHRDKPIREQAENIIHLFTLTNLGAPAAFKYFDTTIDRKRYTSTKEVLDATLIHQSITGLYETRIDLSQLGGDGGEAAAKEAAAKEAAAKEAAAKGGVPWILKKPLELTIKLDLEEQQGTLLNNSILSKKGKEELKQLFEKYSALWQSWENQVGHRRIRPHKIATGTVKPTPQKQYHINPKAKPDIQIVINDLLKQGVLIQKESTMNTPVYPVPKPNGRWRMVLDYRAVNKVTPLIAVQNQHSYGILGSLFKGRYKTTIDLSNGFWAHPIVPEDYWITAFTWQGKQYCWTVLPQGFLNSPGLFNGDVVDLLQGIPNVEVYVDDVYISHDSEKEHLEYLDILFNRLKEAGYIISLKKSNIANSIVDFLGFQITNEGRGLTDTFKEKLENITAPTTLKQLQSILGLLNFARNFIPDFTELIAPLYALIPKSPKNYVPWQIEHSTTLETLITKLNGAEYLQGRKGDKTLIMKVNASYTTGYIRYYNEGEKKPISYVSIVFSKTELKFTELEKLLTTVHKGLLKALDLSMGQNIHVYSPIVSMQNIQKTPQTAKKALASRWLSWLSYLEDPRIRFFYDPQMPALKDLPAVDTGKDNKKHPSNFQHIFYTDGSAITSPTKEGHLNAGMGIVYFINKDGNLQKQQEWSISLGNHTAQFAEIAAFEFALKKCLPLGGNILVVTDSNYVAKAYNEELDVWASNGFVNNRKKPLKHISKWKSVADLKRLRPDVVVTHEPGHQKLDSSPHAYGNNLADQLATQASFKVHAGKRTADGSEFEKRTADGSEFESPKKKAKVE

SEQ ID NO: 6406 - protein, 2185 aa, synthetic construct
MPAAKRVKLDGGDKKYSIGLDIGTNSVGWAVITDEYKVPSKKFKVLGNTDRHSIKKNLIGALLFDSGETAEATRLKRTARRRYTRRKNRICYLQEIFSNEMAKVDDSFFHRLEESFLVEEDKKHERHPIFGNIVDEVAYHEKYPTIYHLRKKLVDSTDKADLRLIYLALAHMIKFRGHFLIEGDLNPDNSDVDKLFIQLVQTYNQLFEENPINASGVDAKAILSARLSKSRRLENLIAQLPGEKKNGLFGNLIALSLGLTPNFKSNFDLAEDAKLQLSKDTYDDDLDNLLAQIGDQYADLFLAAKNLSDAILLSDILRVNTEITKAPLSASMIKRYDEHHQDLTLLKALVRQQLPEKYKEIFFDQSKNGYAGYIDGGASQEEFYKFIKPILEKMDGTEELLVKLNREDLLRKQRTFDNGSIPHQIHLGELHAILRRQEDFYPFLKDNREKIEKILTFRIPYYVGPLARGNSRFAWMTRKSEETITPWNFEEVVDKGASAQSFIERMTNFDKNLPNEKVLPKHSLLYEYFTVYNELTKVKYVTEGMRKPAFLSGEQKKAIVDLLFKTNRKVTVKQLKEDYFKKIECFDSVEISGVEDRFNASLGTYHDLLKIIKDKDFLDNEENEDILEDIVLTLTLFEDREMIEERLKTYAHLFDDKVMKQLKRRRYTGWGRLSRKLINGIRDKQSGKTILDFLKSDGFANRNFMQLIHDDSLTFKEDIQKAQVSGQGDSLHEHIANLAGSPAIKKGILQTVKVVDELVKVMGRHKPENIVIEMARENQTTQKGQKNSRERMKRIEEGIKELGSQILKEHPVENTQLQNEKLYLYYLQNGRDMYVDQELDINRLSDYDVDHIVPQSFLKDDSIDNKVLTRSDKARGKSDNVPSEEVVKKMKNYWRQLLNAKLITQRKFDNLTKAERGGLSELDKAGFIKRQLVETRQITKHVAQILDSRMNTKYDENDKLIREVKVITLKSKLVSDFRKDFQFYKVREINNYHHAHDAYLNAVVGTALIKKYPKLESEFVYGDYKVYDVRKMIAKSEQEIGKATAKYFFYSNIMNFFKTEITLANGEIRKRPLIETNGETGEIVWDKGRDFATVRKVLSMPQVNIVKKTEVQTGGFSKESILPKRNSDKLIARKKDWDPKKYGGFDSPTVAYSVLVVAKVEKGKSKKLKSVKELLGITIMERSSFEKNPIDFLEAKGYKEVKKDLIIKLPKYSLFELENGRKRMLASAGELQKGNELALPSKYVNFLYLASHYEKLKGSPEDNEQKQLFVEQHKHYLDEIIEQISEFSKRVILADANLDKVLSAYNKHRDKPIREQAENIIHLFTLTNLGAPAAFKYFDTTIDRKRYTSTKEVLDATLIHQSITGLYETRIDLSQLGGDGGEAAAKEAAAKEAAAKEAAAKGGMNPLQLLQPLPAEIKGTKLLAHWNSGATITCIPESFLEDEQPIKKTLIKTIHGEKQQNVYYVTFKVKGRKVEAEVIASPYEYILLSPTDVPWLTQQPLQLTILVPLQEYQEKILSKTALPEDQKQQLKTLFVKYDNLWQHWENQVGHRKIRPHNIATGDYPPRPQKQYPINPKAKPSIQIVIDDLLKQGVLTPQNSTMNTPVYPVPKPDGRWRMVLDYREVNKTIPLTAAQNQHSAGILATIVRQKYKTTLDLANGFWAHPITPESYWLTAFTWQGKQYCWTRLPQGFLNSPALFTADVVDLLKEIPNVQVYVDDIYLSHDDPKEHVQQLEKVFQILLQAGYVVSLKKSEIGQKTVEFLGFNITKEGRGLTDTFKTKLLNITPPKDLKQLQSILGLLNFARNFIPNFAELVQPLYNLIASAKGKYIEWSEENTKQLNMVIEALNTASNLEERLPEQRLVIKVNTSPSAGYVRYYNETGKKPIMYLNYVFSKAELKFSMLEKLLTTMHKALIKAMDLAMGQEILVYSPIVSMTKIQKTPLPERKALPIRWITWMTYLEDPRIQFHYDKTLPELKHIPDVYTSSQSPVKHPSQYEGVFYTDGSAIKSPDPTKSNNAGMGIVHATYKPEYQVLNQWSIPLGNHTAQMAEIAAVEFACKKALKIPGPVLVITDSFYVAESANKELPYWKSNGFVNNKKKPLKHISKWKSIAECLSMKPDITIQHEKGISLQIPVFILKGNALADKLATQGSYVVNAGKRTADGSEFEKRTADGSEFESPKKKAKVE

SEQ ID NO: 6407 - protein, 2103 aa, synthetic construct
MPAAKRVKLDGGDKKYSIGLDIGTNSVGWAVITDEYKVPSKKFKVLGNTDRHSIKKNLIGALLFDSGETAEATRLKRTARRRYTRRKNRICYLQEIFSNEMAKVDDSFFHRLEESFLVEEDKKHERHPIFGNIVDEVAYHEKYPTIYHLRKKLVDSTDKADLRLIYLALAHMIKFRGHFLIEGDLNPDNSDVDKLFIQLVQTYNQLFEENPINASGVDAKAILSARLSKSRRLENLIAQLPGEKKNGLFGNLIALSLGLTPNFKSNFDLAEDAKLQLSKDTYDDDLDNLLAQIGDQYADLFLAAKNLSDAILLSDILRVNTEITKAPLSASMIKRYDEHHQDLTLLKALVRQQLPEKYKEIFFDQSKNGYAGYIDGGASQEEFYKFIKPILEKMDGTEELLVKLNREDLLRKQRTFDNGSIPHQIHLGELHAILRRQEDFYPFLKDNREKIEKILTFRIPYYVGPLARGNSRFAWMTRKSEETITPWNFEEVVDKGASAQSFIERMTNFDKNLPNEKVLPKHSLLYEYFTVYNELTKVKYVTEGMRKPAFLSGEQKKAIVDLLFKTNRKVTVKQLKEDYFKKIECFDSVEISGVEDRFNASLGTYHDLLKIIKDKDFLDNEENEDILEDIVLTLTLFEDREMIEERLKTYAHLFDDKVMKQLKRRRYTGWGRLSRKLINGIRDKQSGKTILDFLKSDGFANRNFMQLIHDDSLTFKEDIQKAQVSGQGDSLHEHIANLAGSPAIKKGILQTVKVVDELVKVMGRHKPENIVIEMARENQTTQKGQKNSRERMKRIEEGIKELGSQILKEHPVENTQLQNEKLYLYYLQNGRDMYVDQELDINRLSDYDVDHIVPQSFLKDDSIDNKVLTRSDKARGKSDNVPSEEVVKKMKNYWRQLLNAKLITQRKFDNLTKAERGGLSELDKAGFIKRQLVETRQITKHVAQILDSRMNTKYDENDKLIREVKVITLKSKLVSDFRKDFQFYKVREINNYHHAHDAYLNAVVGTALIKKYPKLESEFVYGDYKVYDVRKMIAKSEQEIGKATAKYFFYSNIMNFFKTEITLANGEIRKRPLIETNGETGEIVWDKGRDFATVRKVLSMPQVNIVKKTEVQTGGFSKESILPKRNSDKLIARKKDWDPKKYGGFDSPTVAYSVLVVAKVEKGKSKKLKSVKELLGITIMERSSFEKNPIDFLEAKGYKEVKKDLIIKLPKYSLFELENGRKRMLASAGELQKGNELALPSKYVNFLYLASHYEKLKGSPEDNEQKQLFVEQHKHYLDEIIEQISEFSKRVILADANLDKVLSAYNKHRDKPIREQAENIIHLFTLTNLGAPAAFKYFDTTIDRKRYTSTKEVLDATLIHQSITGLYETRIDLSQLGGDGGEAAAKEAAAKEAAAKEAAAKGGVLNLEEEYRLHEKPVPSSIDPSWLQLFPTVWAERAGMGLANQVPPVVVELRSGASPVAVRQYPMSKEAREGIRPHIQKFLDLGVLVPCRSPWNTPLLPVKKPGTNDYRPVQDLREINKRVQDIHPTVPNPYNLLSSLPPSYTWYSVLDLKDAFFCLRLHPNSQPLFAFEWKDPEKGNTGQLTWTRLPQGFKNSPTLFNEALHRDLAPFRALNPQVVLLQYVDDLLVAAPTYEDCKKGTQKLLQELSKLGYRVSAKKAQLCQREVTYLGYLLKEGKRWLTPARKATVMKIPVPTTPRQVREFLGKAGFCRLFIPGFASLAAPLYPLTKPSIPFIWTEEHQQAFDHIKKALLSAPALALPDLTKPFTLYIDERAGVARGVLTQTLGPWRRPVAYLSKKLDPVASGWPTCLKAVAAVALLLKDADKLTLGQNVTVIASHSLESIVRQPPDRWMTNARMTHYQSLLLNERVSFAPPAVLNPATLLPVESEATPVHRCSEILAEETGTRRDLEDQPLPGVPTWYTDGSSFITEGKRRAGAPIVDGKRTVWASSLPEGTSAQKAELVALTQALRLAEGKNINIYTDSRYAFATAHIHGAIYKQRGWLTSAGKDIKNKEEILALLEAIHLPRRVAIIHCPGHQRGSNPVATGNRRADEAAKQAALSTRVLAGTTKPAGKRTADGSEFEKRTADGSEFESPKKKAKVE

SEQ ID NO: 6408 - protein, 2136 aa, synthetic construct
MPAAKRVKLDGGDKKYSIGLDIGTNSVGWAVITDEYKVPSKKFKVLGNTDRHSIKKNLIGALLFDSGETAEATRLKRTARRRYTRRKNRICYLQEIFSNEMAKVDDSFFHRLEESFLVEEDKKHERHPIFGNIVDEVAYHEKYPTIYHLRKKLVDSTDKADLRLIYLALAHMIKFRGHFLIEGDLNPDNSDVDKLFIQLVQTYNQLFEENPINASGVDAKAILSARLSKSRRLENLIAQLPGEKKNGLFGNLIALSLGLTPNFKSNFDLAEDAKLQLSKDTYDDDLDNLLAQIGDQYADLFLAAKNLSDAILLSDILRVNTEITKAPLSASMIKRYDEHHQDLTLLKALVRQQLPEKYKEIFFDQSKNGYAGYIDGGASQEEFYKFIKPILEKMDGTEELLVKLNREDLLRKQRTFDNGSIPHQIHLGELHAILRRQEDFYPFLKDNREKIEKILTFRIPYYVGPLARGNSRFAWMTRKSEETITPWNFEEVVDKGASAQSFIERMTNFDKNLPNEKVLPKHSLLYEYFTVYNELTKVKYVTEGMRKPAFLSGEQKKAIVDLLFKTNRKVTVKQLKEDYFKKIECFDSVEISGVEDRFNASLGTYHDLLKIIKDKDFLDNEENEDILEDIVLTLTLFEDREMIEERLKTYAHLFDDKVMKQLKRRRYTGWGRLSRKLINGIRDKQSGKTILDFLKSDGFANRNFMQLIHDDSLTFKEDIQKAQVSGQGDSLHEHIANLAGSPAIKKGILQTVKVVDELVKVMGRHKPENIVIEMARENQTTQKGQKNSRERMKRIEEGIKELGSQILKEHPVENTQLQNEKLYLYYLQNGRDMYVDQELDINRLSDYDVDHIVPQSFLKDDSIDNKVLTRSDKARGKSDNVPSEEVVKKMKNYWRQLLNAKLITQRKFDNLTKAERGGLSELDKAGFIKRQLVETRQITKHVAQILDSRMNTKYDENDKLIREVKVITLKSKLVSDFRKDFQFYKVREINNYHHAHDAYLNAVVGTALIKKYPKLESEFVYGDYKVYDVRKMIAKSEQEIGKATAKYFFYSNIMNFFKTEITLANGEIRKRPLIETNGETGEIVWDKGRDFATVRKVLSMPQVNIVKKTEVQTGGFSKESILPKRNSDKLIARKKDWDPKKYGGFDSPTVAYSVLVVAKVEKGKSKKLKSVKELLGITIMERSSFEKNPIDFLEAKGYKEVKKDLIIKLPKYSLFELENGRKRMLASAGELQKGNELALPSKYVNFLYLASHYEKLKGSPEDNEQKQLFVEQHKHYLDEIIEQISEFSKRVILADANLDKVLSAYNKHRDKPIREQAENIIHLFTLTNLGAPAAFKYFDTTIDRKRYTSTKEVLDATLIHQSITGLYETRIDLSQLGGDGGEAAAKEAAAKEAAAKEAAAKGGLLGRDLLTKLKAQIQFSTEGPQVTWEDRPAMCLVLNLEEEYRLHEKPVPPSIDPSWLQLFPMVWAEKAGMGLANQVPPVVVELKSDASPVAVRQYPMSKEAREGIRPHIQRFLDLGILVPCQSPWNTPLLPVKKPGTNDYRPVQDLREVNKRVQDIHPTVPNPYNLLSSLPPSHTWYSVLDLKDAFFCLKLHPNSQPLFAFEWRDPEKGNTGQLTWTRLPQGFKNSPTLFDEALHRDLASFRALNPQVVMLQYVDDLLVAAPTYRDCKEGTRRLLQELSKLGYRVSAKKAQLCREEVTYLGYLLKGGKRWLTPARKATVMKIPTPTTPRQVREFLGTAGFCRLWIPGFASLAAPLYPLTREKVPFTWTEAHQEAFGRIKEALLSAPALALPDLTKPFALYVDEKEGVARGVLTQTLGPWRRPVAYLSKKLDPVASGWPTCLKAIAAVALLLKDADKLTLGQNVLVIAPHNLESIVRQPPDRWMTNARMTHYQSLLLNERVSFAPPAILNPATLLPVESDDTPIHICSEILAEETGTRPDLRDQPLPGVPAWYTDGSSFIMDGRRQAGAAIVDNKRTVWASNLPEGTSAQKAELIALTQALRLAEGKSINIYTDSRYAFATAHVHGAIYKQRGLLTSAGKDIKNKEEILALLEAIHLPKRVAIIHCPGHQRGTDPVATGNRKADEAAKQAAQSTRILTETTKNAGKRTADGSEFEKRTADGSEFESPKKKAKVE

SEQ ID NO: 6409 - protein, 2136 aa, synthetic construct
MPAAKRVKLDGGDKKYSIGLDIGTNSVGWAVITDEYKVPSKKFKVLGNTDRHSIKKNLIGALLFDSGETAEATRLKRTARRRYTRRKNRICYLQEIFSNEMAKVDDSFFHRLEESFLVEEDKKHERHPIFGNIVDEVAYHEKYPTIYHLRKKLVDSTDKADLRLIYLALAHMIKFRGHFLIEGDLNPDNSDVDKLFIQLVQTYNQLFEENPINASGVDAKAILSARLSKSRRLENLIAQLPGEKKNGLFGNLIALSLGLTPNFKSNFDLAEDAKLQLSKDTYDDDLDNLLAQIGDQYADLFLAAKNLSDAILLSDILRVNTEITKAPLSASMIKRYDEHHQDLTLLKALVRQQLPEKYKEIFFDQSKNGYAGYIDGGASQEEFYKFIKPILEKMDGTEELLVKLNREDLLRKQRTFDNGSIPHQIHLGELHAILRRQEDFYPFLKDNREKIEKILTFRIPYYVGPLARGNSRFAWMTRKSEETITPWNFEEVVDKGASAQSFIERMTNFDKNLPNEKVLPKHSLLYEYFTVYNELTKVKYVTEGMRKPAFLSGEQKKAIVDLLFKTNRKVTVKQLKEDYFKKIECFDSVEISGVEDRFNASLGTYHDLLKIIKDKDFLDNEENEDILEDIVLTLTLFEDREMIEERLKTYAHLFDDKVMKQLKRRRYTGWGRLSRKLINGIRDKQSGKTILDFLKSDGFANRNFMQLIHDDSLTFKEDIQKAQVSGQGDSLHEHIANLAGSPAIKKGILQTVKVVDELVKVMGRHKPENIVIEMARENQTTQKGQKNSRERMKRIEEGIKELGSQILKEHPVENTQLQNEKLYLYYLQNGRDMYVDQELDINRLSDYDVDHIVPQSFLKDDSIDNKVLTRSDKARGKSDNVPSEEVVKKMKNYWRQLLNAKLITQRKFDNLTKAERGGLSELDKAGFIKRQLVETRQITKHVAQILDSRMNTKYDENDKLIREVKVITLKSKLVSDFRKDFQFYKVREINNYHHAHDAYLNAVVGTALIKKYPKLESEFVYGDYKVYDVRKMIAKSEQEIGKATAKYFFYSNIMNFFKTEITLANGEIRKRPLIETNGETGEIVWDKGRDFATVRKVLSMPQVNIVKKTEVQTGGFSKESILPKRNSDKLIARKKDWDPKKYGGFDSPTVAYSVLVVAKVEKGKSKKLKSVKELLGITIMERSSFEKNPIDFLEAKGYKEVKKDLIIKLPKYSLFELENGRKRMLASAGELQKGNELALPSKYVNFLYLASHYEKLKGSPEDNEQKQLFVEQHKHYLDEIIEQISEFSKRVILADANLDKVLSAYNKHRDKPIREQAENIIHLFTLTNLGAPAAFKYFDTTIDRKRYTSTKEVLDATLIHQSITGLYETRIDLSQLGGDGGEAAAKEAAAKEAAAKEAAAKGGLLGRDLLTKLKAQIQFSTEGPQVTWEDRPAMCLVLNLEEEYRLHEKPVPPSIDPSWLQLFPMVWAEKAGMGLANQVPPVVVELKSDASPVAVRQYPMSKEAREGIRPHIQRFLDLGILVPCQSPWNTPLLPVKKPGTNDYRPVQDLREVNKRVQDIHPTVPNPYNLLSSLPPSHTWYSVLDLKDAFFCLKLHPNSQPLFAFEWRDPEKGNTGQLTWTRLPQGFKNSPTLFNEALHRDLASFRALNPQVVMLQYVDDLLVAAPTYRDCKEGTRRLLQELSKLGYRVSAKKAQLCREEVTYLGYLLKGGKRWLTPARKATVMKIPTPTTPRQVREFLGTAGFCRLWIPGFASLAAPLYPLTRPKVPFTWTEAHQEAFGRIKEALLSAPALALPDLTKPFALYVDEKEGVARGVLTQTLGPWRRPVAYLSKKLDPVASGWPTCLKAIAAVALLLKDADKLTLGQNVLVIAPHNLESIVRQPPDRWMTNARMTHYQSLLLNERVSFAPPAILNPATLLPVESDDTPIHICSEILAEETGTRPDLRDQPLPGVPAWYTDGSSFIMDGRRQAGAAIVDNKRTVWASNLPEGTSAQKAELIALTQALRLAEGKSINIYTDSRYAFATAHVHGAIYKQRGWLTSAGKDIKNKEEILALLEAIHLPKRVAIIHCPGHQRGTDPVATGNRKADEAAKQAAQSTRILTETTKNAGKRTADGSEFEKRTADGSEFESPKKKAKVE

SEQ ID NO: 6410 - protein, 2227 aa, synthetic construct
MPAAKRVKLDGGDKKYSIGLDIGTNSVGWAVITDEYKVPSKKFKVLGNTDRHSIKKNLIGALLFDSGETAEATRLKRTARRRYTRRKNRICYLQEIFSNEMAKVDDSFFHRLEESFLVEEDKKHERHPIFGNIVDEVAYHEKYPTIYHLRKKLVDSTDKADLRLIYLALAHMIKFRGHFLIEGDLNPDNSDVDKLFIQLVQTYNQLFEENPINASGVDAKAILSARLSKSRRLENLIAQLPGEKKNGLFGNLIALSLGLTPNFKSNFDLAEDAKLQLSKDTYDDDLDNLLAQIGDQYADLFLAAKNLSDAILLSDILRVNTEITKAPLSASMIKRYDEHHQDLTLLKALVRQQLPEKYKEIFFDQSKNGYAGYIDGGASQEEFYKFIKPILEKMDGTEELLVKLNREDLLRKQRTFDNGSIPHQIHLGELHAILRRQEDFYPFLKDNREKIEKILTFRIPYYVGPLARGNSRFAWMTRKSEETITPWNFEEVVDKGASAQSFIERMTNFDKNLPNEKVLPKHSLLYEYFTVYNELTKVKYVTEGMRKPAFLSGEQKKAIVDLLFKTNRKVTVKQLKEDYFKKIECFDSVEISGVEDRFNASLGTYHDLLKIIKDKDFLDNEENEDILEDIVLTLTLFEDREMIEERLKTYAHLFDDKVMKQLKRRRYTGWGRLSRKLINGIRDKQSGKTILDFLKSDGFANRNFMQLIHDDSLTFKEDIQKAQVSGQGDSLHEHIANLAGSPAIKKGILQTVKVVDELVKVMGRHKPENIVIEMARENQTTQKGQKNSRERMKRIEEGIKELGSQILKEHPVENTQLQNEKLYLYYLQNGRDMYVDQELDINRLSDYDVDHIVPQSFLKDDSIDNKVLTRSDKARGKSDNVPSEEVVKKMKNYWRQLLNAKLITQRKFDNLTKAERGGLSELDKAGFIKRQLVETRQITKHVAQILDSRMNTKYDENDKLIREVKVITLKSKLVSDFRKDFQFYKVREINNYHHAHDAYLNAVVGTALIKKYPKLESEFVYGDYKVYDVRKMIAKSEQEIGKATAKYFFYSNIMNFFKTEITLANGEIRKRPLIETNGETGEIVWDKGRDFATVRKVLSMPQVNIVKKTEVQTGGFSKESILPKRNSDKLIARKKDWDPKKYGGFDSPTVAYSVLVVAKVEKGKSKKLKSVKELLGITIMERSSFEKNPIDFLEAKGYKEVKKDLIIKLPKYSLFELENGRKRMLASAGELQKGNELALPSKYVNFLYLASHYEKLKGSPEDNEQKQLFVEQHKHYLDEIIEQISEFSKRVILADANLDKVLSAYNKHRDKPIREQAENIIHLFTLTNLGAPAAFKYFDTTIDRKRYTSTKEVLDATLIHQSITGLYETRIDLSQLGGDGGEAAAKEAAAKEAAAKEAAAKGGTLGDQGSRGSDPLPEPRVTLTVEGIPTEFLVNTGAEHSVLTKPMGKMGSKRTVVAGATGSKVYPWTTKRLLKIGQKQVTHSFLVIPECPAPLLGRDLLTKLKAQIQFSTEGPQVTWEDRPAMCLVLNLEEEYRLHEKPVPPSIDPSWLQLFPMVWAEKAGMGLANQVPPVVVELKSDASPVAVRQYPMSKEAREGIRPHIQRFLDLGILVPCQSPWNTPLLPVKKPGTNDYRPVQDLREVNKRVQDIHPTVPNPYNLLSSLPPSHTWYSVLDLKDAFFCLKLHPNSQPLFAFEWRDPEKGNTGQLTWTRLPQGFKNSPTLFNEALHRDLASFRALNPQVVMLQYVDDLLVAAPTYRDCKEGTRRLLQELSKLGYRVSAKKAQLCREEVTYLGYLLKGGKRWLTPARKATVMKIPTPTTPRQVREFLGTAGFCRLWIPGFASLAAPLYPLTRPKVPFTWTEAHQEAFGRIKEALLSAPALALPDLTKPFALYVDEKEGVARGVLTQTLGPWRRPVAYLSKKLDPVASGWPTCLKAIAAVALLLKDADKLTLGQNVLVIAPHNLESIVRQPPDRWMTNARMTHYQSLLLNERVSFAPPAILNPATLLPVESDDTPIHICSEILAEETGTRPDLRDQPLPGVPAWYTDGSSFIMDGRRQAGAAIVDNKRTVWASNLPEGTSAQKAELIALTQALRLAEGKSINIYTDSRYAFATAHVHGAIYKQRGWLTSAGKDIKNKEEILALLEAIHLPKRVAIIHCPGHQRGTDPVATGNRKADEAAKQAAQSTRILTETTKNAGKRTADGSEFEKRTADGSEFESPKKKAKVE

SEQ ID NO: 6411 - protein, 2105 aa, synthetic construct
MPAAKRVKLDGGDKKYSIGLDIGTNSVGWAVITDEYKVPSKKFKVLGNTDRHSIKKNLIGALLFDSGETAEATRLKRTARRRYTRRKNRICYLQEIFSNEMAKVDDSFFHRLEESFLVEEDKKHERHPIFGNIVDEVAYHEKYPTIYHLRKKLVDSTDKADLRLIYLALAHMIKFRGHFLIEGDLNPDNSDVDKLFIQLVQTYNQLFEENPINASGVDAKAILSARLSKSRRLENLIAQLPGEKKNGLFGNLIALSLGLTPNFKSNFDLAEDAKLQLSKDTYDDDLDNLLAQIGDQYADLFLAAKNLSDAILLSDILRVNTEITKAPLSASMIKRYDEHHQDLTLLKALVRQQLPEKYKEIFFDQSKNGYAGYIDGGASQEEFYKFIKPILEKMDGTEELLVKLNREDLLRKQRTFDNGSIPHQIHLGELHAILRRQEDFYPFLKDNREKIEKILTFRIPYYVGPLARGNSRFAWMTRKSEETITPWNFEEVVDKGASAQSFIERMTNFDKNLPNEKVLPKHSLLYEYFTVYNELTKVKYVTEGMRKPAFLSGEQKKAIVDLLFKTNRKVTVKQLKEDYFKKIECFDSVEISGVEDRFNASLGTYHDLLKIIKDKDFLDNEENEDILEDIVLTLTLFEDREMIEERLKTYAHLFDDKVMKQLKRRRYTGWGRLSRKLINGIRDKQSGKTILDFLKSDGFANRNFMQLIHDDSLTFKEDIQKAQVSGQGDSLHEHIANLAGSPAIKKGILQTVKVVDELVKVMGRHKPENIVIEMARENQTTQKGQKNSRERMKRIEEGIKELGSQILKEHPVENTQLQNEKLYLYYLQNGRDMYVDQELDINRLSDYDVDHIVPQSFLKDDSIDNKVLTRSDKARGKSDNVPSEEVVKKMKNYWRQLLNAKLITQRKFDNLTKAERGGLSELDKAGFIKRQLVETRQITKHVAQILDSRMNTKYDENDKLIREVKVITLKSKLVSDFRKDFQFYKVREINNYHHAHDAYLNAVVGTALIKKYPKLESEFVYGDYKVYDVRKMIAKSEQEIGKATAKYFFYSNIMNFFKTEITLANGEIRKRPLIETNGETGEIVWDKGRDFATVRKVLSMPQVNIVKKTEVQTGGFSKESILPKRNSDKLIARKKDWDPKKYGGFDSPTVAYSVLVVAKVEKGKSKKLKSVKELLGITIMERSSFEKNPIDFLEAKGYKEVKKDLIIKLPKYSLFELENGRKRMLASAGELQKGNELALPSKYVNFLYLASHYEKLKGSPEDNEQKQLFVEQHKHYLDEIIEQISEFSKRVILADANLDKVLSAYNKHRDKPIREQAENIIHLFTLTNLGAPAAFKYFDTTIDRKRYTSTKEVLDATLIHQSITGLYETRIDLSQLGGDGGEAAAKEAAAKEAAAKEAAAKGGTLNIEDEHRLHETSKEPDVSLGSTWLSDFPQAWAETGGMGLAVRQAPLIIPLKATSTPVSIKQYPMSQEARLGIKPHIQRLLDQGILVPCQSPWNTPLLPVKKPGTNDYRPVQDLREVNKRVEDIHPTVPNPYNLLSGLPPSHQWYTVLDLKDAFFCLRLHPTSQPLFAFEWRDPEMGISGQLTWTRLPQGFKNSPTLFDEALHRDLADFRIQHPDLILLQYVDDLLLAATSELDCQQGTRALLQTLGNLGYRASAKKAQICQKQVKYLGYLLKEGQRWLTEARKETVMGQPTPKTPRQLREFLGTAGFCRLWIPGFAEMAAPLYPLTKTGTLFNWGPDQQKAYQEIKQALLTAPALGLPDLTKPFELFVDEKQGYAKGVLTQKLGPWRRPVAYLSKKLDPVAAGWPPCLRMVAAIAVLTKDAGKLTMGQPLVILAPHAVEALVKQPPDRWLSNARMTHYQALLLDTDRVQFGPVVALNPATLLPLPEEGLQHNCLDILAEAHGTRPDLTDQPLPDADHTWYTDGSSLLQEGQRKAGAAVTTETEVIWAKALPAGTSAQRAELIALTQALKMAEGKKLNVYTDSRYAFATAHIHGEIYRRRGLLTSEGKEIKNKDEILALLKALFLPKRLSIIHCPGHQKGHSAEARGNRMADQAARKAAITETPDTSTLLAGKRTADGSEFEKRTADGSEFESPKKKAKVE

SEQ ID NO: 6412 - protein, 2099 aa, synthetic construct
MPAAKRVKLDGGDKKYSIGLDIGTNSVGWAVITDEYKVPSKKFKVLGNTDRHSIKKNLIGALLFDSGETAEATRLKRTARRRYTRRKNRICYLQEIFSNEMAKVDDSFFHRLEESFLVEEDKKHERHPIFGNIVDEVAYHEKYPTIYHLRKKLVDSTDKADLRLIYLALAHMIKFRGHFLIEGDLNPDNSDVDKLFIQLVQTYNQLFEENPINASGVDAKAILSARLSKSRRLENLIAQLPGEKKNGLFGNLIALSLGLTPNFKSNFDLAEDAKLQLSKDTYDDDLDNLLAQIGDQYADLFLAAKNLSDAILLSDILRVNTEITKAPLSASMIKRYDEHHQDLTLLKALVRQQLPEKYKEIFFDQSKNGYAGYIDGGASQEEFYKFIKPILEKMDGTEELLVKLNREDLLRKQRTFDNGSIPHQIHLGELHAILRRQEDFYPFLKDNREKIEKILTFRIPYYVGPLARGNSRFAWMTRKSEETITPWNFEEVVDKGASAQSFIERMTNFDKNLPNEKVLPKHSLLYEYFTVYNELTKVKYVTEGMRKPAFLSGEQKKAIVDLLFKTNRKVTVKQLKEDYFKKIECFDSVEISGVEDRFNASLGTYHDLLKIIKDKDFLDNEENEDILEDIVLTLTLFEDREMIEERLKTYAHLFDDKVMKQLKRRRYTGWGRLSRKLINGIRDKQSGKTILDFLKSDGFANRNFMQLIHDDSLTFKEDIQKAQVSGQGDSLHEHIANLAGSPAIKKGILQTVKVVDELVKVMGRHKPENIVIEMARENQTTQKGQKNSRERMKRIEEGIKELGSQILKEHPVENTQLQNEKLYLYYLQNGRDMYVDQELDINRLSDYDVDHIVPQSFLKDDSIDNKVLTRSDKARGKSDNVPSEEVVKKMKNYWRQLLNAKLITQRKFDNLTKAERGGLSELDKAGFIKRQLVETRQITKHVAQILDSRMNTKYDENDKLIREVKVITLKSKLVSDFRKDFQFYKVREINNYHHAHDAYLNAVVGTALIKKYPKLESEFVYGDYKVYDVRKMIAKSEQEIGKATAKYFFYSNIMNFFKTEITLANGEIRKRPLIETNGETGEIVWDKGRDFATVRKVLSMPQVNIVKKTEVQTGGFSKESILPKRNSDKLIARKKDWDPKKYGGFDSPTVAYSVLVVAKVEKGKSKKLKSVKELLGITIMERSSFEKNPIDFLEAKGYKEVKKDLIIKLPKYSLFELENGRKRMLASAGELQKGNELALPSKYVNFLYLASHYEKLKGSPEDNEQKQLFVEQHKHYLDEIIEQISEFSKRVILADANLDKVLSAYNKHRDKPIREQAENIIHLFTLTNLGAPAAFKYFDTTIDRKRYTSTKEVLDATLIHQSITGLYETRIDLSQLGGDGGEAAAKEAAAKEAAAKEAAAKGGTLQLDDEYRLYSPLVKPDQNIQFWLEQFPQAWAETAGMGLAKQVPPQVIQLKASATPVSVRQYPLSKEAQEGIRPHVQRLIQQGILVPVQSPWNTPLLPVRKPGTNDYRPVQDLREVNKRVQDIHPTVPNPYNLLCALPPQRSWYTVLDLKDAFFCLRLHPTSQPLFAFEWRDPGTGRTGQLTWTRLPQGFKNSPTIFDEALHRDLANFRIQHPQVTLLQYVDDLLLAGATKQDCLEGTKALLLELSDLGYRASAKKAQICRREVTYLGYSLRDGQRWLTEARKKTVVQIPAPTTAKQVREFLGTAGFCRLWIPGFATLAAPLYPLTKEKGEFSWAPEHQKAFDAIKKALLSAPALALPDVTKPFTLYVDERKGVARGVLTQTLGPWRRPVAYLSKKLDPVASGWPVCLKAIAAVAILVKDADKLTLGQNITVIAPHALENIVRQPPDRWMTNARMTHYQSLLLTERVTFAPPAALNPATLLPEETDEPVTHDCHQLLIEETGVRKDLTDIPLTGEVLTWFTDGSSYVVEGKRMAGAAVVDGTRTIWASSLPEGTSAQKAELMALTQALRLAEGKSINIYTDSRYAFATAHVHGAIYKQRGLLTSAGREIKNKEEILSLLEALHLPKRLAIIHCPGHQKAKDPISRGNQMADRVAKQAAQGVNLLAGKRTADGSEFEKRTADGSEFESPKKKAKVE

SEQ ID NO: 6413 - protein, 2099 aa, synthetic construct; identical to SEQ ID NO: 6412

SEQ ID NO: 6414 - protein, 2096 aa, synthetic construct
MPAAKRVKLDGGDKKYSIGLDIGTNSVGWAVITDEYKVPSKKFKVLGNTDRHSIKKNLIGALLFDSGETAEATRLKRTARRRYTRRKNRICYLQEIFSNEMAKVDDSFFHRLEESFLVEEDKKHERHPIFGNIVDEVAYHEKYPTIYHLRKKLVDSTDKADLRLIYLALAHMIKFRGHFLIEGDLNPDNSDVDKLFIQLVQTYNQLFEENPINASGVDAKAILSARLSKSRRLENLIAQLPGEKKNGLFGNLIALSLGLTPNFKSNFDLAEDAKLQLSKDTYDDDLDNLLAQIGDQYADLFLAAKNLSDAILLSDILRVNTEITKAPLSASMIKRYDEHHQDLTLLKALVRQQLPEKYKEIFFDQSKNGYAGYIDGGASQEEFYKFIKPILEKMDGTEELLVKLNREDLLRKQRTFDNGSIPHQIHLGELHAILRRQEDFYPFLKDNREKIEKILTFRIPYYVGPLARGNSRFAWMTRKSEETITPWNFEEVVDKGASAQSFIERMTNFDKNLPNEKVLPKHSLLYEYFTVYNELTKVKYVTEGMRKPAFLSGEQKKAIVDLLFKTNRKVTVKQLKEDYFKKIECFDSVEISGVEDRFNASLGTYHDLLKIIKDKDFLDNEENEDILEDIVLTLTLFEDREMIEERLKTYAHLFDDKVMKQLKRRRYTGWGRLSRKLINGIRDKQSGKTILDFLKSDGFANRNFMQLIHDDSLTFKEDIQKAQVSGQGDSLHEHIANLAGSPAIKKGILQTVKVVDELVKVMGRHKPENIVIEMARENQTTQKGQKNSRERMKRIEEGIKELGSQILKEHPVENTQLQNEKLYLYYLQNGRDMYVDQELDINRLSDYDVDHIVPQSFLKDDSIDNKVLTRSDKARGKSDNVPSEEVVKKMKNYWRQLLNAKLITQRKFDNLTKAERGGLSELDKAGFIKRQLVETRQITKHVAQILDSRMNTKYDENDKLIREVKVITLKSKLVSDFRKDFQFYKVREINNYHHAHDAYLNAVVGTALIKKYPKLESEFVYGDYKVYDVRKMIAKSEQEIGKATAKYFFYSNIMNFFKTEITLANGEIRKRPLIETNGETGEIVWDKGRDFATVRKVLSMPQVNIVKKTEVQTGGFSKESILPKRNSDKLIARKKDWDPKKYGGFDSPTVAYSVLVVAKVEKGKSKKLKSVKELLGITIMERSSFEKNPIDFLEAKGYKEVKKDLIIKLPKYSLFELENGRKRMLASAGELQKGNELALPSKYVNFLYLASHYEKLKGSPEDNEQKQLFVEQHKHYLDEIIEQISEFSKRVILADANLDKVLSAYNKHRDKPIREQAENIIHLFTLTNLGAPAAFKYFDTTIDRKRYTSTKEVLDATLIHQSITGLYETRIDLSQLGGDGGEAAAKEAAAKEAAAKEAAAKGGVPWLMKKPLQLTVLVPLHEYQERLLQQTALPKEQKELLQKLFLKYDALWQHWENQVGHRRIKPHNIATGTLAPRPQKQYPINPKAKPSIQIVIDDLLKQGVLIQQNSTMNTPVYPVPKPDGKWRMVLDYREVNKTIPLIAAQNQHSAGILSSIYRGKYKTTLDLTNGFWAHPITPESYWLTAFTWQGKQYCWTRLPQGFLNSPALFNADVVDLLKEIPNVQAYVDDIYISHDDPQEHLEQLEKIFSILLNAGYVVSLKKSEIAQREVEFLGFNITKEGRGLTDTFKQKLLNITPPKDLKQLQSILGKLNFARNFIPNYSELVKPLYTIVAPANGKFISWTEDNSNQLQHIISVLNQADNLEERNPETRLIIKVNSSPSAGYIRYYNEGSKRPIMYVNYIFSKAEAKFTQTEKLLTTMHKGLIKAMDLAMGQEILVYSPIVSMTKIQRTPLPERKALPVRWITWMTYLEDPRIQFHYDKSLPELQQIPNVTEDVIAKTKHPSEFAMVFYTDGSAIKHPDVNKSHSAGMGIAQVQFIPEYKIVHQWSIPLGDHTAQLAEIAAVEFACKKALKISGPVLIVTDSFYVAESANKELPYWKSNGFLNNKKKPLRHVSKWKSIAECLQLKPDIIIMHEKGHQQPMTTLHTEGNNLADKLATQGSYVVHAGKRTADGSEFEKRTADGSEFESPKKKAKVE

SEQ ID NO: 6415 - protein, 2185 aa, synthetic construct
MPAAKRVKLDGGDKKYSIGLDIGTNSVGWAVITDEYKVPSKKFKVLGNTDRHSIKKNLIGALLFDSGETAEATRLKRTARRRYTRRKNRICYLQEIFSNEMAKVDDSFFHRLEESFLVEEDKKHERHPIFGNIVDEVAYHEKYPTIYHLRKKLVDSTDKADLRLIYLALAHMIKFRGHFLIEGDLNPDNSDVDKLFIQLVQTYNQLFEENPINASGVDAKAILSARLSKSRRLENLIAQLPGEKKNGLFGNLIALSLGLTPNFKSNFDLAEDAKLQLSKDTYDDDLDNLLAQIGDQYADLFLAAKNLSDAILLSDILRVNTEITKAPLSASMIKRYDEHHQDLTLLKALVRQQLPEKYKEIFFDQSKNGYAGYIDGGASQEEFYKFIKPILEKMDGTEELLVKLNREDLLRKQRTFDNGSIPHQIHLGELHAILRRQEDFYPFLKDNREKIEKILTFRIPYYVGPLARGNSRFAWMTRKSEETITPWNFEEVVDKGASAQSFIERMTNFDKNLPNEKVLPKHSLLYEYFTVYNELTKVKYVTEGMRKPAFLSGEQKKAIVDLLFKTNRKVTVKQLKEDYFKKIECFDSVEISGVEDRFNASLGTYHDLLKIIKDKDFLDNEENEDILEDIVLTLTLFEDREMIEERLKTYAHLFDDKVMKQLKRRRYTGWGRLSRKLINGIRDKQSGKTILDFLKSDGFANRNFMQLIHDDSLTFKEDIQKAQVSGQGDSLHEHIANLAGSPAIKKGILQTVKVVDELVKVMGRHKPENIVIEMARENQTTQKGQKNSRERMKRIEEGIKELGSQILKEHPVENTQLQNEKLYLYYLQNGRDMYVDQELDINRLSDYDVDHIVPQSFLKDDSIDNKVLTRSDKARGKSDNVPSEEVVKKMKNYWRQLLNAKLITQRKFDNLTKAERGGLSELDKAGFIKRQLVETRQITKHVAQILDSRMNTKYDENDKLIREVKVITLKSKLVSDFRKDFQFYKVREINNYHHAHDAYLNAVVGTALIKKYPKLESEFVYGDYKVYDVRKMIAKSEQEIGKATAKYFFYSNIMNFFKTEITLANGEIRKRPLIETNGETGEIVWDKGRDFATVRKVLSMPQVNIVKKTEVQTGGFSKESILPKRNSDKLIARKKDWDPKKYGGFDSPTVAYSVLVVAKVEKGKSKKLKSVKELLGITIMERSSFEKNPIDFLEAKGYKEVKKDLIIKLPKYSLFELENGRKRMLASAGELQKGNELALPSKYVNFLYLASHYEKLKGSPEDNEQKQLFVEQHKHYLDEIIEQISEFSKRVILADANLDKVLSAYNKHRDKPIREQAENIIHLFTLTNLGAPAAFKYFDTTIDRKRYTSTKEVLDATLIHQSITGLYETRIDLSQLGGDGGEAAAKEAAAKEAAAKEAAAKGGMDPLQLLQPLEAEIKGTKLKAHWNSGATITCVPEAFLEDERPIQTMLIKTIHGEKQQDVYYLTFKVQGRKVEAEVLASPYDYILLNPSDVPWLMKKPLQLTVLVPLHEYQERLLQQTALPKEQKELLQKLFLKYDALWQHWENQVGHRRIKPHNIATGTLAPRPQKQYPINPKAKPSIQIVIDDLLKQGVLIQQNSTMNTPVYPVPKPDGKWRMVLDYREVNKTIPLIAAQNQHSAGILSSIYRGKYKTTLDLTNGFWAHPITPESYWLTAFTWQGKQYCWTRLPQGFLNSPALFNADVVDLLKEIPNVQAYVDDIYISHDDPQEHLEQLEKIFSILLNAGYVVSLKKSEIAQREVEFLGFNITKEGRGLTDTFKQKLLNITPPKDLKQLQSILGLLNFARNFIPNYSELVKPLYTIVAPANGKFISWTEDNSNQLQHIISVLNQADNLEERNPETRLIIKVNSSPSAGYIRYYNEGSKRPIMYVNYIFSKAEAKFTQTEKLLTTMHKGLIKAMDLAMGQEILVYSPIVSMTKIQRTPLPERKALPVRWITWMTYLEDPRIQFHYDKSLPELQQIPNVTEDVIAKTKHPSEFAMVFYTDGSAIKHPDVNKSHSAGMGIAQVQFIPEYKIVHQWSIPLGDHTAQLAEIAAVEFACKKALKISGPVLIVTDSFYVAESANKELPYWKSNGFLNNKKKPLRHVSKWKSIAECLQLKPDIIIMHEKGHQQPMTTLHTEGNNLADKLATQGSYVVHAGKRTADGSEFEKRTADGSEFESPKKKAKVE

SEQ ID NO: 6416 - protein, 2185 aa, synthetic construct
MPAAKRVKLDGGDKKYSIGLDIGTNSVGWAVITDEYKVPSKKFKVLGNTDRHSIKKNLIGALLFDSGETAEATRLKRTARRRYTRRKNRICYLQEIFSNEMAKVDDSFFHRLEESFLVEEDKKHERHPIFGNIVDEVAYHEKYPTIYHLRKKLVDSTDKADLRLIYLALAHMIKFRGHFLIEGDLNPDNSDVDKLFIQLVQTYNQLFEENPINASGVDAKAILSARLSKSRRLENLIAQLPGEKKNGLFGNLIALSLGLTPNFKSNFDLAEDAKLQLSKDTYDDDLDNLLAQIGDQYADLFLAAKNLSDAILLSDILRVNTEITKAPLSASMIKRYDEHHQDLTLLKALVRQQLPEKYKEIFFDQSKNGYAGYIDGGASQEEFYKFIKPILEKMDGTEELLVKLNREDLLRKQRTFDNGSIPHQIHLGELHAILRRQEDFYPFLKDNREKIEKILTFRIPYYVGPLARGNSRFAWMTRKSEETITPWNFEEVVDKGASAQSFIERMTNFDKNLPNEKVLPKHSLLYEYFTVYNELTKVKYVTEGMRKPAFLSGEQKKAIVDLLFKTNRKVTVKQLKEDYFKKIECFDSVEISGVEDRFNASLGTYHDLLKIIKDKDFLDNEENEDILEDIVLTLTLFEDREMIEERLKTYAHLFDDKVMKQLKRRRYTGWGRLSRKLINGIRDKQSGKTILDFLKSDGFANRNFMQLIHDDSLTFKEDIQKAQVSGQGDSLHEHIANLAGSPAIKKGILQTVKVVDELVKVMGRHKPENIVIEMARENQTTQKGQKNSRERMKRIEEGIKELGSQILKEHPVENTQLQNEKLYLYYLQNGRDMYVDQELDINRLSDYDVDHIVPQSFLKDDSIDNKVLTRSDKARGKSDNVPSEEVVKKMKNYWRQLLNAKLITQRKFDNLTKAERGGLSELDKAGFIKRQLVETRQITKHVAQILDSRMNTKYDENDKLIREVKVITLKSKLVSDFRKDFQFYKVREINNYHHAHDAYLNAVVGTALIKKYPKLESEFVYGDYKVYDVRKMIAKSEQEIGKATAKYFFYSNIMNFFKTEITLANGEIRKRPLIETNGETGEIVWDKGRDFATVRKVLSMPQVNIVKKTEVQTGGFSKESILPKRNSDKLIARKKDWDPKKYGGFDSPTVAYSVLVVAKVEKGKSKKLKSVKELLGITIMERSSFEKNPIDFLEAKGYKEVKKDLIIKLPKYSLFELENGRKRMLASAGELQKGNELALPSKYVNFLYLASHYEKLKGSPEDNEQKQLFVEQHKHYLDEIIEQISEFSKRVILADANLDKVLSAYNKHRDKPIREQAENIIHLFTLTNLGAPAAFKYFDTTIDRKRYTSTKEVLDATLIHQSITGLYETRIDLSQLGGDGGEAAAKEAAAKEAAAKEAAAKGGMDPLQLLQPLEAEIKGTKLKAHWNSGATITCVPEAFLEDERPIQTMLIKTIHGEKQQDVYYLTFKVQGRKVEAEVLASPYDYILLNPSDVPWLMKKPLQLTVLVPLHEYQERLLQQTALPKEQKELLQKLFLKYDALWQHWENQVGHRRIKPHNIATGTLAPRPQKQYPINPKAKPSIQIVIDDLLKQGVLIQQNSTMNTPVYPVPKPDGKWRMVLDYREVNKTIPLIAAQNQHSAGILSSIYRGKYKTTLDLTNGFWAHPITPESYWLTAFTWQGKQYCWTRLPQGFLNSPALFNADVVDLLKEIPNVQAYVDDIYISHDDPQEHLEQLEKIFSILLNAGYVVSLKKSEIAQREVEFLGFNITKEGRGLTDTFKQKLLNITPPKDLKQLQSILGKLNFARNFIPNYSELVKPLYTIVAPANGKFISWTEDNSNQLQHIISVLNQADNLEERNPETRLIIKVNSSPSAGYIRYYNEGSKRPIMYVNYIFSKAEAKFTQTEKLLTTMHKGLIKAMDLAMGQEILVYSPIVSMTKIQRTPLPERKALPVRWITWMTYLEDPRIQFHYDKSLPELQQIPNVTEDVIAKTKHPSEFAMVFYTDGSAIKHPDVNKSHSAGMGIAQVQFIPEYKIVHQWSIPLGDHTAQLAEIAAVEFACKKALKISGPVLIVTDSFYVAESANKELPYWKSNGFLNNKKKPLRHVSKWKSIAECLQLKPDIIIMHEKGHQQPMTTLHTEGNNLADKLATQGSYVVHAGKRTADGSEFEKRTADGSEFESPKKKAKVE

SEQ ID NO: 6417 - protein, 2185 aa, synthetic construct
MPAAKRVKLDGGDKKYSIGLDIGTNSVGWAVITDEYKVPSKKFKVLGNTDRHSIKKNLIGALLFDSGETAEATRLKRTARRRYTRRKNRICYLQEIFSNEMAKVDDSFFHRLEESFLVEEDKKHERHPIFGNIVDEVAYHEKYPTIYHLRKKLVDSTDKADLRLIYLALAHMIKFRGHFLIEGDLNPDNSDVDKLFIQLVQTYNQLFEENPINASGVDAKAILSARLSKSRRLENLIAQLPGEKKNGLFGNLIALSLGLTPNFKSNFDLAEDAKLQLSKDTYDDDLDNLLAQIGDQYADLFLAAKNLSDAILLSDILRVNTEITKAPLSASMIKRYDEHHQDLTLLKALVRQQLPEKYKEIFFDQSKNGYAGYIDGGASQEEFYKFIKPILEKMDGTEELLVKLNREDLLRKQRTFDNGSIPHQIHLGELHAILRRQEDFYPFLKDNREKIEKILTFRIPYYVGPLARGNSRFAWMTRKSEETITPWNFEEVVDKGASAQSFIERMTNFDKNLPNEKVLPKHSLLYEYFTVYNELTKVKYVTEGMRKPAFLSGEQKKAIVDLLFKTNRKVTVKQLKEDYFKKIECFDSVEISGVEDRFNASLGTYHDLLKIIKDKDFLDNEENEDILEDIVLTLTLFEDREMIEERLKTYAHLFDDKVMKQLKRRRYTGWGRLSRKLINGIRDKQSGKTILDFLKSDGFANRNFMQLIHDDSLTFKEDIQKAQVSGQGDSLHEHIANLAGSPAIKKGILQTVKVVDELVKVMGRHKPENIVIEMARENQTTQKGQKNSRERMKRIEEGIKELGSQILKEHPVENTQLQNEKLYLYYLQNGRDMYVDQELDINRLSDYDVDHIVPQSFLKDDSIDNKVLTRSDKARGKSDNVPSEEVVKKMKNYWRQLLNAKLITQRKFDNLTKAERGGLSELDKAGFIKRQLVETRQITKHVAQILDSRMNTKYDENDKLIREVKVITLKSKLVSDFRKDFQFYKVREINNYHHAHDAYLNAVVGTALIKKYPKLESEFVYGDYKVYDVRKMIAKSEQEIGKATAKYFFYSNIMNFFKTEITLANGEIRKRPLIETNGETGEIVWDKGRDFATVRKVLSMPQVNIVKKTEVQTGGFSKESILPKRNSDKLIARKKDWDPKKYGGFDSPTVAYSVLVVAKVEKGKSKKLKSVKELLGITIMERSSFEKNPIDFLEAKGYKEVKKDLIIKLPKYSLFELENGRKRMLASAGELQKGNELALPSKYVNFLYLASHYEKLKGSPEDNEQKQLFVEQHKHYLDEIIEQISEFSKRVILADANLDKVLSAYNKHRDKPIREQAENIIHLFTLTNLGAPAAFKYFDTTIDRKRYTSTKEVLDATLIHQSITGLYETRIDLSQLGGDGGEAAAKEAAAKEAAAKEAAAKGGMDPLQLLQPLEAEIKGTKLKAHWNSGATITCVPQAFLEEEVPIKNIWIKTIHGEKEQPVYYLTFKIQGRKVEAEVISSPYDYILVSPSDIPWLMKKPLQLTTLVPLQEYEERLLKQTMLTGSYKEKLQSLFLKYDALWQHWENQVGHRRIKPHHIATGTVNPRPQKQYPINPKAKASIQTVINDLLKQGVLIQQNSIMNTPVYPVPKPDGKWRMVLDYREVNKTIPLIAAQNQHSAGILSSIFRGKYKTTLDLSNGFWAHSITPESYWLTAFTWLGQQYCWTRLPQGFLNSPALFNADVVDLLKEVPNVQVYVDDIYISHDDPREHLEQLEKVFSLLLNAGYVVSLKKSEIAQHEVEFLGFNITKEGRGLTETFKQKLLNITPPRDLKQLQSILGLLNFARNFIPNFSELVKPLYNIIATAPGKYITWTTDNSQQLQNIISMLNSAENLEERNPEVRLIMKVNTSPSAGYIRFYNEFAKRPIMYLNYVYTKAEVKFTNTEKLLTTIHKGLIKALDLGMGQEILVYSPIVSMTKIQKTPLPERKALPIRWITWMSYLEDPRIQFHYDKTLPELQQVPTVTDDIIAKIKHPSEFSMVFYTDGSAIKHPNVNKSHNAGMGIAQVQFKPEFTVINTWSIPLGDHTAQLAEVAAVEFACKKALKIDGPVLIVTDSFYVAESVNKELPYWQSNGFFNNKKKPLKHVSKWKSIADCIQLKPDIIIIHEKGHQPTASTFHTEGNNLADKLATQGSYVVNAGKRTADGSEFEKRTADGSEFESPKKKAKVE

SEQ ID NO: 6418 - protein, 2185 aa, synthetic construct
MPAAKRVKLDGGDKKYSIGLDIGTNSVGWAVITDEYKVPSKKFKVLGNTDRHSIKKNLIGALLFDSGETAEATRLKRTARRRYTRRKNRICYLQEIFSNEMAKVDDSFFHRLEESFLVEEDKKHERHPIFGNIVDEVAYHEKYPTIYHLRKKLVDSTDKADLRLIYLALAHMIKFRGHFLIEGDLNPDNSDVDKLFIQLVQTYNQLFEENPINASGVDAKAILSARLSKSRRLENLIAQLPGEKKNGLFGNLIALSLGLTPNFKSNFDLAEDAKLQLSKDTYDDDLDNLLAQIGDQYADLFLAAKNLSDAILLSDILRVNTEITKAPLSASMIKRYDEHHQDLTLLKALVRQQLPEKYKEIFFDQSKNGYAGYIDGGASQEEFYKFIKPILEKMDGTEELLVKLNREDLLRKQRTFDNGSIPHQIHLGELHAILRRQEDFYPFLKDNREKIEKILTFRIPYYVGPLARGNSRFAWMTRKSEETITPWNFEEVVDKGASAQSFIERMTNFDKNLPNEKVLPKHSLLYEYFTVYNELTKVKYVTEGMRKPAFLSGEQKKAIVDLLFKTNRKVTVKQLKEDYFKKIECFDSVEISGVEDRFNASLGTYHDLLKIIKDKDFLDNEENEDILEDIVLTLTLFEDREMIEERLKTYAHLFDDKVMKQLKRRRYTGWGRLSRKLINGIRDKQSGKTILDFLKSDGFANRNFMQLIHDDSLTFKEDIQKAQVSGQGDSLHEHIANLAGSPAIKKGILQTVKVVDELVKVMGRHKPENIVIEMARENQTTQKGQKNSRERMKRIEEGIKELGSQILKEHPVENTQLQNEKLYLYYLQNGRDMYVDQELDINRLSDYDVDHIVPQSFLKDDSIDNKVLTRSDKARGKSDNVPSEEVVKKMKNYWRQLLNAKLITQRKFDNLTKAERGGLSELDKAGFIKRQLVETRQITKHVAQILDSRMNTKYDENDKLIREVKVITLKSKLVSDFRKDFQFYKVREINNYHHAHDAYLNAVVGTALIKKYPKLESEFVYGDYKVYDVRKMIAKSEQEIGKATAKYFFYSNIMNFFKTEITLANGEIRKRPLIETNGETGEIVWDKGRDFATVRKVLSMPQVNIVKKTEVQTGGFSKESILPKRNSDKLIARKKDWDPKKYGGFDSPTVAYSVLVVAKVEKGKSKKLKSVKELLGITIMERSSFEKNPIDFLEAKGYKEVKKDLIIKLPKYSLFELENGRKRMLASAGELQKGNELALPSKYVNFLYLASHYEKLKGSPEDNEQKQLFVEQHKHYLDEIIEQISEFSKRVILADANLDKVLSAYNKHRDKPIREQAENIIHLFTLTNLGAPAAFKYFDTTIDRKRYTSTKEVLDATLIHQSITGLYETRIDLSQLGGDGGEAAAKEAAAKEAAAKEAAAKGGMDPLQLLQPLEAEIKGTKLKAHWNSGATITCVPQAFLEEEVPIKNIWIKTIHGEKEQPVYYLTFKIQGRKVEAEVISSPYDYILVSPSDIPWLMKKPLQLTTLVPLQEYEERLLKQTMLTGSYKEKLQSLFLKYDALWQHWENQVGHRRIKPHHIATGTVNPRPQKQYPINPKAKASIQTVINDLLKQGVLIQQNSIMNTPVYPVPKPDGKWRMVLDYREVNKTIPLIAAQNQHSAGILSSIFRGKYKTTLDLSNGFWAHSITPESYWLTAFTWLGQQYCWTRLPQGFLNSPALFNADVVDLLKEVPNVQVYVDDIYISHDDPREHLEQLEKVFSLLLNAGYVVSLKKSEIAQHEVEFLGFNITKEGRGLTETFKQKLLNITPPRDLKQLQSILGKLNFARNFIPNFSELVKPLYNIIATAPGKYITWTTDNSQQLQNIISMLNSAENLEERNPEVRLIMKVNTSPSAGYIRFYNEFAKRPIMYLNYVYTKAEVKFTNTEKLLTTIHKGLIKALDLGMGQEILVYSPIVSMTKIQKTPLPERKALPIRWITWMSYLEDPRIQFHYDKTLPELQQVPTVTDDIIAKIKHPSEFSMVFYTDGSAIKHPNVNKSHNAGMGIAQVQFKPEFTVINTWSIPLGDHTAQLAEVAAVEFACKKALKIDGPVLIVTDSFYVAESVNKELPYWQSNGFFNNKKKPLKHVSKWKSIADCIQLKPDIIIIHEKGHQPTASTFHTEGNNLADKLATQGSYVVNAGKRTADGSEFEKRTADGSEFESPKKKAKVE

SEQ ID NO: 6419 - protein, 2105 aa, synthetic construct
MPAAKRVKLDGGDKKYSIGLDIGTNSVGWAVITDEYKVPSKKFKVLGNTDRHSIKKNLIGALLFDSGETAEATRLKRTARRRYTRRKNRICYLQEIFSNEMAKVDDSFFHRLEESFLVEEDKKHERHPIFGNIVDEVAYHEKYPTIYHLRKKLVDSTDKADLRLIYLALAHMIKFRGHFLIEGDLNPDNSDVDKLFIQLVQTYNQLFEENPINASGVDAKAILSARLSKSRRLENLIAQLPGEKKNGLFGNLIALSLGLTPNFKSNFDLAEDAKLQLSKDTYDDDLDNLLAQIGDQYADLFLAAKNLSDAILLSDILRVNTEITKAPLSASMIKRYDEHHQDLTLLKALVRQQLPEKYKEIFFDQSKNGYAGYIDGGASQEEFYKFIKPILEKMDGTEELLVKLNREDLLRKQRTFDNGSIPHQIHLGELHAILRRQEDFYPFLKDNREKIEKILTFRIPYYVGPLARGNSRFAWMTRKSEETITPWNFEEVVDKGASAQSFIERMTNFDKNLPNEKVLPKHSLLYEYFTVYNELTKVKYVTEGMRKPAFLSGEQKKAIVDLLFKTNRKVTVKQLKEDYFKKIECFDSVEISGVEDRFNASLGTYHDLLKIIKDKDFLDNEENEDILEDIVLTLTLFEDREMIEERLKTYAHLFDDKVMKQLKRRRYTGWGRLSRKLINGIRDKQSGKTILDFLKSDGFANRNFMQLIHDDSLTFKEDIQKAQVSGQGDSLHEHIANLAGSPAIKKGILQTVKVVDELVKVMGRHKPENIVIEMARENQTTQKGQKNSRERMKRIEEGIKELGSQILKEHPVENTQLQNEKLYLYYLQNGRDMYVDQELDINRLSDYDVDHIVPQSFLKDDSIDNKVLTRSDKARGKSDNVPSEEVVKKMKNYWRQLLNAKLITQRKFDNLTKAERGGLSELDKAGFIKRQLVETRQITKHVAQILDSRMNTKYDENDKLIREVKVITLKSKLVSDFRKDFQFYKVREINNYHHAHDAYLNAVVGTALIKKYPKLESEFVYGDYKVYDVRKMIAKSEQEIGKATAKYFFYSNIMNFFKTEITLANGEIRKRPLIETNGETGEIVWDKGRDFATVRKVLSMPQVNIVKKTEVQTGGFSKESILPKRNSDKLIARKKDWDPKKYGGFDSPTVAYSVLVVAKVEKGKSKKLKSVKELLGITIMERSSFEKNPIDFLEAKGYKEVKKDLIIKLPKYSLFELENGRKRMLASAGELQKGNELALPSKYVNFLYLASHYEKLKGSPEDNEQKQLFVEQHKHYLDEIIEQISEFSKRVILADANLDKVLSAYNKHRDKPIREQAENIIHLFTLTNLGAPAAFKYFDTTIDRKRYTSTKEVLDATLIHQSITGLYETRIDLSQLGGDGGEAAAKEAAAKEAAAKEAAAKGGTLNIEDEYRLHETSKEPDVPLGSTWLSDFPQAWAETGGMGLAVRQAPLIIPLKATSTPVSIKQYPMSQEARLGIKPHIQRLLDQGILVPCQSPWNTPLLPVKKPGTNDYRPVQDLREVNKRVEDIHPTVPNPYNLLSGLPPSHQWYTVLDLKDAFFCLRLHPTSQPLFAFEWRDPEMGISGQLTWTRLPQGFKNSPTLFDEALHRDLADFRIQHPDLILLQYVDDLLLAATSEQDCQRGTRALLQTLGNLGYRASAKKAQICQKQVKYLGYLLKEGQRWLTEARKETVMGQPTPKTPRQLREFLGTAGFCRLWIPGFAEMAAPLYPLTKTGTLFNWGPDQQKAYQEIKQALLTAPALGLPDLTKPFELFVDEKQGYAKGVLTQKLGPWRRPVAYLSKKLDPVAAGWPPCLRMVAAIAVLTKDAGKLTMGQPLVILAPHAVEALVKQPPDRWLSNARMTHYQAMLLDTDRVQFGPVVALNPATLLPLPEKEAPHDCLEILAETHGTRPDLTDQPIPDADYTWYTDGSSFLQEGQRRAGAAVTTETEVIWARALPAGTSAQRAELIALTQALKMAEGKKLNVYTDSRYAFATAHVHGEIYRRRGLLTSEGREIKNKNEILALLKALFLPKRLSIIHCPGHQKGNSAEARGNRMADQAAREAAMKAVLETSTLLAGKRTADGSEFEKRTADGSEFESPKKKAKVE

SEQ ID NO: 6420 - protein, 2112 aa, synthetic construct
MPAAKRVKLDGGDKKYSIGLDIGTNSVGWAVITDEYKVPSKKFKVLGNTDRHSIKKNLIGALLFDSGETAEATRLKRTARRRYTRRKNRICYLQEIFSNEMAKVDDSFFHRLEESFLVEEDKKHERHPIFGNIVDEVAYHEKYPTIYHLRKKLVDSTDKADLRLIYLALAHMIKFRGHFLIEGDLNPDNSDVDKLFIQLVQTYNQLFEENPINASGVDAKAILSARLSKSRRLENLIAQLPGEKKNGLFGNLIALSLGLTPNFKSNFDLAEDAKLQLSKDTYDDDLDNLLAQIGDQYADLFLAAKNLSDAILLSDILRVNTEITKAPLSASMIKRYDEHHQDLTLLKALVRQQLPEKYKEIFFDQSKNGYAGYIDGGASQEEFYKFIKPILEKMDGTEELLVKLNREDLLRKQRTFDNGSIPHQIHLGELHAILRRQEDFYPFLKDNREKIEKILTFRIPYYVGPLARGNSRFAWMTRKSEETITPWNFEEVVDKGASAQSFIERMTNFDKNLPNEKVLPKHSLLYEYFTVYNELTKVKYVTEGMRKPAFLSGEQKKAIVDLLFKTNRKVTVKQLKEDYFKKIECFDSVEISGVEDRFNASLGTYHDLLKIIKDKDFLDNEENEDILEDIVLTLTLFEDREMIEERLKTYAHLFDDKVMKQLKRRRYTGWGRLSRKLINGIRDKQSGKTILDFLKSDGFANRNFMQLIHDDSLTFKEDIQKAQVSGQGDSLHEHIANLAGSPAIKKGILQTVKVVDELVKVMGRHKPENIVIEMARENQTTQKGQKNSRERMKRIEEGIKELGSQILKEHPVENTQLQNEKLYLYYLQNGRDMYVDQELDINRLSDYDVDHIVPQSFLKDDSIDNKVLTRSDKARGKSDNVPSEEVVKKMKNYWRQLLNAKLITQRKFDNLTKAERGGLSELDKAGFIKRQLVETRQITKHVAQILDSRMNTKYDENDKLIREVKVITLKSKLVSDFRKDFQFYKVREINNYHHAHDAYLNAVVGTALIKKYPKLESEFVYGDYKVYDVRKMIAKSEQEIGKATAKYFFYSNIMNFFKTEITLANGEIRKRPLIETNGETGEIVWDKGRDFATVRKVLSMPQVNIVKKTEVQTGGFSKESILPKRNSDKLIARKKDWDPKKYGGFDSPTVAYSVLVVAKVEKGKSKKLKSVKELLGITIMERSSFEKNPIDFLEAKGYKEVKKDLIIKLPKYSLFELENGRKRMLASAGELQKGNELALPSKYVNFLYLASHYEKLKGSPEDNEQKQLFVEQHKHYLDEIIEQISEFSKRVILADANLDKVLSAYNKHRDKPIREQAENIIHLFTLTNLGAPAAFKYFDTTIDRKRYTSTKEVLDATLIHQSITGLYETRIDLSQLGGDGGEAAAKEAAAKEAAAKEAAAKEAAAKGGTAPLEEEYRLFLEAPIQNVTLLEQWKREIPKVWAEINPPGLASTQAPIHVQLLSTALPVRVRQYPITLEAKRSLRETIRKFRAAGILRPVHSPWNTPLLPVRKSGTSEYRMVQDLREVNKRVETIHPTVPNPYTLLSLLPPDRIWYSVLDLKDAFFCIPLAPESQLIFAFEWADAEEGESGQLTWTRLPQGFKNSPTLFDEALNRDLQGFRLDHPSVSLLQYVDDLLIAADTQAACLSATRDLLMTLAELGYRVSGKKAQLCQEEVTYLGFKIHKGSRSLSNSRTQAILQIPVPKTKRQVREFLGTIGYCRLWIPGFAELAQPLYAATRGGNDPLVWGEKEEEAFQSLKLALTQPPALALPSLDKPFQLFVEETSGAAKGVLTQALGPWKRPVAYLSKRLDPVAAGWPRCLRAIAAAALLTREASKLTFGQDIEITSSHNLESLLRSPPDKWLTNARITQYQVLLLDPPRVRFKQTAALNPATLLPETDDTLPIHHCLDTLDSLTSTRPDLTDQPLAQAEATLFTDGSSYIRDGKRYAGAAVVTLDSVIWAEPLPIGTSAQKAELIALTKALEWSKDKSVNIYTDSRYAFATLHVHGMIYRERGLLTAGGKAIKNAPEILALLTAVWLPKRVAVMHCKGHQKDDAPTSTGNRRADEVAREVAIRPLSTQATISAGKRTADGSEFEKRTADGSEFESPKKKAKVE

SEQ ID NO: 6421 - protein, 2112 aa, synthetic construct
MPAAKRVKLDGGDKKYSIGLDIGTNSVGWAVITDEYKVPSKKFKVLGNTDRHSIKKNLIGALLFDSGETAEATRLKRTARRRYTRRKNRICYLQEIFSNEMAKVDDSFFHRLEESFLVEEDKKHERHPIFGNIVDEVAYHEKYPTIYHLRKKLVDSTDKADLRLIYLALAHMIKFRGHFLIEGDLNPDNSDVDKLFIQLVQTYNQLFEENPINASGVDAKAILSARLSKSRRLENLIAQLPGEKKNGLFGNLIALSLGLTPNFKSNFDLAEDAKLQLSKDTYDDDLDNLLAQIGDQYADLFLAAKNLSDAILLSDILRVNTEITKAPLSASMIKRYDEHHQDLTLLKALVRQQLPEKYKEIFFDQSKNGYAGYIDGGASQEEFYKFIKPILEKMDGTEELLVKLNREDLLRKQRTFDNGSIPHQIHLGELHAILRRQEDFYPFLKDNREKIEKILTFRIPYYVGPLARGNSRFAWMTRKSEETITPWNFEEVVDKGASAQSFIERMTNFDKNLPNEKVLPKHSLLYEYFTVYNELTKVKYVTEGMRKPAFLSGEQKKAIVDLLFKTNRKVTVKQLKEDYFKKIECFDSVEISGVEDRFNASLGTYHDLLKIIKDKDFLDNEENEDILEDIVLTLTLFEDREMIEERLKTYAHLFDDKVMKQLKRRRYTGWGRLSRKLINGIRDKQSGKTILDFLKSDGFANRNFMQLIHDDSLTFKEDIQKAQVSGQGDSLHEHIANLAGSPAIKKGILQTVKVVDELVKVMGRHKPENIVIEMARENQTTQKGQKNSRERMKRIEEGIKELGSQILKEHPVENTQLQNEKLYLYYLQNGRDMYVDQELDINRLSDYDVDHIVPQSFLKDDSIDNKVLTRSDKARGKSDNVPSEEVVKKMKNYWRQLLNAKLITQRKFDNLTKAERGGLSELDKAGFIKRQLVETRQITKHVAQILDSRMNTKYDENDKLIREVKVITLKSKLVSDFRKDFQFYKVREINNYHHAHDAYLNAVVGTALIKKYPKLESEFVYGDYKVYDVRKMIAKSEQEIGKATAKYFFYSNIMNFFKTEITLANGEIRKRPLIETNGETGEIVWDKGRDFATVRKVLSMPQVNIVKKTEVQTGGFSKESILPKRNSDKLIARKKDWDPKKYGGFDSPTVAYSVLVVAKVEKGKSKKLKSVKELLGITIMERSSFEKNPIDFLEAKGYKEVKKDLIIKLPKYSLFELENGRKRMLASAGELQKGNELALPSKYVNFLYLASHYEKLKGSPEDNEQKQLFVEQHKHYLDEIIEQISEFSKRVILADANLDKVLSAYNKHRDKPIREQAENIIHLFTLTNLGAPAAFKYFDTTIDRKRYTSTKEVLDATLIHQSITGLYETRIDLSQLGGDGGEAAAKEAAAKEAAAKEAAAKEAAAKGGTAPLEEEYRLFLEAPIQNVTLLEQWKREIPKVWAEINPPGLASTQAPIHVQLLSTALPVRVRQYPITLEAKRSLRETIRKFRAAGILRPVHSPWNTPLLPVRKSGTSEYRMVQDLREVNKRVETIHPTVPNPYTLLSLLPPDRIWYSVLDLKDAFFCIPLAPESQLIFAFEWADAEEGESGQLTWTRLPQGFKNSPTLFNEALNRDLQGFRLDHPSVSLLQYVDDLLIAADTQAACLSATRDLLMTLAELGYRVSGKKAQLCQEEVTYLGFKIHKGSRSLSNSRTQAILQIPVPKTKRQVREFLGTIGYCRLWIPGFAELAQPLYAATRPGNDPLVWGEKEEEAFQSLKLALTQPPALALPSLDKPFQLFVEETSGAAKGVLTQALGPWKRPVAYLSKRLDPVAAGWPRCLRAIAAAALLTREASKLTFGQDIEITSSHNLESLLRSPPDKWLTNARITQYQVLLLDPPRVRFKQTAALNPATLLPETDDTLPIHHCLDTLDSLTSTRPDLTDQPLAQAEATLFTDGSSYIRDGKRYAGAAVVTLDSVIWAEPLPIGTSAQKAELIALTKALEWSKDKSVNIYTDSRYAFATLHVHGMIYRERGWLTAGGKAIKNAPEILALLTAVWLPKRVAVMHCKGHQKDDAPTSTGNRRADEVAREVAIRPLSTQATISAGKRTADGSEFEKRTADGSEFESPKKKAKVE

SEQ ID NO: 6422 - protein, 2187 aa, synthetic construct
MPAAKRVKLDGGDKKYSIGLDIGTNSVGWAVITDEYKVPSKKFKVLGNTDRHSIKKNLIGALLFDSGETAEATRLKRTARRRYTRRKNRICYLQEIFSNEMAKVDDSFFHRLEESFLVEEDKKHERHPIFGNIVDEVAYHEKYPTIYHLRKKLVDSTDKADLRLIYLALAHMIKFRGHFLIEGDLNPDNSDVDKLFIQLVQTYNQLFEENPINASGVDAKAILSARLSKSRRLENLIAQLPGEKKNGLFGNLIALSLGLTPNFKSNFDLAEDAKLQLSKDTYDDDLDNLLAQIGDQYADLFLAAKNLSDAILLSDILRVNTEITKAPLSASMIKRYDEHHQDLTLLKALVRQQLPEKYKEIFFDQSKNGYAGYIDGGASQEEFYKFIKPILEKMDGTEELLVKLNREDLLRKQRTFDNGSIPHQIHLGELHAILRRQEDFYPFLKDNREKIEKILTFRIPYYVGPLARGNSRFAWMTRKSEETITPWNFEEVVDKGASAQSFIERMTNFDKNLPNEKVLPKHSLLYEYFTVYNELTKVKYVTEGMRKPAFLSGEQKKAIVDLLFKTNRKVTVKQLKEDYFKKIECFDSVEISGVEDRFNASLGTYHDLLKIIKDKDFLDNEENEDILEDIVLTLTLFEDREMIEERLKTYAHLFDDKVMKQLKRRRYTGWGRLSRKLINGIRDKQSGKTILDFLKSDGFANRNFMQLIHDDSLTFKEDIQKAQVSGQGDSLHEHIANLAGSPAIKKGILQTVKVVDELVKVMGRHKPENIVIEMARENQTTQKGQKNSRERMKRIEEGIKELGSQILKEHPVENTQLQNEKLYLYYLQNGRDMYVDQELDINRLSDYDVDHIVPQSFLKDDSIDNKVLTRSDKARGKSDNVPSEEVVKKMKNYWRQLLNAKLITQRKFDNLTKAERGGLSELDKAGFIKRQLVETRQITKHVAQILDSRMNTKYDENDKLIREVKVITLKSKLVSDFRKDFQFYKVREINNYHHAHDAYLNAVVGTALIKKYPKLESEFVYGDYKVYDVRKMIAKSEQEIGKATAKYFFYSNIMNFFKTEITLANGEIRKRPLIETNGETGEIVWDKGRDFATVRKVLSMPQVNIVKKTEVQTGGFSKESILPKRNSDKLIARKKDWDPKKYGGFDSPTVAYSVLVVAKVEKGKSKKLKSVKELLGITIMERSSFEKNPIDFLEAKGYKEVKKDLIIKLPKYSLFELENGRKRMLASAGELQKGNELALPSKYVNFLYLASHYEKLKGSPEDNEQKQLFVEQHKHYLDEIIEQISEFSKRVILADANLDKVLSAYNKHRDKPIREQAENIIHLFTLTNLGAPAAFKYFDTTIDRKRYTSTKEVLDATLIHQSITGLYETRIDLSQLGGDGGEAAAKEAAAKEAAAKEAAAKEAAAKGGMDLLKPLTVERKGVKIKGYWNSQADITCVPKDLLQGEEPVRQQNVTTIHGTQEGDVYYVNLKIDGRRINTEVIGTTLDYAIITPGDVPWILKKPLELTIKLDLEEQQGTLLNNSILSKKGKEELKQLFEKYSALWQSWENQVGHRRIRPHKIATGTVKPTPQKQYHINPKAKPDIQIVINDLLKQGVLIQKESTMNTPVYPVPKPNGRWRMVLDYRAVNKVTPLIAVQNQHSYGILGSLFKGRYKTTIDLSNGFWAHPIVPEDYWITAFTWQGKQYCWTVLPQGFLNSPGLFTGDVVDLLQGIPNVEVYVDDVYISHDSEKEHLEYLDILFNRLKEAGYIISLKKSNIANSIVDFLGFQITNEGRGLTDTFKEKLENITAPTTLKQLQSILGLLNFARNFIPDFTELIAPLYALIPKSTKNYVPWQIEHSTTLETLITKLNGAEYLQGRKGDKTLIMKVNASYTTGYIRYYNEGEKKPISYVSIVFSKTELKFTELEKLLTTVHKGLLKALDLSMGQNIHVYSPIVSMQNIQKTPQTAKKALASRWLSWLSYLEDPRIRFFYDPQMPALKDLPAVDTGKDNKKHPSNFQHIFYTDGSAITSPTKEGHLNAGMGIVYFINKDGNLQKQQEWSISLGNHTAQFAEIAAFEFALKKCLPLGGNILVVTDSNYVAKAYNEELDVWASNGFVNNRKKPLKHISKWKSVADLKRLRPDVVVTHEPGHQKLDSSPHAYGNNLADQLATQASFKVHAGKRTADGSEFEKRTADGSEFESPKKKAKVE

SEQ ID NO: 6423 - protein, 2101 aa, synthetic construct
MPAAKRVKLDGGDKKYSIGLDIGTNSVGWAVITDEYKVPSKKFKVLGNTDRHSIKKNLIGALLFDSGETAEATRLKRTARRRYTRRKNRICYLQEIFSNEMAKVDDSFFHRLEESFLVEEDKKHERHPIFGNIVDEVAYHEKYPTIYHLRKKLVDSTDKADLRLIYLALAHMIKFRGHFLIEGDLNPDNSDVDKLFIQLVQTYNQLFEENPINASGVDAKAILSARLSKSRRLENLIAQLPGEKKNGLFGNLIALSLGLTPNFKSNFDLAEDAKLQLSKDTYDDDLDNLLAQIGDQYADLFLAAKNLSDAILLSDILRVNTEITKAPLSASMIKRYDEHHQDLTLLKALVRQQLPEKYKEIFFDQSKNGYAGYIDGGASQEEFYKFIKPILEKMDGTEELLVKLNREDLLRKQRTFDNGSIPHQIHLGELHAILRRQEDFYPFLKDNREKIEKILTFRIPYYVGPLARGNSRFAWMTRKSEETITPWNFEEVVDKGASAQSFIERMTNFDKNLPNEKVLPKHSLLYEYFTVYNELTKVKYVTEGMRKPAFLSGEQKKAIVDLLFKTNRKVTVKQLKEDYFKKIECFDSVEISGVEDRFNASLGTYHDLLKIIKDKDFLDNEENEDILEDIVLTLTLFEDREMIEERLKTYAHLFDDKVMKQLKRRRYTGWGRLSRKLINGIRDKQSGKTILDFLKSDGFANRNFMQLIHDDSLTFKEDIQKAQVSGQGDSLHEHIANLAGSPAIKKGILQTVKVVDELVKVMGRHKPENIVIEMARENQTTQKGQKNSRERMKRIEEGIKELGSQILKEHPVENTQLQNEKLYLYYLQNGRDMYVDQELDINRLSDYDVDHIVPQSFLKDDSIDNKVLTRSDKARGKSDNVPSEEVVKKMKNYWRQLLNAKLITQRKFDNLTKAERGGLSELDKAGFIKRQLVETRQITKHVAQILDSRMNTKYDENDKLIREVKVITLKSKLVSDFRKDFQFYKVREINNYHHAHDAYLNAVVGTALIKKYPKLESEFVYGDYKVYDVRKMIAKSEQEIGKATAKYFFYSNIMNFFKTEITLANGEIRKRPLIETNGETGEIVWDKGRDFATVRKVLSMPQVNIVKKTEVQTGGFSKESILPKRNSDKLIARKKDWDPKKYGGFDSPTVAYSVLVVAKVEKGKSKKLKSVKELLGITIMERSSFEKNPIDFLEAKGYKEVKKDLIIKLPKYSLFELENGRKRMLASAGELQKGNELALPSKYVNFLYLASHYEKLKGSPEDNEQKQLFVEQHKHYLDEIIEQISEFSKRVILADANLDKVLSAYNKHRDKPIREQAENIIHLFTLTNLGAPAAFKYFDTTIDRKRYTSTKEVLDATLIHQSITGLYETRIDLSQLGGDGGEAAAKEAAAKEAAAKEAAAKEAAAKGGVPWILKKPLELTIKLDLEEQQGTLLNNSILSKKGKEELKQLFEKYSALWQSWENQVGHRRIRPHKIATGTVKPTPQKQYHINPKAKPDIQIVINDLLKQGVLIQKESTMNTPVYPVPKPNGRWRMVLDYRAVNKVTPLIAVQNQHSYGILGSLFKGRYKTTIDLSNGFWAHPIVPEDYWITAFTWQGKQYCWTVLPQGFLNSPGLFTGDVVDLLQGIPNVEVYVDDVYISHDSEKEHLEYLDILFNRLKEAGYIISLKKSNIANSIVDFLGFQITNEGRGLTDTFKEKLENITAPTTLKQLQSILGLLNFARNFIPDFTELIAPLYALIPKSTKNYVPWQIEHSTTLETLITKLNGAEYLQGRKGDKTLIMKVNASYTTGYIRYYNEGEKKPISYVSIVFSKTELKFTELEKLLTTVHKGLLKALDLSMGQNIHVYSPIVSMQNIQKTPQTAKKALASRWLSWLSYLEDPRIRFFYDPQMPALKDLPAVDTGKDNKKHPSNFQHIFYTDGSAITSPTKEGHLNAGMGIVYFINKDGNLQKQQEWSISLGNHTAQFAEIAAFEFALKKCLPLGGNILVVTDSNYVAKAYNEELDVWASNGFVNNRKKPLKHISKWKSVADLKRLRPDVVVTHEPGHQKLDSSPHAYGNNLADQLATQASFKVHAGKRTADGSEFEKRTADGSEFESPKKKAKVE

SEQ ID NO: 6424 - protein, 2101 aa, synthetic construct
MPAAKRVKLDGGDKKYSIGLDIGTNSVGWAVITDEYKVPSKKFKVLGNTDRHSIKKNLIGALLFDSGETAEATRLKRTARRRYTRRKNRICYLQEIFSNEMAKVDDSFFHRLEESFLVEEDKKHERHPIFGNIVDEVAYHEKYPTIYHLRKKLVDSTDKADLRLIYLALAHMIKFRGHFLIEGDLNPDNSDVDKLFIQLVQTYNQLFEENPINASGVDAKAILSARLSKSRRLENLIAQLPGEKKNGLFGNLIALSLGLTPNFKSNFDLAEDAKLQLSKDTYDDDLDNLLAQIGDQYADLFLAAKNLSDAILLSDILRVNTEITKAPLSASMIKRYDEHHQDLTLLKALVRQQLPEKYKEIFFDQSKNGYAGYIDGGASQEEFYKFIKPILEKMDGTEELLVKLNREDLLRKQRTFDNGSIPHQIHLGELHAILRRQEDFYPFLKDNREKIEKILTFRIPYYVGPLARGNSRFAWMTRKSEETITPWNFEEVVDKGASAQSFIERMTNFDKNLPNEKVLPKHSLLYEYFTVYNELTKVKYVTEGMRKPAFLSGEQKKAIVDLLFKTNRKVTVKQLKEDYFKKIECFDSVEISGVEDRFNASLGTYHDLLKIIKDKDFLDNEENEDILEDIVLTLTLFEDREMIEERLKTYAHLFDDKVMKQLKRRRYTGWGRLSRKLINGIRDKQSGKTILDFLKSDGFANRNFMQLIHDDSLTFKEDIQKAQVSGQGDSLHEHIANLAGSPAIKKGILQTVKVVDELVKVMGRHKPENIVIEMARENQTTQKGQKNSRERMKRIEEGIKELGSQILKEHPVENTQLQNEKLYLYYLQNGRDMYVDQELDINRLSDYDVDHIVPQSFLKDDSIDNKVLTRSDKARGKSDNVPSEEVVKKMKNYWRQLLNAKLITQRKFDNLTKAERGGLSELDKAGFIKRQLVETRQITKHVAQILDSRMNTKYDENDKLIREVKVITLKSKLVSDFRKDFQFYKVREINNYHHAHDAYLNAVVGTALIKKYPKLESEFVYGDYKVYDVRKMIAKSEQEIGKATAKYFFYSNIMNFFKTEITLANGEIRKRPLIETNGETGEIVWDKGRDFATVRKVLSMPQVNIVKKTEVQTGGFSKESILPKRNSDKLIARKKDWDPKKYGGFDSPTVAYSVLVVAKVEKGKSKKLKSVKELLGITIMERSSFEKNPIDFLEAKGYKEVKKDLIIKLPKYSLFELENGRKRMLASAGELQKGNELALPSKYVNFLYLASHYEKLKGSPEDNEQKQLFVEQHKHYLDEIIEQISEFSKRVILADANLDKVLSAYNKHRDKPIREQAENIIHLFTLTNLGAPAAFKYFDTTIDRKRYTSTKEVLDATLIHQSITGLYETRIDLSQLGGDGGEAAAKEAAAKEAAAKEAAAKEAAAKGGVPWILKKPLELTIKLDLEEQQGTLLNNSILSKKGKEELKQLFEKYSALWQSWENQVGHRRIRPHKIATGTVKPTPQKQYHINPKAKPDIQIVINDLLKQGVLIQKESTMNTPVYPVPKPNGRWRMVLDYRAVNKVTPLIAVQNQHSYGILGSLFKGRYKTTIDLSNGFWAHPIVPEDYWITAFTWQGKQYCWTVLPQGFLNSPGLFNGDVVDLLQGIPNVEVYVDDVYISHDSEKEHLEYLDILFNRLKEAGYIISLKKSNIANSIVDFLGFQITNEGRGLTDTFKEKLENITAPTTLKQLQSILGLLNFARNFIPDFTELIAPLYALIPKSPKNYVPWQIEHSTTLETLITKLNGAEYLQGRKGDKTLIMKVNASYTTGYIRYYNEGEKKPISYVSIVFSKTELKFTELEKLLTTVHKGLLKALDLSMGQNIHVYSPIVSMQNIQKTPQTAKKALASRWLSWLSYLEDPRIRFFYDPQMPALKDLPAVDTGKDNKKHPSNFQHIFYTDGSAITSPTKEGHLNAGMGIVYFINKDGNLQKQQEWSISLGNHTAQFAEIAAFEFALKKCLPLGGNILVVTDSNYVAKAYNEELDVWASNGFVNNRKKPLKHISKWKSVADLKRLRPDVVVTHEPGHQKLDSSPHAYGNNLADQLATQASFKVHAGKRTADGSEFEKRTADGSEFESPKKKAKVE

SEQ ID NO: 6425 - protein, 2109 aa, synthetic construct
MPAAKRVKLDGGDKKYSIGLDIGTNSVGWAVITDEYKVPSKKFKVLGNTDRHSIKKNLIGALLFDSGETAEATRLKRTARRRYTRRKNRICYLQEIFSNEMAKVDDSFFHRLEESFLVEEDKKHERHPIFGNIVDEVAYHEKYPTIYHLRKKLVDSTDKADLRLIYLALAHMIKFRGHFLIEGDLNPDNSDVDKLFIQLVQTYNQLFEENPINASGVDAKAILSARLSKSRRLENLIAQLPGEKKNGLFGNLIALSLGLTPNFKSNFDLAEDAKLQLSKDTYDDDLDNLLAQIGDQYADLFLAAKNLSDAILLSDILRVNTEITKAPLSASMIKRYDEHHQDLTLLKALVRQQLPEKYKEIFFDQSKNGYAGYIDGGASQEEFYKFIKPILEKMDGTEELLVKLNREDLLRKQRTFDNGSIPHQIHLGELHAILRRQEDFYPFLKDNREKIEKILTFRIPYYVGPLARGNSRFAWMTRKSEETITPWNFEEVVDKGASAQSFIERMTNFDKNLPNEKVLPKHSLLYEYFTVYNELTKVKYVTEGMRKPAFLSGEQKKAIVDLLFKTNRKVTVKQLKEDYFKKIECFDSVEISGVEDRFNASLGTYHDLLKIIKDKDFLDNEENEDILEDIVLTLTLFEDREMIEERLKTYAHLFDDKVMKQLKRRRYTGWGRLSRKLINGIRDKQSGKTILDFLKSDGFANRNFMQLIHDDSLTFKEDIQKAQVSGQGDSLHEHIANLAGSPAIKKGILQTVKVVDELVKVMGRHKPENIVIEMARENQTTQKGQKNSRERMKRIEEGIKELGSQILKEHPVENTQLQNEKLYLYYLQNGRDMYVDQELDINRLSDYDVDHIVPQSFLKDDSIDNKVLTRSDKARGKSDNVPSEEVVKKMKNYWRQLLNAKLITQRKFDNLTKAERGGLSELDKAGFIKRQLVETRQITKHVAQILDSRMNTKYDENDKLIREVKVITLKSKLVSDFRKDFQFYKVREINNYHHAHDAYLNAVVGTALIKKYPKLESEFVYGDYKVYDVRKMIAKSEQEIGKATAKYFFYSNIMNFFKTEITLANGEIRKRPLIETNGETGEIVWDKGRDFATVRKVLSMPQVNIVKKTEVQTGGFSKESILPKRNSDKLIARKKDWDPKKYGGFDSPTVAYSVLVVAKVEKGKSKKLKSVKELLGITIMERSSFEKNPIDFLEAKGYKEVKKDLIIKLPKYSLFELENGRKRMLASAGELQKGNELALPSKYVNFLYLASHYEKLKGSPEDNEQKQLFVEQHKHYLDEIIEQISEFSKRVILADANLDKVLSAYNKHRDKPIREQAENIIHLFTLTNLGAPAAFKYFDTTIDRKRYTSTKEVLDATLIHQSITGLYETRIDLSQLGGDGGEAAAKEAAAKEAAAKEAAAKEAAAKGGTLQLEEEYRLFEPESTQKQEMDIWLKNFPQAWAETGGMGTAHCQAPVLIQLKATATPISIRQYPMPHEAYQGIKPHIRRMLDQGILKPCQSPWNTPLLPVKKPGTEDYRPVQDLREVNKRVEDIHPTVPNPYNLLSTLPPSHPWYTVLDLKDAFFCLRLHSESQLLFAFEWRDPEIGLSGQLTWTRLPQGFKNSPTLFNEALHSDLADFRVRYPALVLLQYVDDLLLAAATRTECLEGTKALLETLGNKGYRASAKKAQICLQEVTYLGYSLKDGQRWLTKARKEAILSIPVPKNSRQVREFLGKAGYCRLFIPGFAELAAPLYPLTRPGTLFQWGTEQQLAFEDIKKALLSSPALGLPDITKPFELFIDENSGFAKGVLVQKLGPWKRPVAYLSKKLDTVASGWPPCLRMVAAIAILVKDAGKLTLGQPLTILTSHPVEALVRQPPNKWLSNARMTHYQAMLLDAERVHFGPTVSLNPATLLPLPSGGNHHDCLQILAETHGTRPDLTDQPLPDADLTWYTDGSSFIRNGEREAGAAVTTESEVIWAAPLPPGTSAQRAELIALTQALKMAEGKKLTVYTDSRYAFATTHVHGEIYRRRGWLTSEGKEIKNKNEILALLEALFLPKRLSIIHCPGHQKGDSPQAKGNRLADDTAKKAATETHSSLTVLPAGKRTADGSEFEKRTADGSEFESPKKKAKVE

SEQ ID NO: 6426 - protein, 2101 aa, synthetic construct
MPAAKRVKLDGGDKKYSIGLDIGTNSVGWAVITDEYKVPSKKFKVLGNTDRHSIKKNLIGALLFDSGETAEATRLKRTARRRYTRRKNRICYLQEIFSNEMAKVDDSFFHRLEESFLVEEDKKHERHPIFGNIVDEVAYHEKYPTIYHLRKKLVDSTDKADLRLIYLALAHMIKFRGHFLIEGDLNPDNSDVDKLFIQLVQTYNQLFEENPINASGVDAKAILSARLSKSRRLENLIAQLPGEKKNGLFGNLIALSLGLTPNFKSNFDLAEDAKLQLSKDTYDDDLDNLLAQIGDQYADLFLAAKNLSDAILLSDILRVNTEITKAPLSASMIKRYDEHHQDLTLLKALVRQQLPEKYKEIFFDQSKNGYAGYIDGGASQEEFYKFIKPILEKMDGTEELLVKLNREDLLRKQRTFDNGSIPHQIHLGELHAILRRQEDFYPFLKDNREKIEKILTFRIPYYVGPLARGNSRFAWMTRKSEETITPWNFEEVVDKGASAQSFIERMTNFDKNLPNEKVLPKHSLLYEYFTVYNELTKVKYVTEGMRKPAFLSGEQKKAIVDLLFKTNRKVTVKQLKEDYFKKIECFDSVEISGVEDRFNASLGTYHDLLKIIKDKDFLDNEENEDILEDIVLTLTLFEDREMIEERLKTYAHLFDDKVMKQLKRRRYTGWGRLSRKLINGIRDKQSGKTILDFLKSDGFANRNFMQLIHDDSLTFKEDIQKAQVSGQGDSLHEHIANLAGSPAIKKGILQTVKVVDELVKVMGRHKPENIVIEMARENQTTQKGQKNSRERMKRIEEGIKELGSQILKEHPVENTQLQNEKLYLYYLQNGRDMYVDQELDINRLSDYDVDHIVPQSFLKDDSIDNKVLTRSDKARGKSDNVPSEEVVKKMKNYWRQLLNAKLITQRKFDNLTKAERGGLSELDKAGFIKRQLVETRQITKHVAQILDSRMNTKYDENDKLIREVKVITLKSKLVSDFRKDFQFYKVREINNYHHAHDAYLNAVVGTALIKKYPKLESEFVYGDYKVYDVRKMIAKSEQEIGKATAKYFFYSNIMNFFKTEITLANGEIRKRPLIETNGETGEIVWDKGRDFATVRKVLSMPQVNIVKKTEVQTGGFSKESILPKRNSDKLIARKKDWDPKKYGGFDSPTVAYSVLVVAKVEKGKSKKLKSVKELLGITIMERSSFEKNPIDFLEAKGYKEVKKDLIIKLPKYSLFELENGRKRMLASAGELQKGNELALPSKYVNFLYLASHYEKLKGSPEDNEQKQLFVEQHKHYLDEIIEQISEFSKRVILADANLDKVLSAYNKHRDKPIREQAENIIHLFTLTNLGAPAAFKYFDTTIDRKRYTSTKEVLDATLIHQSITGLYETRIDLSQLGGDGGEAAAKEAAAKEAAAKEAAAKEAAAKGGVPWLTQQPLQLTILVPLQEYQEKILSKTALPEDQKQQLKTLFVKYDNLWQHWENQVGHRKIRPHNIATGDYPPRPQKQYPINPKAKPSIQIVIDDLLKQGVLTPQNSTMNTPVYPVPKPDGRWRMVLDYREVNKTIPLTAAQNQHSAGILATIVRQKYKTTLDLANGFWAHPITPESYWLTAFTWQGKQYCWTRLPQGFLNSPALFNADVVDLLKEIPNVQVYVDDIYLSHDDPKEHVQQLEKVFQILLQAGYVVSLKKSEIGQKTVEFLGFNITKEGRGLTDTFKTKLLNITPPKDLKQLQSILGLLNFARNFIPNFAELVQPLYNLIAPAKGKYIEWSEENTKQLNMVIEALNTASNLEERLPEQRLVIKVNTSPSAGYVRYYNETGKKPIMYLNYVFSKAELKFSMLEKLLTTMHKALIKAMDLAMGQEILVYSPIVSMTKIQKTPLPERKALPIRWITWMTYLEDPRIQFHYDKTLPELKHIPDVYTSSQSPVKHPSQYEGVFYTDGSAIKSPDPTKSNNAGMGIVHATYKPEYQVLNQWSIPLGNHTAQMAEIAAVEFACKKALKIPGPVLVITDSFYVAESANKELPYWKSNGFVNNKKKPLKHISKWKSIAECLSMKPDITIQHEKGISLQIPVFILKGNALADKLATQGSYVVNAGKRTADGSEFEKRTADGSEFESPKKKAKVE

SEQ ID NO: 6427 - protein, 2101 aa, synthetic construct
MPAAKRVKLDGGDKKYSIGLDIGTNSVGWAVITDEYKVPSKKFKVLGNTDRHSIKKNLIGALLFDSGETAEATRLKRTARRRYTRRKNRICYLQEIFSNEMAKVDDSFFHRLEESFLVEEDKKHERHPIFGNIVDEVAYHEKYPTIYHLRKKLVDSTDKADLRLIYLALAHMIKFRGHFLIEGDLNPDNSDVDKLFIQLVQTYNQLFEENPINASGVDAKAILSARLSKSRRLENLIAQLPGEKKNGLFGNLIALSLGLTPNFKSNFDLAEDAKLQLSKDTYDDDLDNLLAQIGDQYADLFLAAKNLSDAILLSDILRVNTEITKAPLSASMIKRYDEHHQDLTLLKALVRQQLPEKYKEIFFDQSKNGYAGYIDGGASQEEFYKFIKPILEKMDGTEELLVKLNREDLLRKQRTFDNGSIPHQIHLGELHAILRRQEDFYPFLKDNREKIEKILTFRIPYYVGPLARGNSRFAWMTRKSEETITPWNFEEVVDKGASAQSFIERMTNFDKNLPNEKVLPKHSLLYEYFTVYNELTKVKYVTEGMRKPAFLSGEQKKAIVDLLFKTNRKVTVKQLKEDYFKKIECFDSVEISGVEDRFNASLGTYHDLLKIIKDKDFLDNEENEDILEDIVLTLTLFEDREMIEERLKTYAHLFDDKVMKQLKRRRYTGWGRLSRKLINGIRDKQSGKTILDFLKSDGFANRNFMQLIHDDSLTFKEDIQKAQVSGQGDSLHEHIANLAGSPAIKKGILQTVKVVDELVKVMGRHKPENIVIEMARENQTTQKGQKNSRERMKRIEEGIKELGSQILKEHPVENTQLQNEKLYLYYLQNGRDMYVDQELDINRLSDYDVDHIVPQSFLKDDSIDNKVLTRSDKARGKSDNVPSEEVVKKMKNYWRQLLNAKLITQRKFDNLTKAERGGLSELDKAGFIKRQLVETRQITKHVAQILDSRMNTKYDENDKLIREVKVITLKSKLVSDFRKDFQFYKVREINNYHHAHDAYLNAVVGTALIKKYPKLESEFVYGDYKVYDVRKMIAKSEQEIGKATAKYFFYSNIMNFFKTEITLANGEIRKRPLIETNGETGEIVWDKGRDFATVRKVLSMPQVNIVKKTEVQTGGFSKESILPKRNSDKLIARKKDWDPKKYGGFDSPTVAYSVLVVAKVEKGKSKKLKSVKELLGITIMERSSFEKNPIDFLEAKGYKEVKKDLIIKLPKYSLFELENGRKRMLASAGELQKGNELALPSKYVNFLYLASHYEKLKGSPEDNEQKQLFVEQHKHYLDEIIEQISEFSKRVILADANLDKVLSAYNKHRDKPIREQAENIIHLFTLTNLGAPAAFKYFDTTIDRKRYTSTKEVLDATLIHQSITGLYETRIDLSQLGGDGGEAAAKEAAAKEAAAKEAAAKEAAAKGGVPWLTQQPLQLTILVPLQEYQEKILSKTALPEDQKQQLKTLFVKYDNLWQHWENQVGHRKIRPHNIATGDYPPRPQKQYPINPKAKPSIQIVIDDLLKQGVLTPQNSTMNTPVYPVPKPDGRWRMVLDYREVNKTIPLTAAQNQHSAGILATIVRQKYKTTLDLANGFWAHPITPESYWLTAFTWQGKQYCWTRLPQGFLNSPALFNADVVDLLKEIPNVQVYVDDIYLSHDDPKEHVQQLEKVFQILLQAGYVVSLKKSEIGQKTVEFLGFNITKEGRGLTDTFKTKLLNITPPKDLKQLQSILGKLNFARNFIPNFAELVQPLYNLIAPAKGKYIEWSEENTKQLNMVIEALNTASNLEERLPEQRLVIKVNTSPSAGYVRYYNETGKKPIMYLNYVFSKAELKFSMLEKLLTTMHKALIKAMDLAMGQEILVYSPIVSMTKIQKTPLPERKALPIRWITWMTYLEDPRIQFHYDKTLPELKHIPDVYTSSQSPVKHPSQYEGVFYTDGSAIKSPDPTKSNNAGMGIVHATYKPEYQVLNQWSIPLGNHTAQMAEIAAVEFACKKALKIPGPVLVITDSFYVAESANKELPYWKSNGFVNNKKKPLKHISKWKSIAECLSMKPDITIQHEKGISLQIPVFILKGNALADKLATQGSYVVNAGKRTADGSEFEKRTADGSEFESPKKKAKVE

SEQ ID NO: 6428 - protein, 2190 aa, synthetic construct
MPAAKRVKLDGGDKKYSIGLDIGTNSVGWAVITDEYKVPSKKFKVLGNTDRHSIKKNLIGALLFDSGETAEATRLKRTARRRYTRRKNRICYLQEIFSNEMAKVDDSFFHRLEESFLVEEDKKHERHPIFGNIVDEVAYHEKYPTIYHLRKKLVDSTDKADLRLIYLALAHMIKFRGHFLIEGDLNPDNSDVDKLFIQLVQTYNQLFEENPINASGVDAKAILSARLSKSRRLENLIAQLPGEKKNGLFGNLIALSLGLTPNFKSNFDLAEDAKLQLSKDTYDDDLDNLLAQIGDQYADLFLAAKNLSDAILLSDILRVNTEITKAPLSASMIKRYDEHHQDLTLLKALVRQQLPEKYKEIFFDQSKNGYAGYIDGGASQEEFYKFIKPILEKMDGTEELLVKLNREDLLRKQRTFDNGSIPHQIHLGELHAILRRQEDFYPFLKDNREKIEKILTFRIPYYVGPLARGNSRFAWMTRKSEETITPWNFEEVVDKGASAQSFIERMTNFDKNLPNEKVLPKHSLLYEYFTVYNELTKVKYVTEGMRKPAFLSGEQKKAIVDLLFKTNRKVTVKQLKEDYFKKIECFDSVEISGVEDRFNASLGTYHDLLKIIKDKDFLDNEENEDILEDIVLTLTLFEDREMIEERLKTYAHLFDDKVMKQLKRRRYTGWGRLSRKLINGIRDKQSGKTILDFLKSDGFANRNFMQLIHDDSLTFKEDIQKAQVSGQGDSLHEHIANLAGSPAIKKGILQTVKVVDELVKVMGRHKPENIVIEMARENQTTQKGQKNSRERMKRIEEGIKELGSQILKEHPVENTQLQNEKLYLYYLQNGRDMYVDQELDINRLSDYDVDHIVPQSFLKDDSIDNKVLTRSDKARGKSDNVPSEEVVKKMKNYWRQLLNAKLITQRKFDNLTKAERGGLSELDKAGFIKRQLVETRQITKHVAQILDSRMNTKYDENDKLIREVKVITLKSKLVSDFRKDFQFYKVREINNYHHAHDAYLNAVVGTALIKKYPKLESEFVYGDYKVYDVRKMIAKSEQEIGKATAKYFFYSNIMNFFKTEITLANGEIRKRPLIETNGETGEIVWDKGRDFATVRKVLSMPQVNIVKKTEVQTGGFSKESILPKRNSDKLIARKKDWDPKKYGGFDSPTVAYSVLVVAKVEKGKSKKLKSVKELLGITIMERSSFEKNPIDFLEAKGYKEVKKDLIIKLPKYSLFELENGRKRMLASAGELQKGNELALPSKYVNFLYLASHYEKLKGSPEDNEQKQLFVEQHKHYLDEIIEQISEFSKRVILADANLDKVLSAYNKHRDKPIREQAENIIHLFTLTNLGAPAAFKYFDTTIDRKRYTSTKEVLDATLIHQSITGLYETRIDLSQLGGDGGEAAAKEAAAKEAAAKEAAAKEAAAKGGMNPLQLLQPLPAEIKGTKLLAHWNSGATITCIPESFLEDEQPIKKTLIKTIHGEKQQNVYYVTFKVKGRKVEAEVIASPYEYILLSPTDVPWLTQQPLQLTILVPLQEYQEKILSKTALPEDQKQQLKTLFVKYDNLWQHWENQVGHRKIRPHNIATGDYPPRPQKQYPINPKAKPSIQIVIDDLLKQGVLTPQNSTMNTPVYPVPKPDGRWRMVLDYREVNKTIPLTAAQNQHSAGILATIVRQKYKTTLDLANGFWAHPITPESYWLTAFTWQGKQYCWTRLPQGFLNSPALFNADVVDLLKEIPNVQVYVDDIYLSHDDPKEHVQQLEKVFQILLQAGYVVSLKKSEIGQKTVEFLGFNITKEGRGLTDTFKTKLLNITPPKDLKQLQSILGLLNFARNFIPNFAELVQPLYNLIAPAKGKYIEWSEENTKQLNMVIEALNTASNLEERLPEQRLVIKVNTSPSAGYVRYYNETGKKPIMYLNYVFSKAELKFSMLEKLLTTMHKALIKAMDLAMGQEILVYSPIVSMTKIQKTPLPERKALPIRWITWMTYLEDPRIQFHYDKTLPELKHIPDVYTSSQSPVKHPSQYEGVFYTDGSAIKSPDPTKSNNAGMGIVHATYKPEYQVLNQWSIPLGNHTAQMAEIAAVEFACKKALKIPGPVLVITDSFYVAESANKELPYWKSNGFVNNKKKPLKHISKWKSIAECLSMKPDITIQHEKGISLQIPVFILKGNALADKLATQGSYVVNAGKRTADGSEFEKRTADGSEFESPKKKAKVE

SEQ ID NO: 6429 - protein, 2190 aa, synthetic construct
MPAAKRVKLDGGDKKYSIGLDIGTNSVGWAVITDEYKVPSKKFKVLGNTDRHSIKKNLIGALLFDSGETAEATRLKRTARRRYTRRKNRICYLQEIFSNEMAKVDDSFFHRLEESFLVEEDKKHERHPIFGNIVDEVAYHEKYPTIYHLRKKLVDSTDKADLRLIYLALAHMIKFRGHFLIEGDLNPDNSDVDKLFIQLVQTYNQLFEENPINASGVDAKAILSARLSKSRRLENLIAQLPGEKKNGLFGNLIALSLGLTPNFKSNFDLAEDAKLQLSKDTYDDDLDNLLAQIGDQYADLFLAAKNLSDAILLSDILRVNTEITKAPLSASMIKRYDEHHQDLTLLKALVRQQLPEKYKEIFFDQSKNGYAGYIDGGASQEEFYKFIKPILEKMDGTEELLVKLNREDLLRKQRTFDNGSIPHQIHLGELHAILRRQEDFYPFLKDNREKIEKILTFRIPYYVGPLARGNSRFAWMTRKSEETITPWNFEEVVDKGASAQSFIERMTNFDKNLPNEKVLPKHSLLYEYFTVYNELTKVKYVTEGMRKPAFLSGEQKKAIVDLLFKTNRKVTVKQLKEDYFKKIECFDSVEISGVEDRFNASLGTYHDLLKIIKDKDFLDNEENEDILEDIVLTLTLFEDREMIEERLKTYAHLFDDKVMKQLKRRRYTGWGRLSRKLINGIRDKQSGKTILDFLKSDGFANRNFMQLIHDDSLTFKEDIQKAQVSGQGDSLHEHIANLAGSPAIKKGILQTVKVVDELVKVMGRHKPENIVIEMARENQTTQKGQKNSRERMKRIEEGIKELGSQILKEHPVENTQLQNEKLYLYYLQNGRDMYVDQELDINRLSDYDVDHIVPQSFLKDDSIDNKVLTRSDKARGKSDNVPSEEVVKKMKNYWRQLLNAKLITQRKFDNLTKAERGGLSELDKAGFIKRQLVETRQITKHVAQILDSRMNTKYDENDKLIREVKVITLKSKLVSDFRKDFQFYKVREINNYHHAHDAYLNAVVGTALIKKYPKLESEFVYGDYKVYDVRKMIAKSEQEIGKATAKYFFYSNIMNFFKTEITLANGEIRKRPLIETNGETGEIVWDKGRDFATVRKVLSMPQVNIVKKTEVQTGGFSKESILPKRNSDKLIARKKDWDPKKYGGFDSPTVAYSVLVVAKVEKGKSKKLKSVKELLGITIMERSSFEKNPIDFLEAKGYKEVKKDLIIKLPKYSLFELENGRKRMLASAGELQKGNELALPSKYVNFLYLASHYEKLKGSPEDNEQKQLFVEQHKHYLDEIIEQISEFSKRVILADANLDKVLSAYNKHRDKPIREQAENIIHLFTLTNLGAPAAFKYFDTTIDRKRYTSTKEVLDATLIHQSITGLYETRIDLSQLGGDGGEAAAKEAAAKEAAAKEAAAKEAAAKGGMNPLQLLQPLPAEIKGTKLLAHWNSGATITCIPESFLEDEQPIKKTLIKTIHGEKQQNVYYVTFKVKGRKVEAEVIASPYEYILLSPTDVPWLTQQPLQLTILVPLQEYQEKILSKTALPEDQKQQLKTLFVKYDNLWQHWENQVGHRKIRPHNIATGDYPPRPQKQYPINPKAKPSIQIVIDDLLKQGVLTPQNSTMNTPVYPVPKPDGRWRMVLDYREVNKTIPLTAAQNQHSAGILATIVRQKYKTTLDLANGFWAHPITPESYWLTAFTWQGKQYCWTRLPQGFLNSPALFNADVVDLLKEIPNVQVYVDDIYLSHDDPKEHVQQLEKVFQILLQAGYVVSLKKSEIGQKTVEFLGFNITKEGRGLTDTFKTKLLNITPPKDLKQLQSILGKLNFARNFIPNFAELVQPLYNLIAPAKGKYIEWSEENTKQLNMVIEALNTASNLEERLPEQRLVIKVNTSPSAGYVRYYNETGKKPIMYLNYVFSKAELKFSMLEKLLTTMHKALIKAMDLAMGQEILVYSPIVSMTKIQKTPLPERKALPIRWITWMTYLEDPRIQFHYDKTLPELKHIPDVYTSSQSPVKHPSQYEGVFYTDGSAIKSPDPTKSNNAGMGIVHATYKPEYQVLNQWSIPLGNHTAQMAEIAAVEFACKKALKIPGPVLVITDSFYVAESANKELPYWKSNGFVNNKKKPLKHISKWKSIAECLSMKPDITIQHEKGISLQIPVFILKGNALADKLATQGSYVVNAGKRTADGSEFEKRTADGSEFESPKKKAKVE

SEQ ID NO: 6430 - protein, 2108 aa, synthetic construct
MPAAKRVKLDGGDKKYSIGLDIGTNSVGWAVITDEYKVPSKKFKVLGNTDRHSIKKNLIGALLFDSGETAEATRLKRTARRRYTRRKNRICYLQEIFSNEMAKVDDSFFHRLEESFLVEEDKKHERHPIFGNIVDEVAYHEKYPTIYHLRKKLVDSTDKADLRLIYLALAHMIKFRGHFLIEGDLNPDNSDVDKLFIQLVQTYNQLFEENPINASGVDAKAILSARLSKSRRLENLIAQLPGEKKNGLFGNLIALSLGLTPNFKSNFDLAEDAKLQLSKDTYDDDLDNLLAQIGDQYADLFLAAKNLSDAILLSDILRVNTEITKAPLSASMIKRYDEHHQDLTLLKALVRQQLPEKYKEIFFDQSKNGYAGYIDGGASQEEFYKFIKPILEKMDGTEELLVKLNREDLLRKQRTFDNGSIPHQIHLGELHAILRRQEDFYPFLKDNREKIEKILTFRIPYYVGPLARGNSRFAWMTRKSEETITPWNFEEVVDKGASAQSFIERMTNFDKNLPNEKVLPKHSLLYEYFTVYNELTKVKYVTEGMRKPAFLSGEQKKAIVDLLFKTNRKVTVKQLKEDYFKKIECFDSVEISGVEDRFNASLGTYHDLLKIIKDKDFLDNEENEDILEDIVLTLTLFEDREMIEERLKTYAHLFDDKVMKQLKRRRYTGWGRLSRKLINGIRDKQSGKTILDFLKSDGFANRNFMQLIHDDSLTFKEDIQKAQVSGQGDSLHEHIANLAGSPAIKKGILQTVKVVDELVKVMGRHKPENIVIEMARENQTTQKGQKNSRERMKRIEEGIKELGSQILKEHPVENTQLQNEKLYLYYLQNGRDMYVDQELDINRLSDYDVDHIVPQSFLKDDSIDNKVLTRSDKARGKSDNVPSEEVVKKMKNYWRQLLNAKLITQRKFDNLTKAERGGLSELDKAGFIKRQLVETRQITKHVAQILDSRMNTKYDENDKLIREVKVITLKSKLVSDFRKDFQFYKVREINNYHHAHDAYLNAVVGTALIKKYPKLESEFVYGDYKVYDVRKMIAKSEQEIGKATAKYFFYSNIMNFFKTEITLANGEIRKRPLIETNGETGEIVWDKGRDFATVRKVLSMPQVNIVKKTEVQTGGFSKESILPKRNSDKLIARKKDWDPKKYGGFDSPTVAYSVLVVAKVEKGKSKKLKSVKELLGITIMERSSFEKNPIDFLEAKGYKEVKKDLIIKLPKYSLFELENGRKRMLASAGELQKGNELALPSKYVNFLYLASHYEKLKGSPEDNEQKQLFVEQHKHYLDEIIEQISEFSKRVILADANLDKVLSAYNKHRDKPIREQAENIIHLFTLTNLGAPAAFKYFDTTIDRKRYTSTKEVLDATLIHQSITGLYETRIDLSQLGGDGGEAAAKEAAAKEAAAKEAAAKEAAAKGGVLNLEEEYRLHEKPVPSSIDPSWLQLFPTVWAERAGMGLANQVPPVVVELRSGASPVAVRQYPMSKEAREGIRPHIQKFLDLGVLVPCRSPWNTPLLPVKKPGTNDYRPVQDLREINKRVQDIHPTVPNPYNLLSSLPPSYTWYSVLDLKDAFFCLRLHPNSQPLFAFEWKDPEKGNTGQLTWTRLPQGFKNSPTLFNEALHRDLAPFRALNPQVVLLQYVDDLLVAAPTYEDCKKGTQKLLQELSKLGYRVSAKKAQLCQREVTYLGYLLKEGKRWLTPARKATVMKIPVPTTPRQVREFLGTAGFCRLWIPGFASLAAPLYPLTKPSIPFIWTEEHQQAFDHIKKALLSAPALALPDLTKPFTLYIDERAGVARGVLTQTLGPWRRPVAYLSKKLDPVASGWPTCLKAVAAVALLLKDADKLTLGQNVTVIASHSLESIVRQPPDRWMTNARMTHYQSLLLNERVSFAPPAVLNPATLLPVESEATPVHRCSEILAEETGTRRDLEDQPLPGVPTWYTDGSSFITEGKRRAGAPIVDGKRTVWASSLPEGTSAQKAELVALTQALRLAEGKNINIYTDSRYAFATAHIHGAIYKQRGWLTSAGKDIKNKEEILALLEAIHLPRRVAIIHCPGHQRGSNPVATGNRRADEAAKQAALSTRVLAGTTKPAGKRTADGSEFEKRTADGSEFESPKKKAKVE

SEQ ID NO: 6431 - protein, 2108 aa, synthetic construct
MPAAKRVKLDGGDKKYSIGLDIGTNSVGWAVITDEYKVPSKKFKVLGNTDRHSIKKNLIGALLFDSGETAEATRLKRTARRRYTRRKNRICYLQEIFSNEMAKVDDSFFHRLEESFLVEEDKKHERHPIFGNIVDEVAYHEKYPTIYHLRKKLVDSTDKADLRLIYLALAHMIKFRGHFLIEGDLNPDNSDVDKLFIQLVQTYNQLFEENPINASGVDAKAILSARLSKSRRLENLIAQLPGEKKNGLFGNLIALSLGLTPNFKSNFDLAEDAKLQLSKDTYDDDLDNLLAQIGDQYADLFLAAKNLSDAILLSDILRVNTEITKAPLSASMIKRYDEHHQDLTLLKALVRQQLPEKYKEIFFDQSKNGYAGYIDGGASQEEFYKFIKPILEKMDGTEELLVKLNREDLLRKQRTFDNGSIPHQIHLGELHAILRRQEDFYPFLKDNREKIEKILTFRIPYYVGPLARGNSRFAWMTRKSEETITPWNFEEVVDKGASAQSFIERMTNFDKNLPNEKVLPKHSLLYEYFTVYNELTKVKYVTEGMRKPAFLSGEQKKAIVDLLFKTNRKVTVKQLKEDYFKKIECFDSVEISGVEDRFNASLGTYHDLLKIIKDKDFLDNEENEDILEDIVLTLTLFEDREMIEERLKTYAHLFDDKVMKQLKRRRYTGWGRLSRKLINGIRDKQSGKTILDFLKSDGFANRNFMQLIHDDSLTFKEDIQKAQVSGQGDSLHEHIANLAGSPAIKKGILQTVKVVDELVKVMGRHKPENIVIEMARENQTTQKGQKNSRERMKRIEEGIKELGSQILKEHPVENTQLQNEKLYLYYLQNGRDMYVDQELDINRLSDYDVDHIVPQSFLKDDSIDNKVLTRSDKARGKSDNVPSEEVVKKMKNYWRQLLNAKLITQRKFDNLTKAERGGLSELDKAGFIKRQLVETRQITKHVAQILDSRMNTKYDENDKLIREVKVITLKSKLVSDFRKDFQFYKVREINNYHHAHDAYLNAVVGTALIKKYPKLESEFVYGDYKVYDVRKMIAKSEQEIGKATAKYFFYSNIMNFFKTEITLANGEIRKRPLIETNGETGEIVWDKGRDFATVRKVLSMPQVNIVKKTEVQTGGFSKESILPKRNSDKLIARKKDWDPKKYGGFDSPTVAYSVLVVAKVEKGKSKKLKSVKELLGITIMERSSFEKNPIDFLEAKGYKEVKKDLIIKLPKYSLFELENGRKRMLASAGELQKGNELALPSKYVNFLYLASHYEKLKGSPEDNEQKQLFVEQHKHYLDEIIEQISEFSKRVILADANLDKVLSAYNKHRDKPIREQAENIIHLFTLTNLGAPAAFKYFDTTIDRKRYTSTKEVLDATLIHQSITGLYETRIDLSQLGGDGGEAAAKEAAAKEAAAKEAAAKEAAAKGGVLNLEEEYRLHEKPVPSSIDPSWLQLFPTVWAERAGMGLANQVPPVVVELRSGASPVAVRQYPMSKEAREGIRPHIQKFLDLGVLVPCRSPWNTPLLPVKKPGTNDYRPVQDLREINKRVQDIHPTVPNPYNLLSSLPPSYTWYSVLDLKDAFFCLRLHPNSQPLFAFEWKDPEKGNTGQLTWTRLPQGFKNSPTLFNEALHRDLAPFRALNPQVVLLQYVDDLLVAAPTYEDCKKGTQKLLQELSKLGYRVSAKKAQLCQREVTYLGYLLKEGKRWLTPARKATVMKIPVPTTPRQVREFLGKAGFCRLFIPGFASLAAPLYPLTKPSIPFIWTEEHQQAFDHIKKALLSAPALALPDLTKPFTLYIDERAGVARGVLTQTLGPWRRPVAYLSKKLDPVASGWPTCLKAVAAVALLLKDADKLTLGQNVTVIASHSLESIVRQPPDRWMTNARMTHYQSLLLNERVSFAPPAVLNPATLLPVESEATPVHRCSEILAEETGTRRDLEDQPLPGVPTWYTDGSSFITEGKRRAGAPIVDGKRTVWASSLPEGTSAQKAELVALTQALRLAEGKNINIYTDSRYAFATAHIHGAIYKQRGWLTSAGKDIKNKEEILALLEAIHLPRRVAIIHCPGHQRGSNPVATGNRRADEAAKQAALSTRVLAGTTKPAGKRTADGSEFEKRTADGSEFESPKKKAKVE

SEQ ID NO: 6432 - protein, 2232 aa, synthetic construct
MPAAKRVKLDGGDKKYSIGLDIGTNSVGWAVITDEYKVPSKKFKVLGNTDRHSIKKNLIGALLFDSGETAEATRLKRTARRRYTRRKNRICYLQEIFSNEMAKVDDSFFHRLEESFLVEEDKKHERHPIFGNIVDEVAYHEKYPTIYHLRKKLVDSTDKADLRLIYLALAHMIKFRGHFLIEGDLNPDNSDVDKLFIQLVQTYNQLFEENPINASGVDAKAILSARLSKSRRLENLIAQLPGEKKNGLFGNLIALSLGLTPNFKSNFDLAEDAKLQLSKDTYDDDLDNLLAQIGDQYADLFLAAKNLSDAILLSDILRVNTEITKAPLSASMIKRYDEHHQDLTLLKALVRQQLPEKYKEIFFDQSKNGYAGYIDGGASQEEFYKFIKPILEKMDGTEELLVKLNREDLLRKQRTFDNGSIPHQIHLGELHAILRRQEDFYPFLKDNREKIEKILTFRIPYYVGPLARGNSRFAWMTRKSEETITPWNFEEVVDKGASAQSFIERMTNFDKNLPNEKVLPKHSLLYEYFTVYNELTKVKYVTEGMRKPAFLSGEQKKAIVDLLFKTNRKVTVKQLKEDYFKKIECFDSVEISGVEDRFNASLGTYHDLLKIIKDKDFLDNEENEDILEDIVLTLTLFEDREMIEERLKTYAHLFDDKVMKQLKRRRYTGWGRLSRKLINGIRDKQSGKTILDFLKSDGFANRNFMQLIHDDSLTFKEDIQKAQVSGQGDSLHEHIANLAGSPAIKKGILQTVKVVDELVKVMGRHKPENIVIEMARENQTTQKGQKNSRERMKRIEEGIKELGSQILKEHPVENTQLQNEKLYLYYLQNGRDMYVDQELDINRLSDYDVDHIVPQSFLKDDSIDNKVLTRSDKARGKSDNVPSEEVVKKMKNYWRQLLNAKLITQRKFDNLTKAERGGLSELDKAGFIKRQLVETRQITKHVAQILDSRMNTKYDENDKLIREVKVITLKSKLVSDFRKDFQFYKVREINNYHHAHDAYLNAVVGTALIKKYPKLESEFVYGDYKVYDVRKMIAKSEQEIGKATAKYFFYSNIMNFFKTEITLANGEIRKRPLIETNGETGEIVWDKGRDFATVRKVLSMPQVNIVKKTEVQTGGFSKESILPKRNSDKLIARKKDWDPKKYGGFDSPTVAYSVLVVAKVEKGKSKKLKSVKELLGITIMERSSFEKNPIDFLEAKGYKEVKKDLIIKLPKYSLFELENGRKRMLASAGELQKGNELALPSKYVNFLYLASHYEKLKGSPEDNEQKQLFVEQHKHYLDEIIEQISEFSKRVILADANLDKVLSAYNKHRDKPIREQAENIIHLFTLTNLGAPAAFKYFDTTIDRKRYTSTKEVLDATLIHQSITGLYETRIDLSQLGGDGGEAAAKEAAAKEAAAKEAAAKEAAAKGGTLGDQGSRGSDPLPEPRVTLTVEGIPTEFLVNTGAEHSVLTKPMGKMGSKRTVVAGATGSKVYPWTTKRLLKIGQKQVTHSFLVIPECPAPLLGRDLLTKLKAQIQFSTEGPQVTWEDRPAMCLVLNLEEEYRLHEKPVPPSIDPSWLQLFPMVWAEKAGMGLANQVPPVVVELKSDASPVAVRQYPMSKEAREGIRPHIQRFLDLGILVPCQSPWNTPLLPVKKPGTNDYRPVQDLREVNKRVQDIHPTVPNPYNLLSSLPPSHTWYSVLDLKDAFFCLKLHPNSQPLFAFEWRDPEKGNTGQLTWTRLPQGFKNSPTLFNEALHRDLASFRALNPQVVMLQYVDDLLVAAPTYRDCKEGTRRLLQELSKLGYRVSAKKAQLCREEVTYLGYLLKGGKRWLTPARKATVMKIPTPTTPRQVREFLGTAGFCRLWIPGFASLAAPLYPLTRPKVPFTWTEAHQEAFGRIKEALLSAPALALPDLTKPFALYVDEKEGVARGVLTQTLGPWRRPVAYLSKKLDPVASGWPTCLKAIAAVALLLKDADKLTLGQNVLVIAPHNLESIVRQPPDRWMTNARMTHYQSLLLNERVSFAPPAILNPATLLPVESDDTPIHICSEILAEETGTRPDLRDQPLPGVPAWYTDGSSFIMDGRRQAGAAIVDNKRTVWASNLPEGTSAQKAELIALTQALRLAEGKSINIYTDSRYAFATAHVHGAIYKQRGWLTSAGKDIKNKEEILALLEAIHLPKRVAIIHCPGHQRGTDPVATGNRKADEAAKQAAQSTRILTETTKNAGKRTADGSEFEKRTADGSEFESPKKKAKVE

SEQ ID NO: 6433 - protein, 2110 aa, synthetic construct
MPAAKRVKLDGGDKKYSIGLDIGTNSVGWAVITDEYKVPSKKFKVLGNTDRHSIKKNLIGALLFDSGETAEATRLKRTARRRYTRRKNRICYLQEIFSNEMAKVDDSFFHRLEESFLVEEDKKHERHPIFGNIVDEVAYHEKYPTIYHLRKKLVDSTDKADLRLIYLALAHMIKFRGHFLIEGDLNPDNSDVDKLFIQLVQTYNQLFEENPINASGVDAKAILSARLSKSRRLENLIAQLPGEKKNGLFGNLIALSLGLTPNFKSNFDLAEDAKLQLSKDTYDDDLDNLLAQIGDQYADLFLAAKNLSDAILLSDILRVNTEITKAPLSASMIKRYDEHHQDLTLLKALVRQQLPEKYKEIFFDQSKNGYAGYIDGGASQEEFYKFIKPILEKMDGTEELLVKLNREDLLRKQRTFDNGSIPHQIHLGELHAILRRQEDFYPFLKDNREKIEKILTFRIPYYVGPLARGNSRFAWMTRKSEETITPWNFEEVVDKGASAQSFIERMTNFDKNLPNEKVLPKHSLLYEYFTVYNELTKVKYVTEGMRKPAFLSGEQKKAIVDLLFKTNRKVTVKQLKEDYFKKIECFDSVEISGVEDRFNASLGTYHDLLKIIKDKDFLDNEENEDILEDIVLTLTLFEDREMIEERLKTYAHLFDDKVMKQLKRRRYTGWGRLSRKLINGIRDKQSGKTILDFLKSDGFANRNFMQLIHDDSLTFKEDIQKAQVSGQGDSLHEHIANLAGSPAIKKGILQTVKVVDELVKVMGRHKPENIVIEMARENQTTQKGQKNSRERMKRIEEGIKELGSQILKEHPVENTQLQNEKLYLYYLQNGRDMYVDQELDINRLSDYDVDHIVPQSFLKDDSIDNKVLTRSDKARGKSDNVPSEEVVKKMKNYWRQLLNAKLITQRKFDNLTKAERGGLSELDKAGFIKRQLVETRQITKHVAQILDSRMNTKYDENDKLIREVKVITLKSKLVSDFRKDFQFYKVREINNYHHAHDAYLNAVVGTALIKKYPKLESEFVYGDYKVYDVRKMIAKSEQEIGKATAKYFFYSNIMNFFKTEITLANGEIRKRPLIETNGETGEIVWDKGRDFATVRKVLSMPQVNIVKKTEVQTGGFSKESILPKRNSDKLIARKKDWDPKKYGGFDSPTVAYSVLVVAKVEKGKSKKLKSVKELLGITIMERSSFEKNPIDFLEAKGYKEVKKDLIIKLPKYSLFELENGRKRMLASAGELQKGNELALPSKYVNFLYLASHYEKLKGSPEDNEQKQLFVEQHKHYLDEIIEQISEFSKRVILADANLDKVLSAYNKHRDKPIREQAENIIHLFTLTNLGAPAAFKYFDTTIDRKRYTSTKEVLDATLIHQSITGLYETRIDLSQLGGDGGEAAAKEAAAKEAAAKEAAAKEAAAKGGTLNLEDEYRLYETSAEPEVSPGSTWLSDFPQAWAETGGMGLAVRQAPLIIPLKATSTPVSIKQYPMSQEAKLGIKPHIQRLLDQGILVPCQSPWNTPLLPVKKPGTNDYRPVQDLREVNKRVEDIHPTVPNPYNLLSGLPPSHRWYTVLDLKDAFFCLRLHPTSQPLFAFEWRDPGMGISGQLTWTRLPQGFKNSPTLFNEALHRDLADFRIQHPDLILLQYVDDILLAATSELDCQQGTRALLLTLGNLGYRASAKKAQLCQKQVKYLGYLLKEGQRWLTEARKETVMGQPTPKTPRQLREFLGTAGFCRLWIPGFAEMAAPLYPLTKPGTLFNWGPDQQKAYQEIKQALLTAPALGLPDLTKPFELFVDEKQGYAKGVLTQKLGPWRRPVAYLSKKLDPVAAGWPPCLRMVAAIAVLRKDAGKLTMGQPLVILAPHAVEALVKQPPDRWLSNARMTHYQAMLLDTDRVQFGPVVALNPATLLPLPEEGAPHDCLEILAETHGTRPDLTDQPIPDADHTWYTDGSSFLQEGQRKAGAAVTTETEVIWARALPAGTSAQRAELIALTQALKMAEGKRLNVYTDSRYAFATAHIHGEIYRRRGWLTSEGREIKNKSEILALLKALFLPKRLSIIHCLGHQKGDSAEARGNRLADQAAREAAIKTPPDTSTLLAGKRTADGSEFEKRTADGSEFESPKKKAKVE

SEQ ID NO: 6434 - protein, 2110 aa, synthetic construct; identical to SEQ ID NO: 4507

SEQ ID NO: 6435 - protein, 2110 aa, synthetic construct
MPAAKRVKLDGGDKKYSIGLDIGTNSVGWAVITDEYKVPSKKFKVLGNTDRHSIKKNLIGALLFDSGETAEATRLKRTARRRYTRRKNRICYLQEIFSNEMAKVDDSFFHRLEESFLVEEDKKHERHPIFGNIVDEVAYHEKYPTIYHLRKKLVDSTDKADLRLIYLALAHMIKFRGHFLIEGDLNPDNSDVDKLFIQLVQTYNQLFEENPINASGVDAKAILSARLSKSRRLENLIAQLPGEKKNGLFGNLIALSLGLTPNFKSNFDLAEDAKLQLSKDTYDDDLDNLLAQIGDQYADLFLAAKNLSDAILLSDILRVNTEITKAPLSASMIKRYDEHHQDLTLLKALVRQQLPEKYKEIFFDQSKNGYAGYIDGGASQEEFYKFIKPILEKMDGTEELLVKLNREDLLRKQRTFDNGSIPHQIHLGELHAILRRQEDFYPFLKDNREKIEKILTFRIPYYVGPLARGNSRFAWMTRKSEETITPWNFEEVVDKGASAQSFIERMTNFDKNLPNEKVLPKHSLLYEYFTVYNELTKVKYVTEGMRKPAFLSGEQKKAIVDLLFKTNRKVTVKQLKEDYFKKIECFDSVEISGVEDRFNASLGTYHDLLKIIKDKDFLDNEENEDILEDIVLTLTLFEDREMIEERLKTYAHLFDDKVMKQLKRRRYTGWGRLSRKLINGIRDKQSGKTILDFLKSDGFANRNFMQLIHDDSLTFKEDIQKAQVSGQGDSLHEHIANLAGSPAIKKGILQTVKVVDELVKVMGRHKPENIVIEMARENQTTQKGQKNSRERMKRIEEGIKELGSQILKEHPVENTQLQNEKLYLYYLQNGRDMYVDQELDINRLSDYDVDHIVPQSFLKDDSIDNKVLTRSDKARGKSDNVPSEEVVKKMKNYWRQLLNAKLITQRKFDNLTKAERGGLSELDKAGFIKRQLVETRQITKHVAQILDSRMNTKYDENDKLIREVKVITLKSKLVSDFRKDFQFYKVREINNYHHAHDAYLNAVVGTALIKKYPKLESEFVYGDYKVYDVRKMIAKSEQEIGKATAKYFFYSNIMNFFKTEITLANGEIRKRPLIETNGETGEIVWDKGRDFATVRKVLSMPQVNIVKKTEVQTGGFSKESILPKRNSDKLIARKKDWDPKKYGGFDSPTVAYSVLVVAKVEKGKSKKLKSVKELLGITIMERSSFEKNPIDFLEAKGYKEVKKDLIIKLPKYSLFELENGRKRMLASAGELQKGNELALPSKYVNFLYLASHYEKLKGSPEDNEQKQLFVEQHKHYLDEIIEQISEFSKRVILADANLDKVLSAYNKHRDKPIREQAENIIHLFTLTNLGAPAAFKYFDTTIDRKRYTSTKEVLDATLIHQSITGLYETRIDLSQLGGDGGEAAAKEAAAKEAAAKEAAAKEAAAKGGTLNIEDEYRLHETSKGPDVPLGSTWLSDFPQAWAETGGMGLAVRQAPLIIPLKATSTPVSIKQYPMSQEARLGIKPHIQRLLDQGILVPCQSPWNTPLLPVKKPGTNDYRPVQDLREVNKRVEDIHPTVPNPYNLLSGLPPSHQWYTVLDLKDAFFCLRLHPTSQSLFAFEWRDPEMGISGQLTWTRLPQGFKNSPTLFDEALHRDLADFRIQHPDLILLQYVDDLLLAATSELDCQQGTRALLQTLGDLGYRASAKKAQICQKQVKYLGYLLKEGQRWLTEARKETVMGQPTPKTPRQLREFLGTAGFCRLWIPGFAEMAAPLYPLTKTGTLFEWGPDQQKAYQEIKQALLTAPALGLPDLTKPFELFVDEKQGYAKGVLTQKLGPWRRPVAYLSKKLDPVAAGWPPCLRMVAAIAVLTKDAGKLTMGQPLVILAPHAVEALVKQPPDRWLSNARMTHYQALLLDTDRVQFGPIVALNPATLLPLPEEGLQHDCLDILAEAHGTRPDLTDQPLPDADHTWYTDGSSFLQEGQRKAGAAVTTETEVVWAKALPAGTSAQRAELIALTQALKMAEGKKLNVYTDSRYAFATAHIHGEIYRRRGLLTSEGKEIKNKDEILALLKALFLPKRLSIIHCPGHQKGNRAEARGNRMADQAAREVATRETPETSTLLAGKRTADGSEFEKRTADGSEFESPKKKAKVE

SEQ ID NO: 6436 - protein, 2110 aa, synthetic construct
MPAAKRVKLDGGDKKYSIGLDIGTNSVGWAVITDEYKVPSKKFKVLGNTDRHSIKKNLIGALLFDSGETAEATRLKRTARRRYTRRKNRICYLQEIFSNEMAKVDDSFFHRLEESFLVEEDKKHERHPIFGNIVDEVAYHEKYPTIYHLRKKLVDSTDKADLRLIYLALAHMIKFRGHFLIEGDLNPDNSDVDKLFIQLVQTYNQLFEENPINASGVDAKAILSARLSKSRRLENLIAQLPGEKKNGLFGNLIALSLGLTPNFKSNFDLAEDAKLQLSKDTYDDDLDNLLAQIGDQYADLFLAAKNLSDAILLSDILRVNTEITKAPLSASMIKRYDEHHQDLTLLKALVRQQLPEKYKEIFFDQSKNGYAGYIDGGASQEEFYKFIKPILEKMDGTEELLVKLNREDLLRKQRTFDNGSIPHQIHLGELHAILRRQEDFYPFLKDNREKIEKILTFRIPYYVGPLARGNSRFAWMTRKSEETITPWNFEEVVDKGASAQSFIERMTNFDKNLPNEKVLPKHSLLYEYFTVYNELTKVKYVTEGMRKPAFLSGEQKKAIVDLLFKTNRKVTVKQLKEDYFKKIECFDSVEISGVEDRFNASLGTYHDLLKIIKDKDFLDNEENEDILEDIVLTLTLFEDREMIEERLKTYAHLFDDKVMKQLKRRRYTGWGRLSRKLINGIRDKQSGKTILDFLKSDGFANRNFMQLIHDDSLTFKEDIQKAQVSGQGDSLHEHIANLAGSPAIKKGILQTVKVVDELVKVMGRHKPENIVIEMARENQTTQKGQKNSRERMKRIEEGIKELGSQILKEHPVENTQLQNEKLYLYYLQNGRDMYVDQELDINRLSDYDVDHIVPQSFLKDDSIDNKVLTRSDKARGKSDNVPSEEVVKKMKNYWRQLLNAKLITQRKFDNLTKAERGGLSELDKAGFIKRQLVETRQITKHVAQILDSRMNTKYDENDKLIREVKVITLKSKLVSDFRKDFQFYKVREINNYHHAHDAYLNAVVGTALIKKYPKLESEFVYGDYKVYDVRKMIAKSEQEIGKATAKYFFYSNIMNFFKTEITLANGEIRKRPLIETNGETGEIVWDKGRDFATVRKVLSMPQVNIVKKTEVQTGGFSKESILPKRNSDKLIARKKDWDPKKYGGFDSPTVAYSVLVVAKVEKGKSKKLKSVKELLGITIMERSSFEKNPIDFLEAKGYKEVKKDLIIKLPKYSLFELENGRKRMLASAGELQKGNELALPSKYVNFLYLASHYEKLKGSPEDNEQKQLFVEQHKHYLDEIIEQISEFSKRVILADANLDKVLSAYNKHRDKPIREQAENIIHLFTLTNLGAPAAFKYFDTTIDRKRYTSTKEVLDATLIHQSITGLYETRIDLSQLGGDGGEAAAKEAAAKEAAAKEAAAKEAAAKGGTLNIEDEHRLHETSKEPDVSLGSTWLSDFPQAWAETGGMGLAVRQAPLIIPLKATSTPVSIKQYPMSQEARLGIKPHIQRLLDQGILVPCQSPWNTPLLPVKKPGTNDYRPVQDLREVNKRVEDIHPTVPNPYNLLSGLPPSHQWYTVLDLKDAFFCLRLHPTSQPLFAFEWRDPEMGISGQLTWTRLPQGFKNSPTLFDEALHRDLADFRIQHPDLILLQYVDDLLLAATSELDCQQGTRALLQTLGNLGYRASAKKAQICQKQVKYLGYLLKEGQRWLTEARKETVMGQPTPKTPRQLREFLGTAGFCRLWIPGFAEMAAPLYPLTKTGTLFNWGPDQQKAYQEIKQALLTAPALGLPDLTKPFELFVDEKQGYAKGVLTQKLGPWRRPVAYLSKKLDPVAAGWPPCLRMVAAIAVLTKDAGKLTMGQPLVILAPHAVEALVKQPPDRWLSNARMTHYQALLLDTDRVQFGPVVALNPATLLPLPEEGLQHNCLDILAEAHGTRPDLTDQPLPDADHTWYTDGSSLLQEGQRKAGAAVTTETEVIWAKALPAGTSAQRAELIALTQALKMAEGKKLNVYTDSRYAFATAHIHGEIYRRRGLLTSEGKEIKNKDEILALLKALFLPKRLSIIHCPGHQKGHSAEARGNRMADQAARKAAITETPDTSTLLAGKRTADGSEFEKRTADGSEFESPKKKAKVE

SEQ ID NO: 6437 - protein, 2190 aa, synthetic construct
MPAAKRVKLDGGDKKYSIGLDIGTNSVGWAVITDEYKVPSKKFKVLGNTDRHSIKKNLIGALLFDSGETAEATRLKRTARRRYTRRKNRICYLQEIFSNEMAKVDDSFFHRLEESFLVEEDKKHERHPIFGNIVDEVAYHEKYPTIYHLRKKLVDSTDKADLRLIYLALAHMIKFRGHFLIEGDLNPDNSDVDKLFIQLVQTYNQLFEENPINASGVDAKAILSARLSKSRRLENLIAQLPGEKKNGLFGNLIALSLGLTPNFKSNFDLAEDAKLQLSKDTYDDDLDNLLAQIGDQYADLFLAAKNLSDAILLSDILRVNTEITKAPLSASMIKRYDEHHQDLTLLKALVRQQLPEKYKEIFFDQSKNGYAGYIDGGASQEEFYKFIKPILEKMDGTEELLVKLNREDLLRKQRTFDNGSIPHQIHLGELHAILRRQEDFYPFLKDNREKIEKILTFRIPYYVGPLARGNSRFAWMTRKSEETITPWNFEEVVDKGASAQSFIERMTNFDKNLPNEKVLPKHSLLYEYFTVYNELTKVKYVTEGMRKPAFLSGEQKKAIVDLLFKTNRKVTVKQLKEDYFKKIECFDSVEISGVEDRFNASLGTYHDLLKIIKDKDFLDNEENEDILEDIVLTLTLFEDREMIEERLKTYAHLFDDKVMKQLKRRRYTGWGRLSRKLINGIRDKQSGKTILDFLKSDGFANRNFMQLIHDDSLTFKEDIQKAQVSGQGDSLHEHIANLAGSPAIKKGILQTVKVVDELVKVMGRHKPENIVIEMARENQTTQKGQKNSRERMKRIEEGIKELGSQILKEHPVENTQLQNEKLYLYYLQNGRDMYVDQELDINRLSDYDVDHIVPQSFLKDDSIDNKVLTRSDKARGKSDNVPSEEVVKKMKNYWRQLLNAKLITQRKFDNLTKAERGGLSELDKAGFIKRQLVETRQITKHVAQILDSRMNTKYDENDKLIREVKVITLKSKLVSDFRKDFQFYKVREINNYHHAHDAYLNAVVGTALIKKYPKLESEFVYGDYKVYDVRKMIAKSEQEIGKATAKYFFYSNIMNFFKTEITLANGEIRKRPLIETNGETGEIVWDKGRDFATVRKVLSMPQVNIVKKTEVQTGGFSKESILPKRNSDKLIARKKDWDPKKYGGFDSPTVAYSVLVVAKVEKGKSKKLKSVKELLGITIMERSSFEKNPIDFLEAKGYKEVKKDLIIKLPKYSLFELENGRKRMLASAGELQKGNELALPSKYVNFLYLASHYEKLKGSPEDNEQKQLFVEQHKHYLDEIIEQISEFSKRVILADANLDKVLSAYNKHRDKPIREQAENIIHLFTLTNLGAPAAFKYFDTTIDRKRYTSTKEVLDATLIHQSITGLYETRIDLSQLGGDGGEAAAKEAAAKEAAAKEAAAKEAAAKGGMDPLQLLQPLEAEIKGTKLKAHWNSGATITCVPEAFLEDERPIQTMLIKTIHGEKQQDVYYLTFKVQGRKVEAEVLASPYDYILLNPSDVPWLMKKPLQLTVLVPLHEYQERLLQQTALPKEQKELLQKLFLKYDALWQHWENQVGHRRIKPHNIATGTLAPRPQKQYPINPKAKPSIQIVIDDLLKQGVLIQQNSTMNTPVYPVPKPDGKWRMVLDYREVNKTIPLIAAQNQHSAGILSSIYRGKYKTTLDLTNGFWAHPITPESYWLTAFTWQGKQYCWTRLPQGFLNSPALFTADVVDLLKEIPNVQAYVDDIYISHDDPQEHLEQLEKIFSILLNAGYVVSLKKSEIAQREVEFLGFNITKEGRGLTDTFKQKLLNITPPKDLKQLQSILGLLNFARNFIPNYSELVKPLYTIVANANGKFISWTEDNSNQLQHIISVLNQADNLEERNPETRLIIKVNSSPSAGYIRYYNEGSKRPIMYVNYIFSKAEAKFTQTEKLLTTMHKGLIKAMDLAMGQEILVYSPIVSMTKIQRTPLPERKALPVRWITWMTYLEDPRIQFHYDKSLPELQQIPNVTEDVIAKTKHPSEFAMVFYTDGSAIKHPDVNKSHSAGMGIAQVQFIPEYKIVHQWSIPLGDHTAQLAEIAAVEFACKKALKISGPVLIVTDSFYVAESANKELPYWKSNGFLNNKKKPLRHVSKWKSIAECLQLKPDIIIMHEKGHQQPMTTLHTEGNNLADKLATQGSYVVHAGKRTADGSEFEKRTADGSEFESPKKKAKVE

SEQ ID NO: 6438 - protein, 2110 aa, synthetic construct
MPAAKRVKLDGGDKKYSIGLDIGTNSVGWAVITDEYKVPSKKFKVLGNTDRHSIKKNLIGALLFDSGETAEATRLKRTARRRYTRRKNRICYLQEIFSNEMAKVDDSFFHRLEESFLVEEDKKHERHPIFGNIVDEVAYHEKYPTIYHLRKKLVDSTDKADLRLIYLALAHMIKFRGHFLIEGDLNPDNSDVDKLFIQLVQTYNQLFEENPINASGVDAKAILSARLSKSRRLENLIAQLPGEKKNGLFGNLIALSLGLTPNFKSNFDLAEDAKLQLSKDTYDDDLDNLLAQIGDQYADLFLAAKNLSDAILLSDILRVNTEITKAPLSASMIKRYDEHHQDLTLLKALVRQQLPEKYKEIFFDQSKNGYAGYIDGGASQEEFYKFIKPILEKMDGTEELLVKLNREDLLRKQRTFDNGSIPHQIHLGELHAILRRQEDFYPFLKDNREKIEKILTFRIPYYVGPLARGNSRFAWMTRKSEETITPWNFEEVVDKGASAQSFIERMTNFDKNLPNEKVLPKHSLLYEYFTVYNELTKVKYVTEGMRKPAFLSGEQKKAIVDLLFKTNRKVTVKQLKEDYFKKIECFDSVEISGVEDRFNASLGTYHDLLKIIKDKDFLDNEENEDILEDIVLTLTLFEDREMIEERLKTYAHLFDDKVMKQLKRRRYTGWGRLSRKLINGIRDKQSGKTILDFLKSDGFANRNFMQLIHDDSLTFKEDIQKAQVSGQGDSLHEHIANLAGSPAIKKGILQTVKVVDELVKVMGRHKPENIVIEMARENQTTQKGQKNSRERMKRIEEGIKELGSQILKEHPVENTQLQNEKLYLYYLQNGRDMYVDQELDINRLSDYDVDHIVPQSFLKDDSIDNKVLTRSDKARGKSDNVPSEEVVKKMKNYWRQLLNAKLITQRKFDNLTKAERGGLSELDKAGFIKRQLVETRQITKHVAQILDSRMNTKYDENDKLIREVKVITLKSKLVSDFRKDFQFYKVREINNYHHAHDAYLNAVVGTALIKKYPKLESEFVYGDYKVYDVRKMIAKSEQEIGKATAKYFFYSNIMNFFKTEITLANGEIRKRPLIETNGETGEIVWDKGRDFATVRKVLSMPQVNIVKKTEVQTGGFSKESILPKRNSDKLIARKKDWDPKKYGGFDSPTVAYSVLVVAKVEKGKSKKLKSVKELLGITIMERSSFEKNPIDFLEAKGYKEVKKDLIIKLPKYSLFELENGRKRMLASAGELQKGNELALPSKYVNFLYLASHYEKLKGSPEDNEQKQLFVEQHKHYLDEIIEQISEFSKRVILADANLDKVLSAYNKHRDKPIREQAENIIHLFTLTNLGAPAAFKYFDTTIDRKRYTSTKEVLDATLIHQSITGLYETRIDLSQLGGDGGEAAAKEAAAKEAAAKEAAAKEAAAKGGTLNIEDEYRLHETSKEPDVPLGSTWLSDFPQAWAETGGMGLAVRQAPLIIPLKATSTPVSIKQYPMSQEARLGIKPHIQRLLDQGILVPCQSPWNTPLLPVKKPGTNDYRPVQDLREVNKRVEDIHPTVPNPYNLLSGLPPSHQWYTVLDLKDAFFCLRLHPTSQPLFAFEWRDPEMGISGQLTWTRLPQGFKNSPTLFDEALHRDLADFRIQHPDLILLQYVDDLLLAATSEQDCQRGTRALLQTLGNLGYRASAKKAQICQKQVKYLGYLLKEGQRWLTEARKETVMGQPTPKTPRQLREFLGTAGFCRLWIPGFAEMAAPLYPLTKTGTLFNWGPDQQKAYQEIKQALLTAPALGLPDLTKPFELFVDEKQGYAKGVLTQKLGPWRRPVAYLSKKLDPVAAGWPPCLRMVAAIAVLTKDAGKLTMGQPLVILAPHAVEALVKQPPDRWLSNARMTHYQAMLLDTDRVQFGPVVALNPATLLPLPEKEAPHDCLEILAETHGTRPDLTDQPIPDADYTWYTDGSSFLQEGQRRAGAAVTTETEVIWARALPAGTSAQRAELIALTQALKMAEGKKLNVYTDSRYAFATAHVHGEIYRRRGLLTSEGREIKNKNEILALLKALFLPKRLSIIHCPGHQKGNSAEARGNRMADQAAREAAMKAVLETSTLLAGKRTADGSEFEKRTADGSEFESPKKKAKVE

SEQ ID NO: 6439 - protein, 2110 aa, synthetic construct
MPAAKRVKLDGGDKKYSIGLDIGTNSVGWAVITDEYKVPSKKFKVLGNTDRHSIKKNLIGALLFDSGETAEATRLKRTARRRYTRRKNRICYLQEIFSNEMAKVDDSFFHRLEESFLVEEDKKHERHPIFGNIVDEVAYHEKYPTIYHLRKKLVDSTDKADLRLIYLALAHMIKFRGHFLIEGDLNPDNSDVDKLFIQLVQTYNQLFEENPINASGVDAKAILSARLSKSRRLENLIAQLPGEKKNGLFGNLIALSLGLTPNFKSNFDLAEDAKLQLSKDTYDDDLDNLLAQIGDQYADLFLAAKNLSDAILLSDILRVNTEITKAPLSASMIKRYDEHHQDLTLLKALVRQQLPEKYKEIFFDQSKNGYAGYIDGGASQEEFYKFIKPILEKMDGTEELLVKLNREDLLRKQRTFDNGSIPHQIHLGELHAILRRQEDFYPFLKDNREKIEKILTFRIPYYVGPLARGNSRFAWMTRKSEETITPWNFEEVVDKGASAQSFIERMTNFDKNLPNEKVLPKHSLLYEYFTVYNELTKVKYVTEGMRKPAFLSGEQKKAIVDLLFKTNRKVTVKQLKEDYFKKIECFDSVEISGVEDRFNASLGTYHDLLKIIKDKDFLDNEENEDILEDIVLTLTLFEDREMIEERLKTYAHLFDDKVMKQLKRRRYTGWGRLSRKLINGIRDKQSGKTILDFLKSDGFANRNFMQLIHDDSLTFKEDIQKAQVSGQGDSLHEHIANLAGSPAIKKGILQTVKVVDELVKVMGRHKPENIVIEMARENQTTQKGQKNSRERMKRIEEGIKELGSQILKEHPVENTQLQNEKLYLYYLQNGRDMYVDQELDINRLSDYDVDHIVPQSFLKDDSIDNKVLTRSDKARGKSDNVPSEEVVKKMKNYWRQLLNAKLITQRKFDNLTKAERGGLSELDKAGFIKRQLVETRQITKHVAQILDSRMNTKYDENDKLIREVKVITLKSKLVSDFRKDFQFYKVREINNYHHAHDAYLNAVVGTALIKKYPKLESEFVYGDYKVYDVRKMIAKSEQEIGKATAKYFFYSNIMNFFKTEITLANGEIRKRPLIETNGETGEIVWDKGRDFATVRKVLSMPQVNIVKKTEVQTGGFSKESILPKRNSDKLIARKKDWDPKKYGGFDSPTVAYSVLVVAKVEKGKSKKLKSVKELLGITIMERSSFEKNPIDFLEAKGYKEVKKDLIIKLPKYSLFELENGRKRMLASAGELQKGNELALPSKYVNFLYLASHYEKLKGSPEDNEQKQLFVEQHKHYLDEIIEQISEFSKRVILADANLDKVLSAYNKHRDKPIREQAENIIHLFTLTNLGAPAAFKYFDTTIDRKRYTSTKEVLDATLIHQSITGLYETRIDLSQLGGDGGEAAAKEAAAKEAAAKEAAAKEAAAKGGTLNIEDEYRLHETSKEPDVPLGSTWLSDFPQAWAETGGMGLAVRQAPLIIPLKATSTPVSIKQYPMSQEARLGIKPHIQRLLDQGILVPCQSPWNTPLLPVKKPGTNDYRPVQDLREVNKRVEDIHPTVPNPYNLLSGLPPSHQWYTVLDLKDAFFCLRLHPTSQPLFAFEWRDPEMGISGQLTWTRLPQGFKNSPTLFNEALHRDLADFRIQHPDLILLQYVDDLLLAATSEQDCQRGTRALLQTLGNLGYRASAKKAQICQKQVKYLGYLLKEGQRWLTEARKETVMGQPTPKTPRQLREFLGTAGFCRLWIPGFAEMAAPLYPLTKPGTLFNWGPDQQKAYQEIKQALLTAPALGLPDLTKPFELFVDEKQGYAKGVLTQKLGPWRRPVAYLSKKLDPVAAGWPPCLRMVAAIAVLTKDAGKLTMGQPLVILAPHAVEALVKQPPDRWLSNARMTHYQAMLLDTDRVQFGPVVALNPATLLPLPEKEAPHDCLEILAETHGTRPDLTDQPIPDADYTWYTDGSSFLQEGQRRAGAAVTTETEVIWARALPAGTSAQRAELIALTQALKMAEGKKLNVYTDSRYAFATAHVHGEIYRRRGWLTSEGREIKNKNEILALLKALFLPKRLSIIHCPGHQKGNSAEARGNRMADQAAREAAMKAVLETSTLLAGKRTADGSEFEKRTADGSEFESPKKKAKVE

SEQ ID NO: 6440 - protein, 2117 aa, synthetic construct
MPAAKRVKLDGGDKKYSIGLDIGTNSVGWAVITDEYKVPSKKFKVLGNTDRHSIKKNLIGALLFDSGETAEATRLKRTARRRYTRRKNRICYLQEIFSNEMAKVDDSFFHRLEESFLVEEDKKHERHPIFGNIVDEVAYHEKYPTIYHLRKKLVDSTDKADLRLIYLALAHMIKFRGHFLIEGDLNPDNSDVDKLFIQLVQTYNQLFEENPINASGVDAKAILSARLSKSRRLENLIAQLPGEKKNGLFGNLIALSLGLTPNFKSNFDLAEDAKLQLSKDTYDDDLDNLLAQIGDQYADLFLAAKNLSDAILLSDILRVNTEITKAPLSASMIKRYDEHHQDLTLLKALVRQQLPEKYKEIFFDQSKNGYAGYIDGGASQEEFYKFIKPILEKMDGTEELLVKLNREDLLRKQRTFDNGSIPHQIHLGELHAILRRQEDFYPFLKDNREKIEKILTFRIPYYVGPLARGNSRFAWMTRKSEETITPWNFEEVVDKGASAQSFIERMTNFDKNLPNEKVLPKHSLLYEYFTVYNELTKVKYVTEGMRKPAFLSGEQKKAIVDLLFKTNRKVTVKQLKEDYFKKIECFDSVEISGVEDRFNASLGTYHDLLKIIKDKDFLDNEENEDILEDIVLTLTLFEDREMIEERLKTYAHLFDDKVMKQLKRRRYTGWGRLSRKLINGIRDKQSGKTILDFLKSDGFANRNFMQLIHDDSLTFKEDIQKAQVSGQGDSLHEHIANLAGSPAIKKGILQTVKVVDELVKVMGRHKPENIVIEMARENQTTQKGQKNSRERMKRIEEGIKELGSQILKEHPVENTQLQNEKLYLYYLQNGRDMYVDQELDINRLSDYDVDHIVPQSFLKDDSIDNKVLTRSDKARGKSDNVPSEEVVKKMKNYWRQLLNAKLITQRKFDNLTKAERGGLSELDKAGFIKRQLVETRQITKHVAQILDSRMNTKYDENDKLIREVKVITLKSKLVSDFRKDFQFYKVREINNYHHAHDAYLNAVVGTALIKKYPKLESEFVYGDYKVYDVRKMIAKSEQEIGKATAKYFFYSNIMNFFKTEITLANGEIRKRPLIETNGETGEIVWDKGRDFATVRKVLSMPQVNIVKKTEVQTGGFSKESILPKRNSDKLIARKKDWDPKKYGGFDSPTVAYSVLVVAKVEKGKSKKLKSVKELLGITIMERSSFEKNPIDFLEAKGYKEVKKDLIIKLPKYSLFELENGRKRMLASAGELQKGNELALPSKYVNFLYLASHYEKLKGSPEDNEQKQLFVEQHKHYLDEIIEQISEFSKRVILADANLDKVLSAYNKHRDKPIREQAENIIHLFTLTNLGAPAAFKYFDTTIDRKRYTSTKEVLDATLIHQSITGLYETRIDLSQLGGDGGEAAAKEAAAKEAAAKEAAAKEAAAKEAAAKGGTAPLEEEYRLFLEAPIQNVTLLEQWKREIPKVWAEINPPGLASTQAPIHVQLLSTALPVRVRQYPITLEAKRSLRETIRKFRAAGILRPVHSPWNTPLLPVRKSGTSEYRMVQDLREVNKRVETIHPTVPNPYTLLSLLPPDRIWYSVLDLKDAFFCIPLAPESQLIFAFEWADAEEGESGQLTWTRLPQGFKNSPTLFDEALNRDLQGFRLDHPSVSLLQYVDDLLIAADTQAACLSATRDLLMTLAELGYRVSGKKAQLCQEEVTYLGFKIHKGSRSLSNSRTQAILQIPVPKTKRQVREFLGTIGYCRLWIPGFAELAQPLYAATRGGNDPLVWGEKEEEAFQSLKLALTQPPALALPSLDKPFQLFVEETSGAAKGVLTQALGPWKRPVAYLSKRLDPVAAGWPRCLRAIAAAALLTREASKLTFGQDIEITSSHNLESLLRSPPDKWLTNARITQYQVLLLDPPRVRFKQTAALNPATLLPETDDTLPIHHCLDTLDSLTSTRPDLTDQPLAQAEATLFTDGSSYIRDGKRYAGAAVVTLDSVIWAEPLPIGTSAQKAELIALTKALEWSKDKSVNIYTDSRYAFATLHVHGMIYRERGLLTAGGKAIKNAPEILALLTAVWLPKRVAVMHCKGHQKDDAPTSTGNRRADEVAREVAIRPLSTQATISAGKRTADGSEFEKRTADGSEFESPKKKAKVE

SEQ ID NO: 6441 - protein, 2117 aa, synthetic construct
MPAAKRVKLDGGDKKYSIGLDIGTNSVGWAVITDEYKVPSKKFKVLGNTDRHSIKKNLIGALLFDSGETAEATRLKRTARRRYTRRKNRICYLQEIFSNEMAKVDDSFFHRLEESFLVEEDKKHERHPIFGNIVDEVAYHEKYPTIYHLRKKLVDSTDKADLRLIYLALAHMIKFRGHFLIEGDLNPDNSDVDKLFIQLVQTYNQLFEENPINASGVDAKAILSARLSKSRRLENLIAQLPGEKKNGLFGNLIALSLGLTPNFKSNFDLAEDAKLQLSKDTYDDDLDNLLAQIGDQYADLFLAAKNLSDAILLSDILRVNTEITKAPLSASMIKRYDEHHQDLTLLKALVRQQLPEKYKEIFFDQSKNGYAGYIDGGASQEEFYKFIKPILEKMDGTEELLVKLNREDLLRKQRTFDNGSIPHQIHLGELHAILRRQEDFYPFLKDNREKIEKILTFRIPYYVGPLARGNSRFAWMTRKSEETITPWNFEEVVDKGASAQSFIERMTNFDKNLPNEKVLPKHSLLYEYFTVYNELTKVKYVTEGMRKPAFLSGEQKKAIVDLLFKTNRKVTVKQLKEDYFKKIECFDSVEISGVEDRFNASLGTYHDLLKIIKDKDFLDNEENEDILEDIVLTLTLFEDREMIEERLKTYAHLFDDKVMKQLKRRRYTGWGRLSRKLINGIRDKQSGKTILDFLKSDGFANRNFMQLIHDDSLTFKEDIQKAQVSGQGDSLHEHIANLAGSPAIKKGILQTVKVVDELVKVMGRHKPENIVIEMARENQTTQKGQKNSRERMKRIEEGIKELGSQILKEHPVENTQLQNEKLYLYYLQNGRDMYVDQELDINRLSDYDVDHIVPQSFLKDDSIDNKVLTRSDKARGKSDNVPSEEVVKKMKNYWRQLLNAKLITQRKFDNLTKAERGGLSELDKAGFIKRQLVETRQITKHVAQILDSRMNTKYDENDKLIREVKVITLKSKLVSDFRKDFQFYKVREINNYHHAHDAYLNAVVGTALIKKYPKLESEFVYGDYKVYDVRKMIAKSEQEIGKATAKYFFYSNIMNFFKTEITLANGEIRKRPLIETNGETGEIVWDKGRDFATVRKVLSMPQVNIVKKTEVQTGGFSKESILPKRNSDKLIARKKDWDPKKYGGFDSPTVAYSVLVVAKVEKGKSKKLKSVKELLGITIMERSSFEKNPIDFLEAKGYKEVKKDLIIKLPKYSLFELENGRKRMLASAGELQKGNELALPSKYVNFLYLASHYEKLKGSPEDNEQKQLFVEQHKHYLDEIIEQISEFSKRVILADANLDKVLSAYNKHRDKPIREQAENIIHLFTLTNLGAPAAFKYFDTTIDRKRYTSTKEVLDATLIHQSITGLYETRIDLSQLGGDGGEAAAKEAAAKEAAAKEAAAKEAAAKEAAAKGGTAPLEEEYRLFLEAPIQNVTLLEQWKREIPKVWAEINPPGLASTQAPIHVQLLSTALPVRVRQYPITLEAKRSLRETIRKFRAAGILRPVHSPWNTPLLPVRKSGTSEYRMVQDLREVNKRVETIHPTVPNPYTLLSLLPPDRIWYSVLDLKDAFFCIPLAPESQLIFAFEWADAEEGESGQLTWTRLPQGFKNSPTLFNEALNRDLQGFRLDHPSVSLLQYVDDLLIAADTQAACLSATRDLLMTLAELGYRVSGKKAQLCQEEVTYLGFKIHKGSRSLSNSRTQAILQIPVPKTKRQVREFLGTIGYCRLWIPGFAELAQPLYAATRPGNDPLVWGEKEEEAFQSLKLALTQPPALALPSLDKPFQLFVEETSGAAKGVLTQALGPWKRPVAYLSKRLDPVAAGWPRCLRAIAAAALLTREASKLTFGQDIEITSSHNLESLLRSPPDKWLTNARITQYQVLLLDPPRVRFKQTAALNPATLLPETDDTLPIHHCLDTLDSLTSTRPDLTDQPLAQAEATLFTDGSSYIRDGKRYAGAAVVTLDSVIWAEPLPIGTSAQKAELIALTKALEWSKDKSVNIYTDSRYAFATLHVHGMIYRERGWLTAGGKAIKNAPEILALLTAVWLPKRVAVMHCKGHQKDDAPTSTGNRRADEVAREVAIRPLSTQATISAGKRTADGSEFEKRTADGSEFESPKKKAKVE

SEQ ID NO: 6442 - protein, 2121 aa, synthetic construct
MPAAKRVKLDGGDKKYSIGLDIGTNSVGWAVITDEYKVPSKKFKVLGNTDRHSIKKNLIGALLFDSGETAEATRLKRTARRRYTRRKNRICYLQEIFSNEMAKVDDSFFHRLEESFLVEEDKKHERHPIFGNIVDEVAYHEKYPTIYHLRKKLVDSTDKADLRLIYLALAHMIKFRGHFLIEGDLNPDNSDVDKLFIQLVQTYNQLFEENPINASGVDAKAILSARLSKSRRLENLIAQLPGEKKNGLFGNLIALSLGLTPNFKSNFDLAEDAKLQLSKDTYDDDLDNLLAQIGDQYADLFLAAKNLSDAILLSDILRVNTEITKAPLSASMIKRYDEHHQDLTLLKALVRQQLPEKYKEIFFDQSKNGYAGYIDGGASQEEFYKFIKPILEKMDGTEELLVKLNREDLLRKQRTFDNGSIPHQIHLGELHAILRRQEDFYPFLKDNREKIEKILTFRIPYYVGPLARGNSRFAWMTRKSEETITPWNFEEVVDKGASAQSFIERMTNFDKNLPNEKVLPKHSLLYEYFTVYNELTKVKYVTEGMRKPAFLSGEQKKAIVDLLFKTNRKVTVKQLKEDYFKKIECFDSVEISGVEDRFNASLGTYHDLLKIIKDKDFLDNEENEDILEDIVLTLTLFEDREMIEERLKTYAHLFDDKVMKQLKRRRYTGWGRLSRKLINGIRDKQSGKTILDFLKSDGFANRNFMQLIHDDSLTFKEDIQKAQVSGQGDSLHEHIANLAGSPAIKKGILQTVKVVDELVKVMGRHKPENIVIEMARENQTTQKGQKNSRERMKRIEEGIKELGSQILKEHPVENTQLQNEKLYLYYLQNGRDMYVDQELDINRLSDYDVDHIVPQSFLKDDSIDNKVLTRSDKARGKSDNVPSEEVVKKMKNYWRQLLNAKLITQRKFDNLTKAERGGLSELDKAGFIKRQLVETRQITKHVAQILDSRMNTKYDENDKLIREVKVITLKSKLVSDFRKDFQFYKVREINNYHHAHDAYLNAVVGTALIKKYPKLESEFVYGDYKVYDVRKMIAKSEQEIGKATAKYFFYSNIMNFFKTEITLANGEIRKRPLIETNGETGEIVWDKGRDFATVRKVLSMPQVNIVKKTEVQTGGFSKESILPKRNSDKLIARKKDWDPKKYGGFDSPTVAYSVLVVAKVEKGKSKKLKSVKELLGITIMERSSFEKNPIDFLEAKGYKEVKKDLIIKLPKYSLFELENGRKRMLASAGELQKGNELALPSKYVNFLYLASHYEKLKGSPEDNEQKQLFVEQHKHYLDEIIEQISEFSKRVILADANLDKVLSAYNKHRDKPIREQAENIIHLFTLTNLGAPAAFKYFDTTIDRKRYTSTKEVLDATLIHQSITGLYETRIDLSQLGGDGGEAAAKEAAAKEAAAKEAAAKEAAAKEAAAKGGTVSLQDEHRLFDIPVTTSLPDVWLQDFPQAWAETGGLGRAKCQAPIIIDLKPTAVPVSIKQYPMSLEAHMGIRQHIIKFLELGVLRPCRSPWNTPLLPVKKPGTQDYRPVQDLREINKRTVDIHPTVPNPYNLLSTLKPDYSWYTVLDLKDAFFCLPLAPQSQELFAFEWKDPERGISGQLTWTRLPQGFKNSPTLFDEALHRDLTDFRTQHPEVTLLQYVDDLLLAAPTKKACTQGTRHLLQELGEKGYRASAKKAQICQTKVTYLGYILSEGKRWLTPGRIETVARIPPPRNPREVREFLGTAGFCRLWIPGFAELAAPLYALTKESTPFTWQTEHQLAFEALKKALLSAPALGLPDTSKPFTLFLDERQGIAKGVLTQKLGPWKRPVAYLSKKLDPVAAGWPPCLRIMAATAMLVKDSAKLTLGQPLTVITPHTLEAIVRQPPDRWITNARLTHYQALLLDTDRVQFGPPVTLNPATLLPVPENQPSPHDCRQVLAETHGTREDLKDQELPDADHTWYTDGSSYLDSGTRRAGAAVVDGHNTIWAQSLPPGTSAQKAELIALTKALELSKGKKANIYTDSRYAFATAHTHGSIYERRGLLTSEGKEIKNKAEIIALLKALFLPQEVAIIHCPGHQKGQDPVAVGNRQADRVARQAAMAEVLTLATEPDNTSHITAGKRTADGSEFEKRTADGSEFESPKKKAKVE

SEQ ID NO: 6443 - protein, 2192 aa, synthetic construct
MPAAKRVKLDGGDKKYSIGLDIGTNSVGWAVITDEYKVPSKKFKVLGNTDRHSIKKNLIGALLFDSGETAEATRLKRTARRRYTRRKNRICYLQEIFSNEMAKVDDSFFHRLEESFLVEEDKKHERHPIFGNIVDEVAYHEKYPTIYHLRKKLVDSTDKADLRLIYLALAHMIKFRGHFLIEGDLNPDNSDVDKLFIQLVQTYNQLFEENPINASGVDAKAILSARLSKSRRLENLIAQLPGEKKNGLFGNLIALSLGLTPNFKSNFDLAEDAKLQLSKDTYDDDLDNLLAQIGDQYADLFLAAKNLSDAILLSDILRVNTEITKAPLSASMIKRYDEHHQDLTLLKALVRQQLPEKYKEIFFDQSKNGYAGYIDGGASQEEFYKFIKPILEKMDGTEELLVKLNREDLLRKQRTFDNGSIPHQIHLGELHAILRRQEDFYPFLKDNREKIEKILTFRIPYYVGPLARGNSRFAWMTRKSEETITPWNFEEVVDKGASAQSFIERMTNFDKNLPNEKVLPKHSLLYEYFTVYNELTKVKYVTEGMRKPAFLSGEQKKAIVDLLFKTNRKVTVKQLKEDYFKKIECFDSVEISGVEDRFNASLGTYHDLLKIIKDKDFLDNEENEDILEDIVLTLTLFEDREMIEERLKTYAHLFDDKVMKQLKRRRYTGWGRLSRKLINGIRDKQSGKTILDFLKSDGFANRNFMQLIHDDSLTFKEDIQKAQVSGQGDSLHEHIANLAGSPAIKKGILQTVKVVDELVKVMGRHKPENIVIEMARENQTTQKGQKNSRERMKRIEEGIKELGSQILKEHPVENTQLQNEKLYLYYLQNGRDMYVDQELDINRLSDYDVDHIVPQSFLKDDSIDNKVLTRSDKARGKSDNVPSEEVVKKMKNYWRQLLNAKLITQRKFDNLTKAERGGLSELDKAGFIKRQLVETRQITKHVAQILDSRMNTKYDENDKLIREVKVITLKSKLVSDFRKDFQFYKVREINNYHHAHDAYLNAVVGTALIKKYPKLESEFVYGDYKVYDVRKMIAKSEQEIGKATAKYFFYSNIMNFFKTEITLANGEIRKRPLIETNGETGEIVWDKGRDFATVRKVLSMPQVNIVKKTEVQTGGFSKESILPKRNSDKLIARKKDWDPKKYGGFDSPTVAYSVLVVAKVEKGKSKKLKSVKELLGITIMERSSFEKNPIDFLEAKGYKEVKKDLIIKLPKYSLFELENGRKRMLASAGELQKGNELALPSKYVNFLYLASHYEKLKGSPEDNEQKQLFVEQHKHYLDEIIEQISEFSKRVILADANLDKVLSAYNKHRDKPIREQAENIIHLFTLTNLGAPAAFKYFDTTIDRKRYTSTKEVLDATLIHQSITGLYETRIDLSQLGGDGGEAAAKEAAAKEAAAKEAAAKEAAAKEAAAKGGMDLLKPLTVERKGVKIKGYWNSQADITCVPKDLLQGEEPVRQQNVTTIHGTQEGDVYYVNLKIDGRRINTEVIGTTLDYAIITPGDVPWILKKPLELTIKLDLEEQQGTLLNNSILSKKGKEELKQLFEKYSALWQSWENQVGHRRIRPHKIATGTVKPTPQKQYHINPKAKPDIQIVINDLLKQGVLIQKESTMNTPVYPVPKPNGRWRMVLDYRAVNKVTPLIAVQNQHSYGILGSLFKGRYKTTIDLSNGFWAHPIVPEDYWITAFTWQGKQYCWTVLPQGFLNSPGLFTGDVVDLLQGIPNVEVYVDDVYISHDSEKEHLEYLDILFNRLKEAGYIISLKKSNIANSIVDFLGFQITNEGRGLTDTFKEKLENITAPTTLKQLQSILGLLNFARNFIPDFTELIAPLYALIPKSTKNYVPWQIEHSTTLETLITKLNGAEYLQGRKGDKTLIMKVNASYTTGYIRYYNEGEKKPISYVSIVFSKTELKFTELEKLLTTVHKGLLKALDLSMGQNIHVYSPIVSMQNIQKTPQTAKKALASRWLSWLSYLEDPRIRFFYDPQMPALKDLPAVDTGKDNKKHPSNFQHIFYTDGSAITSPTKEGHLNAGMGIVYFINKDGNLQKQQEWSISLGNHTAQFAEIAAFEFALKKCLPLGGNILVVTDSNYVAKAYNEELDVWASNGFVNNRKKPLKHISKWKSVADLKRLRPDVVVTHEPGHQKLDSSPHAYGNNLADQLATQASFKVHAGKRTADGSEFEKRTADGSEFESPKKKAKVE

SEQ ID NO: 6444 - protein, 2106 aa, synthetic construct
MPAAKRVKLDGGDKKYSIGLDIGTNSVGWAVITDEYKVPSKKFKVLGNTDRHSIKKNLIGALLFDSGETAEATRLKRTARRRYTRRKNRICYLQEIFSNEMAKVDDSFFHRLEESFLVEEDKKHERHPIFGNIVDEVAYHEKYPTIYHLRKKLVDSTDKADLRLIYLALAHMIKFRGHFLIEGDLNPDNSDVDKLFIQLVQTYNQLFEENPINASGVDAKAILSARLSKSRRLENLIAQLPGEKKNGLFGNLIALSLGLTPNFKSNFDLAEDAKLQLSKDTYDDDLDNLLAQIGDQYADLFLAAKNLSDAILLSDILRVNTEITKAPLSASMIKRYDEHHQDLTLLKALVRQQLPEKYKEIFFDQSKNGYAGYIDGGASQEEFYKFIKPILEKMDGTEELLVKLNREDLLRKQRTFDNGSIPHQIHLGELHAILRRQEDFYPFLKDNREKIEKILTFRIPYYVGPLARGNSRFAWMTRKSEETITPWNFEEVVDKGASAQSFIERMTNFDKNLPNEKVLPKHSLLYEYFTVYNELTKVKYVTEGMRKPAFLSGEQKKAIVDLLFKTNRKVTVKQLKEDYFKKIECFDSVEISGVEDRFNASLGTYHDLLKIIKDKDFLDNEENEDILEDIVLTLTLFEDREMIEERLKTYAHLFDDKVMKQLKRRRYTGWGRLSRKLINGIRDKQSGKTILDFLKSDGFANRNFMQLIHDDSLTFKEDIQKAQVSGQGDSLHEHIANLAGSPAIKKGILQTVKVVDELVKVMGRHKPENIVIEMARENQTTQKGQKNSRERMKRIEEGIKELGSQILKEHPVENTQLQNEKLYLYYLQNGRDMYVDQELDINRLSDYDVDHIVPQSFLKDDSIDNKVLTRSDKARGKSDNVPSEEVVKKMKNYWRQLLNAKLITQRKFDNLTKAERGGLSELDKAGFIKRQLVETRQITKHVAQILDSRMNTKYDENDKLIREVKVITLKSKLVSDFRKDFQFYKVREINNYHHAHDAYLNAVVGTALIKKYPKLESEFVYGDYKVYDVRKMIAKSEQEIGKATAKYFFYSNIMNFFKTEITLANGEIRKRPLIETNGETGEIVWDKGRDFATVRKVLSMPQVNIVKKTEVQTGGFSKESILPKRNSDKLIARKKDWDPKKYGGFDSPTVAYSVLVVAKVEKGKSKKLKSVKELLGITIMERSSFEKNPIDFLEAKGYKEVKKDLIIKLPKYSLFELENGRKRMLASAGELQKGNELALPSKYVNFLYLASHYEKLKGSPEDNEQKQLFVEQHKHYLDEIIEQISEFSKRVILADANLDKVLSAYNKHRDKPIREQAENIIHLFTLTNLGAPAAFKYFDTTIDRKRYTSTKEVLDATLIHQSITGLYETRIDLSQLGGDGGEAAAKEAAAKEAAAKEAAAKEAAAKEAAAKGGVPWILKKPLELTIKLDLEEQQGTLLNNSILSKKGKEELKQLFEKYSALWQSWENQVGHRRIRPHKIATGTVKPTPQKQYHINPKAKPDIQIVINDLLKQGVLIQKESTMNTPVYPVPKPNGRWRMVLDYRAVNKVTPLIAVQNQHSYGILGSLFKGRYKTTIDLSNGFWAHPIVPEDYWITAFTWQGKQYCWTVLPQGFLNSPGLFTGDVVDLLQGIPNVEVYVDDVYISHDSEKEHLEYLDILFNRLKEAGYIISLKKSNIANSIVDFLGFQITNEGRGLTDTFKEKLENITAPTTLKQLQSILGLLNFARNFIPDFTELIAPLYALIPKSTKNYVPWQIEHSTTLETLITKLNGAEYLQGRKGDKTLIMKVNASYTTGYIRYYNEGEKKPISYVSIVFSKTELKFTELEKLLTTVHKGLLKALDLSMGQNIHVYSPIVSMQNIQKTPQTAKKALASRWLSWLSYLEDPRIRFFYDPQMPALKDLPAVDTGKDNKKHPSNFQHIFYTDGSAITSPTKEGHLNAGMGIVYFINKDGNLQKQQEWSISLGNHTAQFAEIAAFEFALKKCLPLGGNILVVTDSNYVAKAYNEELDVWASNGFVNNRKKPLKHISKWKSVADLKRLRPDVVVTHEPGHQKLDSSPHAYGNNLADQLATQASFKVHAGKRTADGSEFEKRTADGSEFESPKKKAKVE

SEQ ID NO: 6445 - protein, 2192 aa, synthetic construct
MPAAKRVKLDGGDKKYSIGLDIGTNSVGWAVITDEYKVPSKKFKVLGNTDRHSIKKNLIGALLFDSGETAEATRLKRTARRRYTRRKNRICYLQEIFSNEMAKVDDSFFHRLEESFLVEEDKKHERHPIFGNIVDEVAYHEKYPTIYHLRKKLVDSTDKADLRLIYLALAHMIKFRGHFLIEGDLNPDNSDVDKLFIQLVQTYNQLFEENPINASGVDAKAILSARLSKSRRLENLIAQLPGEKKNGLFGNLIALSLGLTPNFKSNFDLAEDAKLQLSKDTYDDDLDNLLAQIGDQYADLFLAAKNLSDAILLSDILRVNTEITKAPLSASMIKRYDEHHQDLTLLKALVRQQLPEKYKEIFFDQSKNGYAGYIDGGASQEEFYKFIKPILEKMDGTEELLVKLNREDLLRKQRTFDNGSIPHQIHLGELHAILRRQEDFYPFLKDNREKIEKILTFRIPYYVGPLARGNSRFAWMTRKSEETITPWNFEEVVDKGASAQSFIERMTNFDKNLPNEKVLPKHSLLYEYFTVYNELTKVKYVTEGMRKPAFLSGEQKKAIVDLLFKTNRKVTVKQLKEDYFKKIECFDSVEISGVEDRFNASLGTYHDLLKIIKDKDFLDNEENEDILEDIVLTLTLFEDREMIEERLKTYAHLFDDKVMKQLKRRRYTGWGRLSRKLINGIRDKQSGKTILDFLKSDGFANRNFMQLIHDDSLTFKEDIQKAQVSGQGDSLHEHIANLAGSPAIKKGILQTVKVVDELVKVMGRHKPENIVIEMARENQTTQKGQKNSRERMKRIEEGIKELGSQILKEHPVENTQLQNEKLYLYYLQNGRDMYVDQELDINRLSDYDVDHIVPQSFLKDDSIDNKVLTRSDKARGKSDNVPSEEVVKKMKNYWRQLLNAKLITQRKFDNLTKAERGGLSELDKAGFIKRQLVETRQITKHVAQILDSRMNTKYDENDKLIREVKVITLKSKLVSDFRKDFQFYKVREINNYHHAHDAYLNAVVGTALIKKYPKLESEFVYGDYKVYDVRKMIAKSEQEIGKATAKYFFYSNIMNFFKTEITLANGEIRKRPLIETNGETGEIVWDKGRDFATVRKVLSMPQVNIVKKTEVQTGGFSKESILPKRNSDKLIARKKDWDPKKYGGFDSPTVAYSVLVVAKVEKGKSKKLKSVKELLGITIMERSSFEKNPIDFLEAKGYKEVKKDLIIKLPKYSLFELENGRKRMLASAGELQKGNELALPSKYVNFLYLASHYEKLKGSPEDNEQKQLFVEQHKHYLDEIIEQISEFSKRVILADANLDKVLSAYNKHRDKPIREQAENIIHLFTLTNLGAPAAFKYFDTTIDRKRYTSTKEVLDATLIHQSITGLYETRIDLSQLGGDGGEAAAKEAAAKEAAAKEAAAKEAAAKEAAAKGGMDLLKPLTVERKGVKIKGYWNSQADITCVPKDLLQGEEPVRQQNVTTIHGTQEGDVYYVNLKIDGRRINTEVIGTTLDYAIITPGDVPWILKKPLELTIKLDLEEQQGTLLNNSILSKKGKEELKQLFEKYSALWQSWENQVGHRRIRPHKIATGTVKPTPQKQYHINPKAKPDIQIVINDLLKQGVLIQKESTMNTPVYPVPKPNGRWRMVLDYRAVNKVTPLIAVQNQHSYGILGSLFKGRYKTTIDLSNGFWAHPIVPEDYWITAFTWQGKQYCWTVLPQGFLNSPGLFNGDVVDLLQGIPNVEVYVDDVYISHDSEKEHLEYLDILFNRLKEAGYIISLKKSNIANSIVDFLGFQITNEGRGLTDTFKEKLENITAPTTLKQLQSILGLLNFARNFIPDFTELIAPLYALIPKSPKNYVPWQIEHSTTLETLITKLNGAEYLQGRKGDKTLIMKVNASYTTGYIRYYNEGEKKPISYVSIVFSKTELKFTELEKLLTTVHKGLLKALDLSMGQNIHVYSPIVSMQNIQKTPQTAKKALASRWLSWLSYLEDPRIRFFYDPQMPALKDLPAVDTGKDNKKHPSNFQHIFYTDGSAITSPTKEGHLNAGMGIVYFINKDGNLQKQQEWSISLGNHTAQFAEIAAFEFALKKCLPLGGNILVVTDSNYVAKAYNEELDVWASNGFVNNRKKPLKHISKWKSVADLKRLRPDVVVTHEPGHQKLDSSPHAYGNNLADQLATQASFKVHAGKRTADGSEFEKRTADGSEFESPKKKAKVE

SEQ ID NO: 6446 - protein, 2192 aa, synthetic construct
MPAAKRVKLDGGDKKYSIGLDIGTNSVGWAVITDEYKVPSKKFKVLGNTDRHSIKKNLIGALLFDSGETAEATRLKRTARRRYTRRKNRICYLQEIFSNEMAKVDDSFFHRLEESFLVEEDKKHERHPIFGNIVDEVAYHEKYPTIYHLRKKLVDSTDKADLRLIYLALAHMIKFRGHFLIEGDLNPDNSDVDKLFIQLVQTYNQLFEENPINASGVDAKAILSARLSKSRRLENLIAQLPGEKKNGLFGNLIALSLGLTPNFKSNFDLAEDAKLQLSKDTYDDDLDNLLAQIGDQYADLFLAAKNLSDAILLSDILRVNTEITKAPLSASMIKRYDEHHQDLTLLKALVRQQLPEKYKEIFFDQSKNGYAGYIDGGASQEEFYKFIKPILEKMDGTEELLVKLNREDLLRKQRTFDNGSIPHQIHLGELHAILRRQEDFYPFLKDNREKIEKILTFRIPYYVGPLARGNSRFAWMTRKSEETITPWNFEEVVDKGASAQSFIERMTNFDKNLPNEKVLPKHSLLYEYFTVYNELTKVKYVTEGMRKPAFLSGEQKKAIVDLLFKTNRKVTVKQLKEDYFKKIECFDSVEISGVEDRFNASLGTYHDLLKIIKDKDFLDNEENEDILEDIVLTLTLFEDREMIEERLKTYAHLFDDKVMKQLKRRRYTGWGRLSRKLINGIRDKQSGKTILDFLKSDGFANRNFMQLIHDDSLTFKEDIQKAQVSGQGDSLHEHIANLAGSPAIKKGILQTVKVVDELVKVMGRHKPENIVIEMARENQTTQKGQKNSRERMKRIEEGIKELGSQILKEHPVENTQLQNEKLYLYYLQNGRDMYVDQELDINRLSDYDVDHIVPQSFLKDDSIDNKVLTRSDKARGKSDNVPSEEVVKKMKNYWRQLLNAKLITQRKFDNLTKAERGGLSELDKAGFIKRQLVETRQITKHVAQILDSRMNTKYDENDKLIREVKVITLKSKLVSDFRKDFQFYKVREINNYHHAHDAYLNAVVGTALIKKYPKLESEFVYGDYKVYDVRKMIAKSEQEIGKATAKYFFYSNIMNFFKTEITLANGEIRKRPLIETNGETGEIVWDKGRDFATVRKVLSMPQVNIVKKTEVQTGGFSKESILPKRNSDKLIARKKDWDPKKYGGFDSPTVAYSVLVVAKVEKGKSKKLKSVKELLGITIMERSSFEKNPIDFLEAKGYKEVKKDLIIKLPKYSLFELENGRKRMLASAGELQKGNELALPSKYVNFLYLASHYEKLKGSPEDNEQKQLFVEQHKHYLDEIIEQISEFSKRVILADANLDKVLSAYNKHRDKPIREQAENIIHLFTLTNLGAPAAFKYFDTTIDRKRYTSTKEVLDATLIHQSITGLYETRIDLSQLGGDGGEAAAKEAAAKEAAAKEAAAKEAAAKEAAAKGGMDLLKPLTVERKGVKIKGYWNSQADITCVPKDLLQGEEPVRQQNVTTIHGTQEGDVYYVNLKIDGRRINTEVIGTTLDYAIITPGDVPWILKKPLELTIKLDLEEQQGTLLNNSILSKKGKEELKQLFEKYSALWQSWENQVGHRRIRPHKIATGTVKPTPQKQYHINPKAKPDIQIVINDLLKQGVLIQKESTMNTPVYPVPKPNGRWRMVLDYRAVNKVTPLIAVQNQHSYGILGSLFKGRYKTTIDLSNGFWAHPIVPEDYWITAFTWQGKQYCWTVLPQGFLNSPGLFNGDVVDLLQGIPNVEVYVDDVYISHDSEKEHLEYLDILFNRLKEAGYIISLKKSNIANSIVDFLGFQITNEGRGLTDTFKEKLENITAPTTLKQLQSILGKLNFARNFIPDFTELIAPLYALIPKSPKNYVPWQIEHSTTLETLITKLNGAEYLQGRKGDKTLIMKVNASYTTGYIRYYNEGEKKPISYVSIVFSKTELKFTELEKLLTTVHKGLLKALDLSMGQNIHVYSPIVSMQNIQKTPQTAKKALASRWLSWLSYLEDPRIRFFYDPQMPALKDLPAVDTGKDNKKHPSNFQHIFYTDGSAITSPTKEGHLNAGMGIVYFINKDGNLQKQQEWSISLGNHTAQFAEIAAFEFALKKCLPLGGNILVVTDSNYVAKAYNEELDVWASNGFVNNRKKPLKHISKWKSVADLKRLRPDVVVTHEPGHQKLDSSPHAYGNNLADQLATQASFKVHAGKRTADGSEFEKRTADGSEFESPKKKAKVE

SEQ ID NO: 6447 - protein, 2195 aa, synthetic construct
MPAAKRVKLDGGDKKYSIGLDIGTNSVGWAVITDEYKVPSKKFKVLGNTDRHSIKKNLIGALLFDSGETAEATRLKRTARRRYTRRKNRICYLQEIFSNEMAKVDDSFFHRLEESFLVEEDKKHERHPIFGNIVDEVAYHEKYPTIYHLRKKLVDSTDKADLRLIYLALAHMIKFRGHFLIEGDLNPDNSDVDKLFIQLVQTYNQLFEENPINASGVDAKAILSARLSKSRRLENLIAQLPGEKKNGLFGNLIALSLGLTPNFKSNFDLAEDAKLQLSKDTYDDDLDNLLAQIGDQYADLFLAAKNLSDAILLSDILRVNTEITKAPLSASMIKRYDEHHQDLTLLKALVRQQLPEKYKEIFFDQSKNGYAGYIDGGASQEEFYKFIKPILEKMDGTEELLVKLNREDLLRKQRTFDNGSIPHQIHLGELHAILRRQEDFYPFLKDNREKIEKILTFRIPYYVGPLARGNSRFAWMTRKSEETITPWNFEEVVDKGASAQSFIERMTNFDKNLPNEKVLPKHSLLYEYFTVYNELTKVKYVTEGMRKPAFLSGEQKKAIVDLLFKTNRKVTVKQLKEDYFKKIECFDSVEISGVEDRFNASLGTYHDLLKIIKDKDFLDNEENEDILEDIVLTLTLFEDREMIEERLKTYAHLFDDKVMKQLKRRRYTGWGRLSRKLINGIRDKQSGKTILDFLKSDGFANRNFMQLIHDDSLTFKEDIQKAQVSGQGDSLHEHIANLAGSPAIKKGILQTVKVVDELVKVMGRHKPENIVIEMARENQTTQKGQKNSRERMKRIEEGIKELGSQILKEHPVENTQLQNEKLYLYYLQNGRDMYVDQELDINRLSDYDVDHIVPQSFLKDDSIDNKVLTRSDKARGKSDNVPSEEVVKKMKNYWRQLLNAKLITQRKFDNLTKAERGGLSELDKAGFIKRQLVETRQITKHVAQILDSRMNTKYDENDKLIREVKVITLKSKLVSDFRKDFQFYKVREINNYHHAHDAYLNAVVGTALIKKYPKLESEFVYGDYKVYDVRKMIAKSEQEIGKATAKYFFYSNIMNFFKTEITLANGEIRKRPLIETNGETGEIVWDKGRDFATVRKVLSMPQVNIVKKTEVQTGGFSKESILPKRNSDKLIARKKDWDPKKYGGFDSPTVAYSVLVVAKVEKGKSKKLKSVKELLGITIMERSSFEKNPIDFLEAKGYKEVKKDLIIKLPKYSLFELENGRKRMLASAGELQKGNELALPSKYVNFLYLASHYEKLKGSPEDNEQKQLFVEQHKHYLDEIIEQISEFSKRVILADANLDKVLSAYNKHRDKPIREQAENIIHLFTLTNLGAPAAFKYFDTTIDRKRYTSTKEVLDATLIHQSITGLYETRIDLSQLGGDGGEAAAKEAAAKEAAAKEAAAKEAAAKEAAAKGGMNPLQLLQPLPAEIKGTKLLAHWNSGATITCIPESFLEDEQPIKKTLIKTIHGEKQQNVYYVTFKVKGRKVEAEVIASPYEYILLSPTDVPWLTQQPLQLTILVPLQEYQEKILSKTALPEDQKQQLKTLFVKYDNLWQHWENQVGHRKIRPHNIATGDYPPRPQKQYPINPKAKPSIQIVIDDLLKQGVLTPQNSTMNTPVYPVPKPDGRWRMVLDYREVNKTIPLTAAQNQHSAGILATIVRQKYKTTLDLANGFWAHPITPESYWLTAFTWQGKQYCWTRLPQGFLNSPALFTADVVDLLKEIPNVQVYVDDIYLSHDDPKEHVQQLEKVFQILLQAGYVVSLKKSEIGQKTVEFLGFNITKEGRGLTDTFKTKLLNITPPKDLKQLQSILGLLNFARNFIPNFAELVQPLYNLIASAKGKYIEWSEENTKQLNMVIEALNTASNLEERLPEQRLVIKVNTSPSAGYVRYYNETGKKPIMYLNYVFSKAELKFSMLEKLLTTMHKALIKAMDLAMGQEILVYSPIVSMTKIQKTPLPERKALPIRWITWMTYLEDPRIQFHYDKTLPELKHIPDVYTSSQSPVKHPSQYEGVFYTDGSAIKSPDPTKSNNAGMGIVHATYKPEYQVLNQWSIPLGNHTAQMAEIAAVEFACKKALKIPGPVLVITDSFYVAESANKELPYWKSNGFVNNKKKPLKHISKWKSIAECLSMKPDITIQHEKGISLQIPVFILKGNALADKLATQGSYVVNAGKRTADGSEFEKRTADGSEFESPKKKAKVE

SEQ ID NO: 6448 - protein, 2106 aa, synthetic construct
MPAAKRVKLDGGDKKYSIGLDIGTNSVGWAVITDEYKVPSKKFKVLGNTDRHSIKKNLIGALLFDSGETAEATRLKRTARRRYTRRKNRICYLQEIFSNEMAKVDDSFFHRLEESFLVEEDKKHERHPIFGNIVDEVAYHEKYPTIYHLRKKLVDSTDKADLRLIYLALAHMIKFRGHFLIEGDLNPDNSDVDKLFIQLVQTYNQLFEENPINASGVDAKAILSARLSKSRRLENLIAQLPGEKKNGLFGNLIALSLGLTPNFKSNFDLAEDAKLQLSKDTYDDDLDNLLAQIGDQYADLFLAAKNLSDAILLSDILRVNTEITKAPLSASMIKRYDEHHQDLTLLKALVRQQLPEKYKEIFFDQSKNGYAGYIDGGASQEEFYKFIKPILEKMDGTEELLVKLNREDLLRKQRTFDNGSIPHQIHLGELHAILRRQEDFYPFLKDNREKIEKILTFRIPYYVGPLARGNSRFAWMTRKSEETITPWNFEEVVDKGASAQSFIERMTNFDKNLPNEKVLPKHSLLYEYFTVYNELTKVKYVTEGMRKPAFLSGEQKKAIVDLLFKTNRKVTVKQLKEDYFKKIECFDSVEISGVEDRFNASLGTYHDLLKIIKDKDFLDNEENEDILEDIVLTLTLFEDREMIEERLKTYAHLFDDKVMKQLKRRRYTGWGRLSRKLINGIRDKQSGKTILDFLKSDGFANRNFMQLIHDDSLTFKEDIQKAQVSGQGDSLHEHIANLAGSPAIKKGILQTVKVVDELVKVMGRHKPENIVIEMARENQTTQKGQKNSRERMKRIEEGIKELGSQILKEHPVENTQLQNEKLYLYYLQNGRDMYVDQELDINRLSDYDVDHIVPQSFLKDDSIDNKVLTRSDKARGKSDNVPSEEVVKKMKNYWRQLLNAKLITQRKFDNLTKAERGGLSELDKAGFIKRQLVETRQITKHVAQILDSRMNTKYDENDKLIREVKVITLKSKLVSDFRKDFQFYKVREINNYHHAHDAYLNAVVGTALIKKYPKLESEFVYGDYKVYDVRKMIAKSEQEIGKATAKYFFYSNIMNFFKTEITLANGEIRKRPLIETNGETGEIVWDKGRDFATVRKVLSMPQVNIVKKTEVQTGGFSKESILPKRNSDKLIARKKDWDPKKYGGFDSPTVAYSVLVVAKVEKGKSKKLKSVKELLGITIMERSSFEKNPIDFLEAKGYKEVKKDLIIKLPKYSLFELENGRKRMLASAGELQKGNELALPSKYVNFLYLASHYEKLKGSPEDNEQKQLFVEQHKHYLDEIIEQISEFSKRVILADANLDKVLSAYNKHRDKPIREQAENIIHLFTLTNLGAPAAFKYFDTTIDRKRYTSTKEVLDATLIHQSITGLYETRIDLSQLGGDGGEAAAKEAAAKEAAAKEAAAKEAAAKEAAAKGGVPWLTQQPLQLTILVPLQEYQEKILSKTALPEDQKQQLKTLFVKYDNLWQHWENQVGHRKIRPHNIATGDYPPRPQKQYPINPKAKPSIQIVIDDLLKQGVLTPQNSTMNTPVYPVPKPDGRWRMVLDYREVNKTIPLTAAQNQHSAGILATIVRQKYKTTLDLANGFWAHPITPESYWLTAFTWQGKQYCWTRLPQGFLNSPALFNADVVDLLKEIPNVQVYVDDIYLSHDDPKEHVQQLEKVFQILLQAGYVVSLKKSEIGQKTVEFLGFNITKEGRGLTDTFKTKLLNITPPKDLKQLQSILGKLNFARNFIPNFAELVQPLYNLIAPAKGKYIEWSEENTKQLNMVIEALNTASNLEERLPEQRLVIKVNTSPSAGYVRYYNETGKKPIMYLNYVFSKAELKFSMLEKLLTTMHKALIKAMDLAMGQEILVYSPIVSMTKIQKTPLPERKALPIRWITWMTYLEDPRIQFHYDKTLPELKHIPDVYTSSQSPVKHPSQYEGVFYTDGSAIKSPDPTKSNNAGMGIVHATYKPEYQVLNQWSIPLGNHTAQMAEIAAVEFACKKALKIPGPVLVITDSFYVAESANKELPYWKSNGFVNNKKKPLKHISKWKSIAECLSMKPDITIQHEKGISLQIPVFILKGNALADKLATQGSYVVNAGKRTADGSEFEKRTADGSEFESPKKKAKVE

SEQ ID NO: 6449 - protein, 2195 aa, synthetic construct
MPAAKRVKLDGGDKKYSIGLDIGTNSVGWAVITDEYKVPSKKFKVLGNTDRHSIKKNLIGALLFDSGETAEATRLKRTARRRYTRRKNRICYLQEIFSNEMAKVDDSFFHRLEESFLVEEDKKHERHPIFGNIVDEVAYHEKYPTIYHLRKKLVDSTDKADLRLIYLALAHMIKFRGHFLIEGDLNPDNSDVDKLFIQLVQTYNQLFEENPINASGVDAKAILSARLSKSRRLENLIAQLPGEKKNGLFGNLIALSLGLTPNFKSNFDLAEDAKLQLSKDTYDDDLDNLLAQIGDQYADLFLAAKNLSDAILLSDILRVNTEITKAPLSASMIKRYDEHHQDLTLLKALVRQQLPEKYKEIFFDQSKNGYAGYIDGGASQEEFYKFIKPILEKMDGTEELLVKLNREDLLRKQRTFDNGSIPHQIHLGELHAILRRQEDFYPFLKDNREKIEKILTFRIPYYVGPLARGNSRFAWMTRKSEETITPWNFEEVVDKGASAQSFIERMTNFDKNLPNEKVLPKHSLLYEYFTVYNELTKVKYVTEGMRKPAFLSGEQKKAIVDLLFKTNRKVTVKQLKEDYFKKIECFDSVEISGVEDRFNASLGTYHDLLKIIKDKDFLDNEENEDILEDIVLTLTLFEDREMIEERLKTYAHLFDDKVMKQLKRRRYTGWGRLSRKLINGIRDKQSGKTILDFLKSDGFANRNFMQLIHDDSLTFKEDIQKAQVSGQGDSLHEHIANLAGSPAIKKGILQTVKVVDELVKVMGRHKPENIVIEMARENQTTQKGQKNSRERMKRIEEGIKELGSQILKEHPVENTQLQNEKLYLYYLQNGRDMYVDQELDINRLSDYDVDHIVPQSFLKDDSIDNKVLTRSDKARGKSDNVPSEEVVKKMKNYWRQLLNAKLITQRKFDNLTKAERGGLSELDKAGFIKRQLVETRQITKHVAQILDSRMNTKYDENDKLIREVKVITLKSKLVSDFRKDFQFYKVREINNYHHAHDAYLNAVVGTALIKKYPKLESEFVYGDYKVYDVRKMIAKSEQEIGKATAKYFFYSNIMNFFKTEITLANGEIRKRPLIETNGETGEIVWDKGRDFATVRKVLSMPQVNIVKKTEVQTGGFSKESILPKRNSDKLIARKKDWDPKKYGGFDSPTVAYSVLVVAKVEKGKSKKLKSVKELLGITIMERSSFEKNPIDFLEAKGYKEVKKDLIIKLPKYSLFELENGRKRMLASAGELQKGNELALPSKYVNFLYLASHYEKLKGSPEDNEQKQLFVEQHKHYLDEIIEQISEFSKRVILADANLDKVLSAYNKHRDKPIREQAENIIHLFTLTNLGAPAAFKYFDTTIDRKRYTSTKEVLDATLIHQSITGLYETRIDLSQLGGDGGEAAAKEAAAKEAAAKEAAAKEAAAKEAAAKGGMNPLQLLQPLPAEIKGTKLLAHWNSGATITCIPESFLEDEQPIKKTLIKTIHGEKQQNVYYVTFKVKGRKVEAEVIASPYEYILLSPTDVPWLTQQPLQLTILVPLQEYQEKILSKTALPEDQKQQLKTLFVKYDNLWQHWENQVGHRKIRPHNIATGDYPPRPQKQYPINPKAKPSIQIVIDDLLKQGVLTPQNSTMNTPVYPVPKPDGRWRMVLDYREVNKTIPLTAAQNQHSAGILATIVRQKYKTTLDLANGFWAHPITPESYWLTAFTWQGKQYCWTRLPQGFLNSPALFNADVVDLLKEIPNVQVYVDDIYLSHDDPKEHVQQLEKVFQILLQAGYVVSLKKSEIGQKTVEFLGFNITKEGRGLTDTFKTKLLNITPPKDLKQLQSILGLLNFARNFIPNFAELVQPLYNLIAPAKGKYIEWSEENTKQLNMVIEALNTASNLEERLPEQRLVIKVNTSPSAGYVRYYNETGKKPIMYLNYVFSKAELKFSMLEKLLTTMHKALIKAMDLAMGQEILVYSPIVSMTKIQKTPLPERKALPIRWITWMTYLEDPRIQFHYDKTLPELKHIPDVYTSSQSPVKHPSQYEGVFYTDGSAIKSPDPTKSNNAGMGIVHATYKPEYQVLNQWSIPLGNHTAQMAEIAAVEFACKKALKIPGPVLVITDSFYVAESANKELPYWKSNGFVNNKKKPLKHISKWKSIAECLSMKPDITIQHEKGISLQIPVFILKGNALADKLATQGSYVVNAGKRTADGSEFEKRTADGSEFESPKKKAKVE

SEQ ID NO: 6450 - protein, 2113 aa, synthetic construct
MPAAKRVKLDGGDKKYSIGLDIGTNSVGWAVITDEYKVPSKKFKVLGNTDRHSIKKNLIGALLFDSGETAEATRLKRTARRRYTRRKNRICYLQEIFSNEMAKVDDSFFHRLEESFLVEEDKKHERHPIFGNIVDEVAYHEKYPTIYHLRKKLVDSTDKADLRLIYLALAHMIKFRGHFLIEGDLNPDNSDVDKLFIQLVQTYNQLFEENPINASGVDAKAILSARLSKSRRLENLIAQLPGEKKNGLFGNLIALSLGLTPNFKSNFDLAEDAKLQLSKDTYDDDLDNLLAQIGDQYADLFLAAKNLSDAILLSDILRVNTEITKAPLSASMIKRYDEHHQDLTLLKALVRQQLPEKYKEIFFDQSKNGYAGYIDGGASQEEFYKFIKPILEKMDGTEELLVKLNREDLLRKQRTFDNGSIPHQIHLGELHAILRRQEDFYPFLKDNREKIEKILTFRIPYYVGPLARGNSRFAWMTRKSEETITPWNFEEVVDKGASAQSFIERMTNFDKNLPNEKVLPKHSLLYEYFTVYNELTKVKYVTEGMRKPAFLSGEQKKAIVDLLFKTNRKVTVKQLKEDYFKKIECFDSVEISGVEDRFNASLGTYHDLLKIIKDKDFLDNEENEDILEDIVLTLTLFEDREMIEERLKTYAHLFDDKVMKQLKRRRYTGWGRLSRKLINGIRDKQSGKTILDFLKSDGFANRNFMQLIHDDSLTFKEDIQKAQVSGQGDSLHEHIANLAGSPAIKKGILQTVKVVDELVKVMGRHKPENIVIEMARENQTTQKGQKNSRERMKRIEEGIKELGSQILKEHPVENTQLQNEKLYLYYLQNGRDMYVDQELDINRLSDYDVDHIVPQSFLKDDSIDNKVLTRSDKARGKSDNVPSEEVVKKMKNYWRQLLNAKLITQRKFDNLTKAERGGLSELDKAGFIKRQLVETRQITKHVAQILDSRMNTKYDENDKLIREVKVITLKSKLVSDFRKDFQFYKVREINNYHHAHDAYLNAVVGTALIKKYPKLESEFVYGDYKVYDVRKMIAKSEQEIGKATAKYFFYSNIMNFFKTEITLANGEIRKRPLIETNGETGEIVWDKGRDFATVRKVLSMPQVNIVKKTEVQTGGFSKESILPKRNSDKLIARKKDWDPKKYGGFDSPTVAYSVLVVAKVEKGKSKKLKSVKELLGITIMERSSFEKNPIDFLEAKGYKEVKKDLIIKLPKYSLFELENGRKRMLASAGELQKGNELALPSKYVNFLYLASHYEKLKGSPEDNEQKQLFVEQHKHYLDEIIEQISEFSKRVILADANLDKVLSAYNKHRDKPIREQAENIIHLFTLTNLGAPAAFKYFDTTIDRKRYTSTKEVLDATLIHQSITGLYETRIDLSQLGGDGGEAAAKEAAAKEAAAKEAAAKEAAAKEAAAKGGVLNLEEEYRLHEKPVPSSIDPSWLQLFPTVWAERAGMGLANQVPPVVVELRSGASPVAVRQYPMSKEAREGIRPHIQKFLDLGVLVPCRSPWNTPLLPVKKPGTNDYRPVQDLREINKRVQDIHPTVPNPYNLLSSLPPSYTWYSVLDLKDAFFCLRLHPNSQPLFAFEWKDPEKGNTGQLTWTRLPQGFKNSPTLFDEALHRDLAPFRALNPQVVLLQYVDDLLVAAPTYEDCKKGTQKLLQELSKLGYRVSAKKAQLCQREVTYLGYLLKEGKRWLTPARKATVMKIPVPTTPRQVREFLGTAGFCRLWIPGFASLAAPLYPLTKESIPFIWTEEHQQAFDHIKKALLSAPALALPDLTKPFTLYIDERAGVARGVLTQTLGPWRRPVAYLSKKLDPVASGWPTCLKAVAAVALLLKDADKLTLGQNVTVIASHSLESIVRQPPDRWMTNARMTHYQSLLLNERVSFAPPAVLNPATLLPVESEATPVHRCSEILAEETGTRRDLEDQPLPGVPTWYTDGSSFITEGKRRAGAPIVDGKRTVWASSLPEGTSAQKAELVALTQALRLAEGKNINIYTDSRYAFATAHIHGAIYKQRGLLTSAGKDIKNKEEILALLEAIHLPRRVAIIHCPGHQRGSNPVATGNRRADEAAKQAALSTRVLAGTTKPAGKRTADGSEFEKRTADGSEFESPKKKAKVE

SEQ ID NO: 6451 - protein, 2113 aa, synthetic construct
MPAAKRVKLDGGDKKYSIGLDIGTNSVGWAVITDEYKVPSKKFKVLGNTDRHSIKKNLIGALLFDSGETAEATRLKRTARRRYTRRKNRICYLQEIFSNEMAKVDDSFFHRLEESFLVEEDKKHERHPIFGNIVDEVAYHEKYPTIYHLRKKLVDSTDKADLRLIYLALAHMIKFRGHFLIEGDLNPDNSDVDKLFIQLVQTYNQLFEENPINASGVDAKAILSARLSKSRRLENLIAQLPGEKKNGLFGNLIALSLGLTPNFKSNFDLAEDAKLQLSKDTYDDDLDNLLAQIGDQYADLFLAAKNLSDAILLSDILRVNTEITKAPLSASMIKRYDEHHQDLTLLKALVRQQLPEKYKEIFFDQSKNGYAGYIDGGASQEEFYKFIKPILEKMDGTEELLVKLNREDLLRKQRTFDNGSIPHQIHLGELHAILRRQEDFYPFLKDNREKIEKILTFRIPYYVGPLARGNSRFAWMTRKSEETITPWNFEEVVDKGASAQSFIERMTNFDKNLPNEKVLPKHSLLYEYFTVYNELTKVKYVTEGMRKPAFLSGEQKKAIVDLLFKTNRKVTVKQLKEDYFKKIECFDSVEISGVEDRFNASLGTYHDLLKIIKDKDFLDNEENEDILEDIVLTLTLFEDREMIEERLKTYAHLFDDKVMKQLKRRRYTGWGRLSRKLINGIRDKQSGKTILDFLKSDGFANRNFMQLIHDDSLTFKEDIQKAQVSGQGDSLHEHIANLAGSPAIKKGILQTVKVVDELVKVMGRHKPENIVIEMARENQTTQKGQKNSRERMKRIEEGIKELGSQILKEHPVENTQLQNEKLYLYYLQNGRDMYVDQELDINRLSDYDVDHIVPQSFLKDDSIDNKVLTRSDKARGKSDNVPSEEVVKKMKNYWRQLLNAKLITQRKFDNLTKAERGGLSELDKAGFIKRQLVETRQITKHVAQILDSRMNTKYDENDKLIREVKVITLKSKLVSDFRKDFQFYKVREINNYHHAHDAYLNAVVGTALIKKYPKLESEFVYGDYKVYDVRKMIAKSEQEIGKATAKYFFYSNIMNFFKTEITLANGEIRKRPLIETNGETGEIVWDKGRDFATVRKVLSMPQVNIVKKTEVQTGGFSKESILPKRNSDKLIARKKDWDPKKYGGFDSPTVAYSVLVVAKVEKGKSKKLKSVKELLGITIMERSSFEKNPIDFLEAKGYKEVKKDLIIKLPKYSLFELENGRKRMLASAGELQKGNELALPSKYVNFLYLASHYEKLKGSPEDNEQKQLFVEQHKHYLDEIIEQISEFSKRVILADANLDKVLSAYNKHRDKPIREQAENIIHLFTLTNLGAPAAFKYFDTTIDRKRYTSTKEVLDATLIHQSITGLYETRIDLSQLGGDGGEAAAKEAAAKEAAAKEAAAKEAAAKEAAAKGGVLNLEEEYRLHEKPVPSSIDPSWLQLFPTVWAERAGMGLANQVPPVVVELRSGASPVAVRQYPMSKEAREGIRPHIQKFLDLGVLVPCRSPWNTPLLPVKKPGTNDYRPVQDLREINKRVQDIHPTVPNPYNLLSSLPPSYTWYSVLDLKDAFFCLRLHPNSQPLFAFEWKDPEKGNTGQLTWTRLPQGFKNSPTLFNEALHRDLAPFRALNPQVVLLQYVDDLLVAAPTYEDCKKGTQKLLQELSKLGYRVSAKKAQLCQREVTYLGYLLKEGKRWLTPARKATVMKIPVPTTPRQVREFLGTAGFCRLWIPGFASLAAPLYPLTKPSIPFIWTEEHQQAFDHIKKALLSAPALALPDLTKPFTLYIDERAGVARGVLTQTLGPWRRPVAYLSKKLDPVASGWPTCLKAVAAVALLLKDADKLTLGQNVTVIASHSLESIVRQPPDRWMTNARMTHYQSLLLNERVSFAPPAVLNPATLLPVESEATPVHRCSEILAEETGTRRDLEDQPLPGVPTWYTDGSSFITEGKRRAGAPIVDGKRTVWASSLPEGTSAQKAELVALTQALRLAEGKNINIYTDSRYAFATAHIHGAIYKQRGWLTSAGKDIKNKEEILALLEAIHLPRRVAIIHCPGHQRGSNPVATGNRRADEAAKQAALSTRVLAGTTKPAGKRTADGSEFEKRTADGSEFESPKKKAKVE

SEQ ID NO: 6452 - protein, 2237 aa, synthetic construct
MPAAKRVKLDGGDKKYSIGLDIGTNSVGWAVITDEYKVPSKKFKVLGNTDRHSIKKNLIGALLFDSGETAEATRLKRTARRRYTRRKNRICYLQEIFSNEMAKVDDSFFHRLEESFLVEEDKKHERHPIFGNIVDEVAYHEKYPTIYHLRKKLVDSTDKADLRLIYLALAHMIKFRGHFLIEGDLNPDNSDVDKLFIQLVQTYNQLFEENPINASGVDAKAILSARLSKSRRLENLIAQLPGEKKNGLFGNLIALSLGLTPNFKSNFDLAEDAKLQLSKDTYDDDLDNLLAQIGDQYADLFLAAKNLSDAILLSDILRVNTEITKAPLSASMIKRYDEHHQDLTLLKALVRQQLPEKYKEIFFDQSKNGYAGYIDGGASQEEFYKFIKPILEKMDGTEELLVKLNREDLLRKQRTFDNGSIPHQIHLGELHAILRRQEDFYPFLKDNREKIEKILTFRIPYYVGPLARGNSRFAWMTRKSEETITPWNFEEVVDKGASAQSFIERMTNFDKNLPNEKVLPKHSLLYEYFTVYNELTKVKYVTEGMRKPAFLSGEQKKAIVDLLFKTNRKVTVKQLKEDYFKKIECFDSVEISGVEDRFNASLGTYHDLLKIIKDKDFLDNEENEDILEDIVLTLTLFEDREMIEERLKTYAHLFDDKVMKQLKRRRYTGWGRLSRKLINGIRDKQSGKTILDFLKSDGFANRNFMQLIHDDSLTFKEDIQKAQVSGQGDSLHEHIANLAGSPAIKKGILQTVKVVDELVKVMGRHKPENIVIEMARENQTTQKGQKNSRERMKRIEEGIKELGSQILKEHPVENTQLQNEKLYLYYLQNGRDMYVDQELDINRLSDYDVDHIVPQSFLKDDSIDNKVLTRSDKARGKSDNVPSEEVVKKMKNYWRQLLNAKLITQRKFDNLTKAERGGLSELDKAGFIKRQLVETRQITKHVAQILDSRMNTKYDENDKLIREVKVITLKSKLVSDFRKDFQFYKVREINNYHHAHDAYLNAVVGTALIKKYPKLESEFVYGDYKVYDVRKMIAKSEQEIGKATAKYFFYSNIMNFFKTEITLANGEIRKRPLIETNGETGEIVWDKGRDFATVRKVLSMPQVNIVKKTEVQTGGFSKESILPKRNSDKLIARKKDWDPKKYGGFDSPTVAYSVLVVAKVEKGKSKKLKSVKELLGITIMERSSFEKNPIDFLEAKGYKEVKKDLIIKLPKYSLFELENGRKRMLASAGELQKGNELALPSKYVNFLYLASHYEKLKGSPEDNEQKQLFVEQHKHYLDEIIEQISEFSKRVILADANLDKVLSAYNKHRDKPIREQAENIIHLFTLTNLGAPAAFKYFDTTIDRKRYTSTKEVLDATLIHQSITGLYETRIDLSQLGGDGGEAAAKEAAAKEAAAKEAAAKEAAAKEAAAKGGTLGDQGSRGSDPLPEPRVTLTVEGIPTEFLVNTGAEHSVLTKPMGKMGSKRTVVAGATGSKVYPWTTKRLLKIGQKQVTHSFLVIPECPAPLLGRDLLTKLKAQIQFSTEGPQVTWEDRPAMCLVLNLEEEYRLHEKPVPPSIDPSWLQLFPMVWAEKAGMGLANQVPPVVVELKSDASPVAVRQYPMSKEAREGIRPHIQRFLDLGILVPCQSPWNTPLLPVKKPGTNDYRPVQDLREVNKRVQDIHPTVPNPYNLLSSLPPSHTWYSVLDLKDAFFCLKLHPNSQPLFAFEWRDPEKGNTGQLTWTRLPQGFKNSPTLFDEALHRDLASFRALNPQVVMLQYVDDLLVAAPTYRDCKEGTRRLLQELSKLGYRVSAKKAQLCREEVTYLGYLLKGGKRWLTPARKATVMKIPTPTTPRQVREFLGTAGFCRLWIPGFASLAAPLYPLTREKVPFTWTEAHQEAFGRIKEALLSAPALALPDLTKPFALYVDEKEGVARGVLTQTLGPWRRPVAYLSKKLDPVASGWPTCLKAIAAVALLLKDADKLTLGQNVLVIAPHNLESIVRQPPDRWMTNARMTHYQSLLLNERVSFAPPAILNPATLLPVESDDTPIHICSEILAEETGTRPDLRDQPLPGVPAWYTDGSSFIMDGRRQAGAAIVDNKRTVWASNLPEGTSAQKAELIALTQALRLAEGKSINIYTDSRYAFATAHVHGAIYKQRGLLTSAGKDIKNKEEILALLEAIHLPKRVAIIHCPGHQRGTDPVATGNRKADEAAKQAAQSTRILTETTKNAGKRTADGSEFEKRTADGSEFESPKKKAKVE

SEQ ID NO: 6453 - protein, 2237 aa, synthetic construct
MPAAKRVKLDGGDKKYSIGLDIGTNSVGWAVITDEYKVPSKKFKVLGNTDRHSIKKNLIGALLFDSGETAEATRLKRTARRRYTRRKNRICYLQEIFSNEMAKVDDSFFHRLEESFLVEEDKKHERHPIFGNIVDEVAYHEKYPTIYHLRKKLVDSTDKADLRLIYLALAHMIKFRGHFLIEGDLNPDNSDVDKLFIQLVQTYNQLFEENPINASGVDAKAILSARLSKSRRLENLIAQLPGEKKNGLFGNLIALSLGLTPNFKSNFDLAEDAKLQLSKDTYDDDLDNLLAQIGDQYADLFLAAKNLSDAILLSDILRVNTEITKAPLSASMIKRYDEHHQDLTLLKALVRQQLPEKYKEIFFDQSKNGYAGYIDGGASQEEFYKFIKPILEKMDGTEELLVKLNREDLLRKQRTFDNGSIPHQIHLGELHAILRRQEDFYPFLKDNREKIEKILTFRIPYYVGPLARGNSRFAWMTRKSEETITPWNFEEVVDKGASAQSFIERMTNFDKNLPNEKVLPKHSLLYEYFTVYNELTKVKYVTEGMRKPAFLSGEQKKAIVDLLFKTNRKVTVKQLKEDYFKKIECFDSVEISGVEDRFNASLGTYHDLLKIIKDKDFLDNEENEDILEDIVLTLTLFEDREMIEERLKTYAHLFDDKVMKQLKRRRYTGWGRLSRKLINGIRDKQSGKTILDFLKSDGFANRNFMQLIHDDSLTFKEDIQKAQVSGQGDSLHEHIANLAGSPAIKKGILQTVKVVDELVKVMGRHKPENIVIEMARENQTTQKGQKNSRERMKRIEEGIKELGSQILKEHPVENTQLQNEKLYLYYLQNGRDMYVDQELDINRLSDYDVDHIVPQSFLKDDSIDNKVLTRSDKARGKSDNVPSEEVVKKMKNYWRQLLNAKLITQRKFDNLTKAERGGLSELDKAGFIKRQLVETRQITKHVAQILDSRMNTKYDENDKLIREVKVITLKSKLVSDFRKDFQFYKVREINNYHHAHDAYLNAVVGTALIKKYPKLESEFVYGDYKVYDVRKMIAKSEQEIGKATAKYFFYSNIMNFFKTEITLANGEIRKRPLIETNGETGEIVWDKGRDFATVRKVLSMPQVNIVKKTEVQTGGFSKESILPKRNSDKLIARKKDWDPKKYGGFDSPTVAYSVLVVAKVEKGKSKKLKSVKELLGITIMERSSFEKNPIDFLEAKGYKEVKKDLIIKLPKYSLFELENGRKRMLASAGELQKGNELALPSKYVNFLYLASHYEKLKGSPEDNEQKQLFVEQHKHYLDEIIEQISEFSKRVILADANLDKVLSAYNKHRDKPIREQAENIIHLFTLTNLGAPAAFKYFDTTIDRKRYTSTKEVLDATLIHQSITGLYETRIDLSQLGGDGGEAAAKEAAAKEAAAKEAAAKEAAAKEAAAKGGTLGDQGSRGSDPLPEPRVTLTVEGIPTEFLVNTGAEHSVLTKPMGKMGSKRTVVAGATGSKVYPWTTKRLLKIGQKQVTHSFLVIPECPAPLLGRDLLTKLKAQIQFSTEGPQVTWEDRPAMCLVLNLEEEYRLHEKPVPPSIDPSWLQLFPMVWAEKAGMGLANQVPPVVVELKSDASPVAVRQYPMSKEAREGIRPHIQRFLDLGILVPCQSPWNTPLLPVKKPGTNDYRPVQDLREVNKRVQDIHPTVPNPYNLLSSLPPSHTWYSVLDLKDAFFCLKLHPNSQPLFAFEWRDPEKGNTGQLTWTRLPQGFKNSPTLFNEALHRDLASFRALNPQVVMLQYVDDLLVAAPTYRDCKEGTRRLLQELSKLGYRVSAKKAQLCREEVTYLGYLLKGGKRWLTPARKATVMKIPTPTTPRQVREFLGTAGFCRLWIPGFASLAAPLYPLTRPKVPFTWTEAHQEAFGRIKEALLSAPALALPDLTKPFALYVDEKEGVARGVLTQTLGPWRRPVAYLSKKLDPVASGWPTCLKAIAAVALLLKDADKLTLGQNVLVIAPHNLESIVRQPPDRWMTNARMTHYQSLLLNERVSFAPPAILNPATLLPVESDDTPIHICSEILAEETGTRPDLRDQPLPGVPAWYTDGSSFIMDGRRQAGAAIVDNKRTVWASNLPEGTSAQKAELIALTQALRLAEGKSINIYTDSRYAFATAHVHGAIYKQRGWLTSAGKDIKNKEEILALLEAIHLPKRVAIIHCPGHQRGTDPVATGNRKADEAAKQAAQSTRILTETTKNAGKRTADGSEFEKRTADGSEFESPKKKAKVE

SEQ ID NO: 6454 - protein, 2115 aa, synthetic construct
MPAAKRVKLDGGDKKYSIGLDIGTNSVGWAVITDEYKVPSKKFKVLGNTDRHSIKKNLIGALLFDSGETAEATRLKRTARRRYTRRKNRICYLQEIFSNEMAKVDDSFFHRLEESFLVEEDKKHERHPIFGNIVDEVAYHEKYPTIYHLRKKLVDSTDKADLRLIYLALAHMIKFRGHFLIEGDLNPDNSDVDKLFIQLVQTYNQLFEENPINASGVDAKAILSARLSKSRRLENLIAQLPGEKKNGLFGNLIALSLGLTPNFKSNFDLAEDAKLQLSKDTYDDDLDNLLAQIGDQYADLFLAAKNLSDAILLSDILRVNTEITKAPLSASMIKRYDEHHQDLTLLKALVRQQLPEKYKEIFFDQSKNGYAGYIDGGASQEEFYKFIKPILEKMDGTEELLVKLNREDLLRKQRTFDNGSIPHQIHLGELHAILRRQEDFYPFLKDNREKIEKILTFRIPYYVGPLARGNSRFAWMTRKSEETITPWNFEEVVDKGASAQSFIERMTNFDKNLPNEKVLPKHSLLYEYFTVYNELTKVKYVTEGMRKPAFLSGEQKKAIVDLLFKTNRKVTVKQLKEDYFKKIECFDSVEISGVEDRFNASLGTYHDLLKIIKDKDFLDNEENEDILEDIVLTLTLFEDREMIEERLKTYAHLFDDKVMKQLKRRRYTGWGRLSRKLINGIRDKQSGKTILDFLKSDGFANRNFMQLIHDDSLTFKEDIQKAQVSGQGDSLHEHIANLAGSPAIKKGILQTVKVVDELVKVMGRHKPENIVIEMARENQTTQKGQKNSRERMKRIEEGIKELGSQILKEHPVENTQLQNEKLYLYYLQNGRDMYVDQELDINRLSDYDVDHIVPQSFLKDDSIDNKVLTRSDKARGKSDNVPSEEVVKKMKNYWRQLLNAKLITQRKFDNLTKAERGGLSELDKAGFIKRQLVETRQITKHVAQILDSRMNTKYDENDKLIREVKVITLKSKLVSDFRKDFQFYKVREINNYHHAHDAYLNAVVGTALIKKYPKLESEFVYGDYKVYDVRKMIAKSEQEIGKATAKYFFYSNIMNFFKTEITLANGEIRKRPLIETNGETGEIVWDKGRDFATVRKVLSMPQVNIVKKTEVQTGGFSKESILPKRNSDKLIARKKDWDPKKYGGFDSPTVAYSVLVVAKVEKGKSKKLKSVKELLGITIMERSSFEKNPIDFLEAKGYKEVKKDLIIKLPKYSLFELENGRKRMLASAGELQKGNELALPSKYVNFLYLASHYEKLKGSPEDNEQKQLFVEQHKHYLDEIIEQISEFSKRVILADANLDKVLSAYNKHRDKPIREQAENIIHLFTLTNLGAPAAFKYFDTTIDRKRYTSTKEVLDATLIHQSITGLYETRIDLSQLGGDGGEAAAKEAAAKEAAAKEAAAKEAAAKEAAAKGGTLNLEDEYRLYETSAEPEVSPGSTWLSDFPQAWAETGGMGLAVRQAPLIIPLKATSTPVSIKQYPMSQEAKLGIKPHIQRLLDQGILVPCQSPWNTPLLPVKKPGTNDYRPVQDLREVNKRVEDIHPTVPNPYNLLSGLPPSHRWYTVLDLKDAFFCLRLHPTSQPLFAFEWRDPGMGISGQLTWTRLPQGFKNSPTLFNEALHRDLADFRIQHPDLILLQYVDDILLAATSELDCQQGTRALLLTLGNLGYRASAKKAQLCQKQVKYLGYLLKEGQRWLTEARKETVMGQPTPKTPRQLREFLGTAGFCRLWIPGFAEMAAPLYPLTKPGTLFNWGPDQQKAYQEIKQALLTAPALGLPDLTKPFELFVDEKQGYAKGVLTQKLGPWRRPVAYLSKKLDPVAAGWPPCLRMVAAIAVLRKDAGKLTMGQPLVILAPHAVEALVKQPPDRWLSNARMTHYQAMLLDTDRVQFGPVVALNPATLLPLPEEGAPHDCLEILAETHGTRPDLTDQPIPDADHTWYTDGSSFLQEGQRKAGAAVTTETEVIWARALPAGTSAQRAELIALTQALKMAEGKRLNVYTDSRYAFATAHIHGEIYRRRGWLTSEGREIKNKSEILALLKALFLPKRLSIIHCLGHQKGDSAEARGNRLADQAAREAAIKTPPDTSTLLAGKRTADGSEFEKRTADGSEFESPKKKAKVE

SEQ ID NO: 6455 - protein, 2115 aa, synthetic construct
MPAAKRVKLDGGDKKYSIGLDIGTNSVGWAVITDEYKVPSKKFKVLGNTDRHSIKKNLIGALLFDSGETAEATRLKRTARRRYTRRKNRICYLQEIFSNEMAKVDDSFFHRLEESFLVEEDKKHERHPIFGNIVDEVAYHEKYPTIYHLRKKLVDSTDKADLRLIYLALAHMIKFRGHFLIEGDLNPDNSDVDKLFIQLVQTYNQLFEENPINASGVDAKAILSARLSKSRRLENLIAQLPGEKKNGLFGNLIALSLGLTPNFKSNFDLAEDAKLQLSKDTYDDDLDNLLAQIGDQYADLFLAAKNLSDAILLSDILRVNTEITKAPLSASMIKRYDEHHQDLTLLKALVRQQLPEKYKEIFFDQSKNGYAGYIDGGASQEEFYKFIKPILEKMDGTEELLVKLNREDLLRKQRTFDNGSIPHQIHLGELHAILRRQEDFYPFLKDNREKIEKILTFRIPYYVGPLARGNSRFAWMTRKSEETITPWNFEEVVDKGASAQSFIERMTNFDKNLPNEKVLPKHSLLYEYFTVYNELTKVKYVTEGMRKPAFLSGEQKKAIVDLLFKTNRKVTVKQLKEDYFKKIECFDSVEISGVEDRFNASLGTYHDLLKIIKDKDFLDNEENEDILEDIVLTLTLFEDREMIEERLKTYAHLFDDKVMKQLKRRRYTGWGRLSRKLINGIRDKQSGKTILDFLKSDGFANRNFMQLIHDDSLTFKEDIQKAQVSGQGDSLHEHIANLAGSPAIKKGILQTVKVVDELVKVMGRHKPENIVIEMARENQTTQKGQKNSRERMKRIEEGIKELGSQILKEHPVENTQLQNEKLYLYYLQNGRDMYVDQELDINRLSDYDVDHIVPQSFLKDDSIDNKVLTRSDKARGKSDNVPSEEVVKKMKNYWRQLLNAKLITQRKFDNLTKAERGGLSELDKAGFIKRQLVETRQITKHVAQILDSRMNTKYDENDKLIREVKVITLKSKLVSDFRKDFQFYKVREINNYHHAHDAYLNAVVGTALIKKYPKLESEFVYGDYKVYDVRKMIAKSEQEIGKATAKYFFYSNIMNFFKTEITLANGEIRKRPLIETNGETGEIVWDKGRDFATVRKVLSMPQVNIVKKTEVQTGGFSKESILPKRNSDKLIARKKDWDPKKYGGFDSPTVAYSVLVVAKVEKGKSKKLKSVKELLGITIMERSSFEKNPIDFLEAKGYKEVKKDLIIKLPKYSLFELENGRKRMLASAGELQKGNELALPSKYVNFLYLASHYEKLKGSPEDNEQKQLFVEQHKHYLDEIIEQISEFSKRVILADANLDKVLSAYNKHRDKPIREQAENIIHLFTLTNLGAPAAFKYFDTTIDRKRYTSTKEVLDATLIHQSITGLYETRIDLSQLGGDGGEAAAKEAAAKEAAAKEAAAKEAAAKEAAAKGGTLGIEDEYRLHETSTEPDVSLGSTWLSDFPQAWAETGGMGLAVRQAPLIIPLKATSTPVSIQQYPMSHEARLGIKPHIQRLLDQGILVPCQSPWNTPLLPVKKPGTNDYRPVQDLREVNKRVEDIHPTVPNPYNLLSGLPPSHQWYTVLDLKDAFFCLRLHPTSQPLFAFEWRDPGMGISGQLTWTRLPQGFKNSPTLFDEALHRDLADFRIQHPDLILLQYVDDILLAATSELDCQQGTRALLQTLGDLGYRASAKKAQICQKQVKYLGYLLREGQRWLTEARKETVMGQPVPKTPRQLREFLGTAGFCRLWIPGFAEMAAPLYPLTKTGTLFSWGPDQQKAYQEIKQALLTAPALGLPDLTKPFELFVDEKQGYAKGVLTQKLGPWRRPVAYLSKKLDPVAAGWPPCLRMVAAIAVLTKDAGKLTMGQPLVILAPHAVEALVKQPPDRWLSNARMTHYQAMLLDTDRVQFGPVVALNPATLLPLPEEGAPHDCLEILAETHGTRPDLTDQPIPDADHTWYTDGSSFLQEGQRKAGAAVTTETEVIWAGALPAGTSAQRAELIALTQALKMAEGKRLNVYTDSRYAFATAHIHGEIYRRRGLLTSEGREIKNKSEILALLKALFLPKRLSIIHCLGHQKGDSAEARGNRLADQAAREAAIKTPPDTSTLLAGKRTADGSEFEKRTADGSEFESPKKKAKVE

SEQ ID NO: 6456 - protein, 2115 aa, synthetic construct; identical to SEQ ID NO: 6455

SEQ ID NO: 6457 - protein, 2115 aa, synthetic construct
MPAAKRVKLDGGDKKYSIGLDIGTNSVGWAVITDEYKVPSKKFKVLGNTDRHSIKKNLIGALLFDSGETAEATRLKRTARRRYTRRKNRICYLQEIFSNEMAKVDDSFFHRLEESFLVEEDKKHERHPIFGNIVDEVAYHEKYPTIYHLRKKLVDSTDKADLRLIYLALAHMIKFRGHFLIEGDLNPDNSDVDKLFIQLVQTYNQLFEENPINASGVDAKAILSARLSKSRRLENLIAQLPGEKKNGLFGNLIALSLGLTPNFKSNFDLAEDAKLQLSKDTYDDDLDNLLAQIGDQYADLFLAAKNLSDAILLSDILRVNTEITKAPLSASMIKRYDEHHQDLTLLKALVRQQLPEKYKEIFFDQSKNGYAGYIDGGASQEEFYKFIKPILEKMDGTEELLVKLNREDLLRKQRTFDNGSIPHQIHLGELHAILRRQEDFYPFLKDNREKIEKILTFRIPYYVGPLARGNSRFAWMTRKSEETITPWNFEEVVDKGASAQSFIERMTNFDKNLPNEKVLPKHSLLYEYFTVYNELTKVKYVTEGMRKPAFLSGEQKKAIVDLLFKTNRKVTVKQLKEDYFKKIECFDSVEISGVEDRFNASLGTYHDLLKIIKDKDFLDNEENEDILEDIVLTLTLFEDREMIEERLKTYAHLFDDKVMKQLKRRRYTGWGRLSRKLINGIRDKQSGKTILDFLKSDGFANRNFMQLIHDDSLTFKEDIQKAQVSGQGDSLHEHIANLAGSPAIKKGILQTVKVVDELVKVMGRHKPENIVIEMARENQTTQKGQKNSRERMKRIEEGIKELGSQILKEHPVENTQLQNEKLYLYYLQNGRDMYVDQELDINRLSDYDVDHIVPQSFLKDDSIDNKVLTRSDKARGKSDNVPSEEVVKKMKNYWRQLLNAKLITQRKFDNLTKAERGGLSELDKAGFIKRQLVETRQITKHVAQILDSRMNTKYDENDKLIREVKVITLKSKLVSDFRKDFQFYKVREINNYHHAHDAYLNAVVGTALIKKYPKLESEFVYGDYKVYDVRKMIAKSEQEIGKATAKYFFYSNIMNFFKTEITLANGEIRKRPLIETNGETGEIVWDKGRDFATVRKVLSMPQVNIVKKTEVQTGGFSKESILPKRNSDKLIARKKDWDPKKYGGFDSPTVAYSVLVVAKVEKGKSKKLKSVKELLGITIMERSSFEKNPIDFLEAKGYKEVKKDLIIKLPKYSLFELENGRKRMLASAGELQKGNELALPSKYVNFLYLASHYEKLKGSPEDNEQKQLFVEQHKHYLDEIIEQISEFSKRVILADANLDKVLSAYNKHRDKPIREQAENIIHLFTLTNLGAPAAFKYFDTTIDRKRYTSTKEVLDATLIHQSITGLYETRIDLSQLGGDGGEAAAKEAAAKEAAAKEAAAKEAAAKEAAAKGGTLNIEDEYRLHETSKEPDVSLGSTWLSDFPQAWAETGGMGLAVRQAPLIIPLKATSTPVSIKQYPMSQEARLGIKPHIQRLLDQGILVPCQSPWNTPLLPVKKPGTNDYRPVQDLREVNKRVEDIHPTVPNPYNLLSGLPPSHQWYTVLDLKDAFFCLRLHPTSQPLFAFEWRDPEMGISGQLTWTRLPQGFKNSPTLFDEALHRDLAGFRIQHPDLILLQYVDDLLLAATSELDCQQGTRALLQTLGDLGYRASAKKAQICQKQVKYLGYLLKEGQRWLTEARKETVMGQPIPKTPRQLREFLGTAGFCRLWIPGFAEMAAPLYPLTKTGTLFNWGPDQQKAFQEIKQALLTAPALGLPDLTKPFELFVDEKQGYAKGVLTQKLGPWRRPVAYLSKKLDPVAAGWPPCLRMVAAIAVLTKDAGKLTMGQPLVILAPHAVEALVKQPPDRWLSNARMTHYQALLLDTDRVQFGPVVALNPATLLPLPEEGLQHDCLDILAEAHGTRSDLMDQPLPDADHTWYTDGSSFLQEGQRKAGAAVTTETEVIWARALPAGTSAQRAELIALTQALKMAEGKKLNVYTDSRYAFATAHIHGEIYRRRGLLTSEGKEIKNKDEILALLKALFLPKRLSIIHCPGHQKGNSAEARGNRMADQAAREVATRETPETSTLLAGKRTADGSEFEKRTADGSEFESPKKKAKVE

SEQ ID NO: 6458 - protein, 2115 aa, synthetic construct
MPAAKRVKLDGGDKKYSIGLDIGTNSVGWAVITDEYKVPSKKFKVLGNTDRHSIKKNLIGALLFDSGETAEATRLKRTARRRYTRRKNRICYLQEIFSNEMAKVDDSFFHRLEESFLVEEDKKHERHPIFGNIVDEVAYHEKYPTIYHLRKKLVDSTDKADLRLIYLALAHMIKFRGHFLIEGDLNPDNSDVDKLFIQLVQTYNQLFEENPINASGVDAKAILSARLSKSRRLENLIAQLPGEKKNGLFGNLIALSLGLTPNFKSNFDLAEDAKLQLSKDTYDDDLDNLLAQIGDQYADLFLAAKNLSDAILLSDILRVNTEITKAPLSASMIKRYDEHHQDLTLLKALVRQQLPEKYKEIFFDQSKNGYAGYIDGGASQEEFYKFIKPILEKMDGTEELLVKLNREDLLRKQRTFDNGSIPHQIHLGELHAILRRQEDFYPFLKDNREKIEKILTFRIPYYVGPLARGNSRFAWMTRKSEETITPWNFEEVVDKGASAQSFIERMTNFDKNLPNEKVLPKHSLLYEYFTVYNELTKVKYVTEGMRKPAFLSGEQKKAIVDLLFKTNRKVTVKQLKEDYFKKIECFDSVEISGVEDRFNASLGTYHDLLKIIKDKDFLDNEENEDILEDIVLTLTLFEDREMIEERLKTYAHLFDDKVMKQLKRRRYTGWGRLSRKLINGIRDKQSGKTILDFLKSDGFANRNFMQLIHDDSLTFKEDIQKAQVSGQGDSLHEHIANLAGSPAIKKGILQTVKVVDELVKVMGRHKPENIVIEMARENQTTQKGQKNSRERMKRIEEGIKELGSQILKEHPVENTQLQNEKLYLYYLQNGRDMYVDQELDINRLSDYDVDHIVPQSFLKDDSIDNKVLTRSDKARGKSDNVPSEEVVKKMKNYWRQLLNAKLITQRKFDNLTKAERGGLSELDKAGFIKRQLVETRQITKHVAQILDSRMNTKYDENDKLIREVKVITLKSKLVSDFRKDFQFYKVREINNYHHAHDAYLNAVVGTALIKKYPKLESEFVYGDYKVYDVRKMIAKSEQEIGKATAKYFFYSNIMNFFKTEITLANGEIRKRPLIETNGETGEIVWDKGRDFATVRKVLSMPQVNIVKKTEVQTGGFSKESILPKRNSDKLIARKKDWDPKKYGGFDSPTVAYSVLVVAKVEKGKSKKLKSVKELLGITIMERSSFEKNPIDFLEAKGYKEVKKDLIIKLPKYSLFELENGRKRMLASAGELQKGNELALPSKYVNFLYLASHYEKLKGSPEDNEQKQLFVEQHKHYLDEIIEQISEFSKRVILADANLDKVLSAYNKHRDKPIREQAENIIHLFTLTNLGAPAAFKYFDTTIDRKRYTSTKEVLDATLIHQSITGLYETRIDLSQLGGDGGEAAAKEAAAKEAAAKEAAAKEAAAKEAAAKGGTLNIEDEHRLHETSKEPDVSLGSTWLSDFPQAWAETGGMGLAVRQAPLIIPLKATSTPVSIKQYPMSQEARLGIKPHIQRLLDQGILVPCQSPWNTPLLPVKKPGTNDYRPVQDLREVNKRVEDIHPTVPNPYNLLSGLPPSHQWYTVLDLKDAFFCLRLHPTSQPLFAFEWRDPEMGISGQLTWTRLPQGFKNSPTLFDEALHRDLADFRIQHPDLILLQYVDDLLLAATSELDCQQGTRALLQTLGNLGYRASAKKAQICQKQVKYLGYLLKEGQRWLTEARKETVMGQPTPKTPRQLREFLGTAGFCRLWIPGFAEMAAPLYPLTKTGTLFNWGPDQQKAYQEIKQALLTAPALGLPDLTKPFELFVDEKQGYAKGVLTQKLGPWRRPVAYLSKKLDPVAAGWPPCLRMVAAIAVLTKDAGKLTMGQPLVILAPHAVEALVKQPPDRWLSNARMTHYQALLLDTDRVQFGPVVALNPATLLPLPEEGLQHNCLDILAEAHGTRPDLTDQPLPDADHTWYTDGSSLLQEGQRKAGAAVTTETEVIWAKALPAGTSAQRAELIALTQALKMAEGKKLNVYTDSRYAFATAHIHGEIYRRRGLLTSEGKEIKNKDEILALLKALFLPKRLSIIHCPGHQKGHSAEARGNRMADQAARKAAITETPDTSTLLAGKRTADGSEFEKRTADGSEFESPKKKAKVE

SEQ ID NO: 6459 - protein, 2115 aa, synthetic construct; identical to SEQ ID NO: 6458

SEQ ID NO: 6460 - protein, 2115 aa, synthetic construct
MPAAKRVKLDGGDKKYSIGLDIGTNSVGWAVITDEYKVPSKKFKVLGNTDRHSIKKNLIGALLFDSGETAEATRLKRTARRRYTRRKNRICYLQEIFSNEMAKVDDSFFHRLEESFLVEEDKKHERHPIFGNIVDEVAYHEKYPTIYHLRKKLVDSTDKADLRLIYLALAHMIKFRGHFLIEGDLNPDNSDVDKLFIQLVQTYNQLFEENPINASGVDAKAILSARLSKSRRLENLIAQLPGEKKNGLFGNLIALSLGLTPNFKSNFDLAEDAKLQLSKDTYDDDLDNLLAQIGDQYADLFLAAKNLSDAILLSDILRVNTEITKAPLSASMIKRYDEHHQDLTLLKALVRQQLPEKYKEIFFDQSKNGYAGYIDGGASQEEFYKFIKPILEKMDGTEELLVKLNREDLLRKQRTFDNGSIPHQIHLGELHAILRRQEDFYPFLKDNREKIEKILTFRIPYYVGPLARGNSRFAWMTRKSEETITPWNFEEVVDKGASAQSFIERMTNFDKNLPNEKVLPKHSLLYEYFTVYNELTKVKYVTEGMRKPAFLSGEQKKAIVDLLFKTNRKVTVKQLKEDYFKKIECFDSVEISGVEDRFNASLGTYHDLLKIIKDKDFLDNEENEDILEDIVLTLTLFEDREMIEERLKTYAHLFDDKVMKQLKRRRYTGWGRLSRKLINGIRDKQSGKTILDFLKSDGFANRNFMQLIHDDSLTFKEDIQKAQVSGQGDSLHEHIANLAGSPAIKKGILQTVKVVDELVKVMGRHKPENIVIEMARENQTTQKGQKNSRERMKRIEEGIKELGSQILKEHPVENTQLQNEKLYLYYLQNGRDMYVDQELDINRLSDYDVDHIVPQSFLKDDSIDNKVLTRSDKARGKSDNVPSEEVVKKMKNYWRQLLNAKLITQRKFDNLTKAERGGLSELDKAGFIKRQLVETRQITKHVAQILDSRMNTKYDENDKLIREVKVITLKSKLVSDFRKDFQFYKVREINNYHHAHDAYLNAVVGTALIKKYPKLESEFVYGDYKVYDVRKMIAKSEQEIGKATAKYFFYSNIMNFFKTEITLANGEIRKRPLIETNGETGEIVWDKGRDFATVRKVLSMPQVNIVKKTEVQTGGFSKESILPKRNSDKLIARKKDWDPKKYGGFDSPTVAYSVLVVAKVEKGKSKKLKSVKELLGITIMERSSFEKNPIDFLEAKGYKEVKKDLIIKLPKYSLFELENGRKRMLASAGELQKGNELALPSKYVNFLYLASHYEKLKGSPEDNEQKQLFVEQHKHYLDEIIEQISEFSKRVILADANLDKVLSAYNKHRDKPIREQAENIIHLFTLTNLGAPAAFKYFDTTIDRKRYTSTKEVLDATLIHQSITGLYETRIDLSQLGGDGGEAAAKEAAAKEAAAKEAAAKEAAAKEAAAKGGTLNIEDEYRLHEISTEPDVSPGSTWLSDFPQAWAETGGMGLAVRQAPLIIPLKATSTPVSIKQYPMSQEAKLGIKPHIQRLLDQGILVPCQSPWNTPLLPVKKPGTNDYRPVQGLREVNKRVEDIHPTVPNPYNLLSGLPTSHRWYTVLDLKDAFFCLRLHPTSQPLFASEWRDPGMGISGQLTWTRLPQGFKNSPTLFDEALHRGLADFRIQHPDLILLQYVDDLLLAATSELDCQQGTRALLKTLGNLGYRASAKKAQICQKQVKYLGYLLREGQRWLTEARKETVMGQPTPKTPRQLREFLGTAGFCRLWIPRFAEMAAPLYPLTKTGTLFNWGPDQQKAYHEIKQALLTAPALGLPDLTKPFELFVDEKQGYAKGVLTQKLGPWRRPVAYLSKKLDPVAAGWPPCLRMVAAIAVLTKDAGKLTMGQPLVILAPHAVEALVKQPPDRWLSNARMTHYQAMLLDTDRVQFGPVVALNPATLLPLPEEGAPHDCLEILAETHGTEPDLTDQPIPDADHTWYTDGSSFLQEGQRKAGAAVTTETEVIWARALPAGTSAQRAELIALTQALKMAEGKRLNVYTDSRYAFATAHIHGEIYKRRGLLTSEGREIKNKSEILALLKALFLPKRLSIIHCLGHQKGDSAEARGNRLADQAAREAAIKTPPDTSTLLAGKRTADGSEFEKRTADGSEFESPKKKAKVE

SEQ ID NO: 6461 - protein, 2115 aa, synthetic construct
MPAAKRVKLDGGDKKYSIGLDIGTNSVGWAVITDEYKVPSKKFKVLGNTDRHSIKKNLIGALLFDSGETAEATRLKRTARRRYTRRKNRICYLQEIFSNEMAKVDDSFFHRLEESFLVEEDKKHERHPIFGNIVDEVAYHEKYPTIYHLRKKLVDSTDKADLRLIYLALAHMIKFRGHFLIEGDLNPDNSDVDKLFIQLVQTYNQLFEENPINASGVDAKAILSARLSKSRRLENLIAQLPGEKKNGLFGNLIALSLGLTPNFKSNFDLAEDAKLQLSKDTYDDDLDNLLAQIGDQYADLFLAAKNLSDAILLSDILRVNTEITKAPLSASMIKRYDEHHQDLTLLKALVRQQLPEKYKEIFFDQSKNGYAGYIDGGASQEEFYKFIKPILEKMDGTEELLVKLNREDLLRKQRTFDNGSIPHQIHLGELHAILRRQEDFYPFLKDNREKIEKILTFRIPYYVGPLARGNSRFAWMTRKSEETITPWNFEEVVDKGASAQSFIERMTNFDKNLPNEKVLPKHSLLYEYFTVYNELTKVKYVTEGMRKPAFLSGEQKKAIVDLLFKTNRKVTVKQLKEDYFKKIECFDSVEISGVEDRFNASLGTYHDLLKIIKDKDFLDNEENEDILEDIVLTLTLFEDREMIEERLKTYAHLFDDKVMKQLKRRRYTGWGRLSRKLINGIRDKQSGKTILDFLKSDGFANRNFMQLIHDDSLTFKEDIQKAQVSGQGDSLHEHIANLAGSPAIKKGILQTVKVVDELVKVMGRHKPENIVIEMARENQTTQKGQKNSRERMKRIEEGIKELGSQILKEHPVENTQLQNEKLYLYYLQNGRDMYVDQELDINRLSDYDVDHIVPQSFLKDDSIDNKVLTRSDKARGKSDNVPSEEVVKKMKNYWRQLLNAKLITQRKFDNLTKAERGGLSELDKAGFIKRQLVETRQITKHVAQILDSRMNTKYDENDKLIREVKVITLKSKLVSDFRKDFQFYKVREINNYHHAHDAYLNAVVGTALIKKYPKLESEFVYGDYKVYDVRKMIAKSEQEIGKATAKYFFYSNIMNFFKTEITLANGEIRKRPLIETNGETGEIVWDKGRDFATVRKVLSMPQVNIVKKTEVQTGGFSKESILPKRNSDKLIARKKDWDPKKYGGFDSPTVAYSVLVVAKVEKGKSKKLKSVKELLGITIMERSSFEKNPIDFLEAKGYKEVKKDLIIKLPKYSLFELENGRKRMLASAGELQKGNELALPSKYVNFLYLASHYEKLKGSPEDNEQKQLFVEQHKHYLDEIIEQISEFSKRVILADANLDKVLSAYNKHRDKPIREQAENIIHLFTLTNLGAPAAFKYFDTTIDRKRYTSTKEVLDATLIHQSITGLYETRIDLSQLGGDGGEAAAKEAAAKEAAAKEAAAKEAAAKEAAAKGGTLNIEDEYRLHEISTEPDVSPGSTWLSDFPQAWAETGGMGLAVRQAPLIIPLKATSTPVSIKQYPMSQEAKLGIKPHIQRLLDQGILVPCQSPWNTPLLPVKKPGTNDYRPVQGLREVNKRVEDIHPTVPNPYNLLSGLPTSHRWYTVLDLKDAFFCLRLHPTSQPLFASEWRDPGMGISGQLTWTRLPQGFKNSPTLFNEALHRGLADFRIQHPDLILLQYVDDLLLAATSELDCQQGTRALLKTLGNLGYRASAKKAQICQKQVKYLGYLLREGQRWLTEARKETVMGQPTPKTPRQLREFLGKAGFCRLFIPRFAEMAAPLYPLTKPGTLFNWGPDQQKAYHEIKQALLTAPALGLPDLTKPFELFVDEKQGYAKGVLTQKLGPWRRPVAYLSKKLDPVAAGWPPCLRMVAAIAVLTKDAGKLTMGQPLVILAPHAVEALVKQPPDRWLSNARMTHYQAMLLDTDRVQFGPVVALNPATLLPLPEEGAPHDCLEILAETHGTEPDLTDQPIPDADHTWYTDGSSFLQEGQRKAGAAVTTETEVIWARALPAGTSAQRAELIALTQALKMAEGKRLNVYTDSRYAFATAHIHGEIYKRRGWLTSEGREIKNKSEILALLKALFLPKRLSIIHCLGHQKGDSAEARGNRLADQAAREAAIKTPPDTSTLLAGKRTADGSEFEKRTADGSEFESPKKKAKVE

SEQ ID NO: 6462 - protein, 2195 aa, synthetic construct
MPAAKRVKLDGGDKKYSIGLDIGTNSVGWAVITDEYKVPSKKFKVLGNTDRHSIKKNLIGALLFDSGETAEATRLKRTARRRYTRRKNRICYLQEIFSNEMAKVDDSFFHRLEESFLVEEDKKHERHPIFGNIVDEVAYHEKYPTIYHLRKKLVDSTDKADLRLIYLALAHMIKFRGHFLIEGDLNPDNSDVDKLFIQLVQTYNQLFEENPINASGVDAKAILSARLSKSRRLENLIAQLPGEKKNGLFGNLIALSLGLTPNFKSNFDLAEDAKLQLSKDTYDDDLDNLLAQIGDQYADLFLAAKNLSDAILLSDILRVNTEITKAPLSASMIKRYDEHHQDLTLLKALVRQQLPEKYKEIFFDQSKNGYAGYIDGGASQEEFYKFIKPILEKMDGTEELLVKLNREDLLRKQRTFDNGSIPHQIHLGELHAILRRQEDFYPFLKDNREKIEKILTFRIPYYVGPLARGNSRFAWMTRKSEETITPWNFEEVVDKGASAQSFIERMTNFDKNLPNEKVLPKHSLLYEYFTVYNELTKVKYVTEGMRKPAFLSGEQKKAIVDLLFKTNRKVTVKQLKEDYFKKIECFDSVEISGVEDRFNASLGTYHDLLKIIKDKDFLDNEENEDILEDIVLTLTLFEDREMIEERLKTYAHLFDDKVMKQLKRRRYTGWGRLSRKLINGIRDKQSGKTILDFLKSDGFANRNFMQLIHDDSLTFKEDIQKAQVSGQGDSLHEHIANLAGSPAIKKGILQTVKVVDELVKVMGRHKPENIVIEMARENQTTQKGQKNSRERMKRIEEGIKELGSQILKEHPVENTQLQNEKLYLYYLQNGRDMYVDQELDINRLSDYDVDHIVPQSFLKDDSIDNKVLTRSDKARGKSDNVPSEEVVKKMKNYWRQLLNAKLITQRKFDNLTKAERGGLSELDKAGFIKRQLVETRQITKHVAQILDSRMNTKYDENDKLIREVKVITLKSKLVSDFRKDFQFYKVREINNYHHAHDAYLNAVVGTALIKKYPKLESEFVYGDYKVYDVRKMIAKSEQEIGKATAKYFFYSNIMNFFKTEITLANGEIRKRPLIETNGETGEIVWDKGRDFATVRKVLSMPQVNIVKKTEVQTGGFSKESILPKRNSDKLIARKKDWDPKKYGGFDSPTVAYSVLVVAKVEKGKSKKLKSVKELLGITIMERSSFEKNPIDFLEAKGYKEVKKDLIIKLPKYSLFELENGRKRMLASAGELQKGNELALPSKYVNFLYLASHYEKLKGSPEDNEQKQLFVEQHKHYLDEIIEQISEFSKRVILADANLDKVLSAYNKHRDKPIREQAENIIHLFTLTNLGAPAAFKYFDTTIDRKRYTSTKEVLDATLIHQSITGLYETRIDLSQLGGDGGEAAAKEAAAKEAAAKEAAAKEAAAKEAAAKGGMDPLQLLQPLEAEIKGTKLKAHWNSGATITCVPEAFLEDERPIQTMLIKTIHGEKQQDVYYLTFKVQGRKVEAEVLASPYDYILLNPSDVPWLMKKPLQLTVLVPLHEYQERLLQQTALPKEQKELLQKLFLKYDALWQHWENQVGHRRIKPHNIATGTLAPRPQKQYPINPKAKPSIQIVIDDLLKQGVLIQQNSTMNTPVYPVPKPDGKWRMVLDYREVNKTIPLIAAQNQHSAGILSSIYRGKYKTTLDLTNGFWAHPITPESYWLTAFTWQGKQYCWTRLPQGFLNSPALFTADVVDLLKEIPNVQAYVDDIYISHDDPQEHLEQLEKIFSILLNAGYVVSLKKSEIAQREVEFLGFNITKEGRGLTDTFKQKLLNITPPKDLKQLQSILGLLNFARNFIPNYSELVKPLYTIVANANGKFISWTEDNSNQLQHIISVLNQADNLEERNPETRLIIKVNSSPSAGYIRYYNEGSKRPIMYVNYIFSKAEAKFTQTEKLLTTMHKGLIKAMDLAMGQEILVYSPIVSMTKIQRTPLPERKALPVRWITWMTYLEDPRIQFHYDKSLPELQQIPNVTEDVIAKTKHPSEFAMVFYTDGSAIKHPDVNKSHSAGMGIAQVQFIPEYKIVHQWSIPLGDHTAQLAEIAAVEFACKKALKISGPVLIVTDSFYVAESANKELPYWKSNGFLNNKKKPLRHVSKWKSIAECLQLKPDIIIMHEKGHQQPMTTLHTEGNNLADKLATQGSYVVHAGKRTADGSEFEKRTADGSEFESPKKKAKVE

SEQ ID NO: 6463 - protein, 2106 aa, synthetic construct
MPAAKRVKLDGGDKKYSIGLDIGTNSVGWAVITDEYKVPSKKFKVLGNTDRHSIKKNLIGALLFDSGETAEATRLKRTARRRYTRRKNRICYLQEIFSNEMAKVDDSFFHRLEESFLVEEDKKHERHPIFGNIVDEVAYHEKYPTIYHLRKKLVDSTDKADLRLIYLALAHMIKFRGHFLIEGDLNPDNSDVDKLFIQLVQTYNQLFEENPINASGVDAKAILSARLSKSRRLENLIAQLPGEKKNGLFGNLIALSLGLTPNFKSNFDLAEDAKLQLSKDTYDDDLDNLLAQIGDQYADLFLAAKNLSDAILLSDILRVNTEITKAPLSASMIKRYDEHHQDLTLLKALVRQQLPEKYKEIFFDQSKNGYAGYIDGGASQEEFYKFIKPILEKMDGTEELLVKLNREDLLRKQRTFDNGSIPHQIHLGELHAILRRQEDFYPFLKDNREKIEKILTFRIPYYVGPLARGNSRFAWMTRKSEETITPWNFEEVVDKGASAQSFIERMTNFDKNLPNEKVLPKHSLLYEYFTVYNELTKVKYVTEGMRKPAFLSGEQKKAIVDLLFKTNRKVTVKQLKEDYFKKIECFDSVEISGVEDRFNASLGTYHDLLKIIKDKDFLDNEENEDILEDIVLTLTLFEDREMIEERLKTYAHLFDDKVMKQLKRRRYTGWGRLSRKLINGIRDKQSGKTILDFLKSDGFANRNFMQLIHDDSLTFKEDIQKAQVSGQGDSLHEHIANLAGSPAIKKGILQTVKVVDELVKVMGRHKPENIVIEMARENQTTQKGQKNSRERMKRIEEGIKELGSQILKEHPVENTQLQNEKLYLYYLQNGRDMYVDQELDINRLSDYDVDHIVPQSFLKDDSIDNKVLTRSDKARGKSDNVPSEEVVKKMKNYWRQLLNAKLITQRKFDNLTKAERGGLSELDKAGFIKRQLVETRQITKHVAQILDSRMNTKYDENDKLIREVKVITLKSKLVSDFRKDFQFYKVREINNYHHAHDAYLNAVVGTALIKKYPKLESEFVYGDYKVYDVRKMIAKSEQEIGKATAKYFFYSNIMNFFKTEITLANGEIRKRPLIETNGETGEIVWDKGRDFATVRKVLSMPQVNIVKKTEVQTGGFSKESILPKRNSDKLIARKKDWDPKKYGGFDSPTVAYSVLVVAKVEKGKSKKLKSVKELLGITIMERSSFEKNPIDFLEAKGYKEVKKDLIIKLPKYSLFELENGRKRMLASAGELQKGNELALPSKYVNFLYLASHYEKLKGSPEDNEQKQLFVEQHKHYLDEIIEQISEFSKRVILADANLDKVLSAYNKHRDKPIREQAENIIHLFTLTNLGAPAAFKYFDTTIDRKRYTSTKEVLDATLIHQSITGLYETRIDLSQLGGDGGEAAAKEAAAKEAAAKEAAAKEAAAKEAAAKGGVPWLMKKPLQLTVLVPLHEYQERLLQQTALPKEQKELLQKLFLKYDALWQHWENQVGHRRIKPHNIATGTLAPRPQKQYPINPKAKPSIQIVIDDLLKQGVLIQQNSTMNTPVYPVPKPDGKWRMVLDYREVNKTIPLIAAQNQHSAGILSSIYRGKYKTTLDLTNGFWAHPITPESYWLTAFTWQGKQYCWTRLPQGFLNSPALFTADVVDLLKEIPNVQAYVDDIYISHDDPQEHLEQLEKIFSILLNAGYVVSLKKSEIAQREVEFLGFNITKEGRGLTDTFKQKLLNITPPKDLKQLQSILGLLNFARNFIPNYSELVKPLYTIVANANGKFISWTEDNSNQLQHIISVLNQADNLEERNPETRLIIKVNSSPSAGYIRYYNEGSKRPIMYVNYIFSKAEAKFTQTEKLLTTMHKGLIKAMDLAMGQEILVYSPIVSMTKIQRTPLPERKALPVRWITWMTYLEDPRIQFHYDKSLPELQQIPNVTEDVIAKTKHPSEFAMVFYTDGSAIKHPDVNKSHSAGMGIAQVQFIPEYKIVHQWSIPLGDHTAQLAEIAAVEFACKKALKISGPVLIVTDSFYVAESANKELPYWKSNGFLNNKKKPLRHVSKWKSIAECLQLKPDIIIMHEKGHQQPMTTLHTEGNNLADKLATQGSYVVHAGKRTADGSEFEKRTADGSEFESPKKKAKVE

SEQ ID NO: 6464 - protein, 2106 aa, synthetic construct
MPAAKRVKLDGGDKKYSIGLDIGTNSVGWAVITDEYKVPSKKFKVLGNTDRHSIKKNLIGALLFDSGETAEATRLKRTARRRYTRRKNRICYLQEIFSNEMAKVDDSFFHRLEESFLVEEDKKHERHPIFGNIVDEVAYHEKYPTIYHLRKKLVDSTDKADLRLIYLALAHMIKFRGHFLIEGDLNPDNSDVDKLFIQLVQTYNQLFEENPINASGVDAKAILSARLSKSRRLENLIAQLPGEKKNGLFGNLIALSLGLTPNFKSNFDLAEDAKLQLSKDTYDDDLDNLLAQIGDQYADLFLAAKNLSDAILLSDILRVNTEITKAPLSASMIKRYDEHHQDLTLLKALVRQQLPEKYKEIFFDQSKNGYAGYIDGGASQEEFYKFIKPILEKMDGTEELLVKLNREDLLRKQRTFDNGSIPHQIHLGELHAILRRQEDFYPFLKDNREKIEKILTFRIPYYVGPLARGNSRFAWMTRKSEETITPWNFEEVVDKGASAQSFIERMTNFDKNLPNEKVLPKHSLLYEYFTVYNELTKVKYVTEGMRKPAFLSGEQKKAIVDLLFKTNRKVTVKQLKEDYFKKIECFDSVEISGVEDRFNASLGTYHDLLKIIKDKDFLDNEENEDILEDIVLTLTLFEDREMIEERLKTYAHLFDDKVMKQLKRRRYTGWGRLSRKLINGIRDKQSGKTILDFLKSDGFANRNFMQLIHDDSLTFKEDIQKAQVSGQGDSLHEHIANLAGSPAIKKGILQTVKVVDELVKVMGRHKPENIVIEMARENQTTQKGQKNSRERMKRIEEGIKELGSQILKEHPVENTQLQNEKLYLYYLQNGRDMYVDQELDINRLSDYDVDHIVPQSFLKDDSIDNKVLTRSDKARGKSDNVPSEEVVKKMKNYWRQLLNAKLITQRKFDNLTKAERGGLSELDKAGFIKRQLVETRQITKHVAQILDSRMNTKYDENDKLIREVKVITLKSKLVSDFRKDFQFYKVREINNYHHAHDAYLNAVVGTALIKKYPKLESEFVYGDYKVYDVRKMIAKSEQEIGKATAKYFFYSNIMNFFKTEITLANGEIRKRPLIETNGETGEIVWDKGRDFATVRKVLSMPQVNIVKKTEVQTGGFSKESILPKRNSDKLIARKKDWDPKKYGGFDSPTVAYSVLVVAKVEKGKSKKLKSVKELLGITIMERSSFEKNPIDFLEAKGYKEVKKDLIIKLPKYSLFELENGRKRMLASAGELQKGNELALPSKYVNFLYLASHYEKLKGSPEDNEQKQLFVEQHKHYLDEIIEQISEFSKRVILADANLDKVLSAYNKHRDKPIREQAENIIHLFTLTNLGAPAAFKYFDTTIDRKRYTSTKEVLDATLIHQSITGLYETRIDLSQLGGDGGEAAAKEAAAKEAAAKEAAAKEAAAKEAAAKGGVPWLMKKPLQLTVLVPLHEYQERLLQQTALPKEQKELLQKLFLKYDALWQHWENQVGHRRIKPHNIATGTLAPRPQKQYPINPKAKPSIQIVIDDLLKQGVLIQQNSTMNTPVYPVPKPDGKWRMVLDYREVNKTIPLIAAQNQHSAGILSSIYRGKYKTTLDLTNGFWAHPITPESYWLTAFTWQGKQYCWTRLPQGFLNSPALFNADVVDLLKEIPNVQAYVDDIYISHDDPQEHLEQLEKIFSILLNAGYVVSLKKSEIAQREVEFLGFNITKEGRGLTDTFKQKLLNITPPKDLKQLQSILGKLNFARNFIPNYSELVKPLYTIVAPANGKFISWTEDNSNQLQHIISVLNQADNLEERNPETRLIIKVNSSPSAGYIRYYNEGSKRPIMYVNYIFSKAEAKFTQTEKLLTTMHKGLIKAMDLAMGQEILVYSPIVSMTKIQRTPLPERKALPVRWITWMTYLEDPRIQFHYDKSLPELQQIPNVTEDVIAKTKHPSEFAMVFYTDGSAIKHPDVNKSHSAGMGIAQVQFIPEYKIVHQWSIPLGDHTAQLAEIAAVEFACKKALKISGPVLIVTDSFYVAESANKELPYWKSNGFLNNKKKPLRHVSKWKSIAECLQLKPDIIIMHEKGHQQPMTTLHTEGNNLADKLATQGSYVVHAGKRTADGSEFEKRTADGSEFESPKKKAKVE

SEQ ID NO: 6465 - protein, 2195 aa, synthetic construct
MPAAKRVKLDGGDKKYSIGLDIGTNSVGWAVITDEYKVPSKKFKVLGNTDRHSIKKNLIGALLFDSGETAEATRLKRTARRRYTRRKNRICYLQEIFSNEMAKVDDSFFHRLEESFLVEEDKKHERHPIFGNIVDEVAYHEKYPTIYHLRKKLVDSTDKADLRLIYLALAHMIKFRGHFLIEGDLNPDNSDVDKLFIQLVQTYNQLFEENPINASGVDAKAILSARLSKSRRLENLIAQLPGEKKNGLFGNLIALSLGLTPNFKSNFDLAEDAKLQLSKDTYDDDLDNLLAQIGDQYADLFLAAKNLSDAILLSDILRVNTEITKAPLSASMIKRYDEHHQDLTLLKALVRQQLPEKYKEIFFDQSKNGYAGYIDGGASQEEFYKFIKPILEKMDGTEELLVKLNREDLLRKQRTFDNGSIPHQIHLGELHAILRRQEDFYPFLKDNREKIEKILTFRIPYYVGPLARGNSRFAWMTRKSEETITPWNFEEVVDKGASAQSFIERMTNFDKNLPNEKVLPKHSLLYEYFTVYNELTKVKYVTEGMRKPAFLSGEQKKAIVDLLFKTNRKVTVKQLKEDYFKKIECFDSVEISGVEDRFNASLGTYHDLLKIIKDKDFLDNEENEDILEDIVLTLTLFEDREMIEERLKTYAHLFDDKVMKQLKRRRYTGWGRLSRKLINGIRDKQSGKTILDFLKSDGFANRNFMQLIHDDSLTFKEDIQKAQVSGQGDSLHEHIANLAGSPAIKKGILQTVKVVDELVKVMGRHKPENIVIEMARENQTTQKGQKNSRERMKRIEEGIKELGSQILKEHPVENTQLQNEKLYLYYLQNGRDMYVDQELDINRLSDYDVDHIVPQSFLKDDSIDNKVLTRSDKARGKSDNVPSEEVVKKMKNYWRQLLNAKLITQRKFDNLTKAERGGLSELDKAGFIKRQLVETRQITKHVAQILDSRMNTKYDENDKLIREVKVITLKSKLVSDFRKDFQFYKVREINNYHHAHDAYLNAVVGTALIKKYPKLESEFVYGDYKVYDVRKMIAKSEQEIGKATAKYFFYSNIMNFFKTEITLANGEIRKRPLIETNGETGEIVWDKGRDFATVRKVLSMPQVNIVKKTEVQTGGFSKESILPKRNSDKLIARKKDWDPKKYGGFDSPTVAYSVLVVAKVEKGKSKKLKSVKELLGITIMERSSFEKNPIDFLEAKGYKEVKKDLIIKLPKYSLFELENGRKRMLASAGELQKGNELALPSKYVNFLYLASHYEKLKGSPEDNEQKQLFVEQHKHYLDEIIEQISEFSKRVILADANLDKVLSAYNKHRDKPIREQAENIIHLFTLTNLGAPAAFKYFDTTIDRKRYTSTKEVLDATLIHQSITGLYETRIDLSQLGGDGGEAAAKEAAAKEAAAKEAAAKEAAAKEAAAKGGMDPLQLLQPLEAEIKGTKLKAHWNSGATITCVPQAFLEEEVPIKNIWIKTIHGEKEQPVYYLTFKIQGRKVEAEVISSPYDYILVSPSDIPWLMKKPLQLTTLVPLQEYEERLLKQTMLTGSYKEKLQSLFLKYDALWQHWENQVGHRRIKPHHIATGTVNPRPQKQYPINPKAKASIQTVINDLLKQGVLIQQNSIMNTPVYPVPKPDGKWRMVLDYREVNKTIPLIAAQNQHSAGILSSIFRGKYKTTLDLSNGFWAHSITPESYWLTAFTWLGQQYCWTRLPQGFLNSPALFTADVVDLLKEVPNVQVYVDDIYISHDDPREHLEQLEKVFSLLLNAGYVVSLKKSEIAQHEVEFLGFNITKEGRGLTETFKQKLLNITPPRDLKQLQSILGLLNFARNFIPNFSELVKPLYNIIATANGKYITWTTDNSQQLQNIISMLNSAENLEERNPEVRLIMKVNTSPSAGYIRFYNEFAKRPIMYLNYVYTKAEVKFTNTEKLLTTIHKGLIKALDLGMGQEILVYSPIVSMTKIQKTPLPERKALPIRWITWMSYLEDPRIQFHYDKTLPELQQVPTVTDDIIAKIKHPSEFSMVFYTDGSAIKHPNVNKSHNAGMGIAQVQFKPEFTVINTWSIPLGDHTAQLAEVAAVEFACKKALKIDGPVLIVTDSFYVAESVNKELPYWQSNGFFNNKKKPLKHVSKWKSIADCIQLKPDIIIIHEKGHQPTASTFHTEGNNLADKLATQGSYVVNAGKRTADGSEFEKRTADGSEFESPKKKAKVE

SEQ ID NO: 6466 - protein, 2106 aa, synthetic construct
MPAAKRVKLDGGDKKYSIGLDIGTNSVGWAVITDEYKVPSKKFKVLGNTDRHSIKKNLIGALLFDSGETAEATRLKRTARRRYTRRKNRICYLQEIFSNEMAKVDDSFFHRLEESFLVEEDKKHERHPIFGNIVDEVAYHEKYPTIYHLRKKLVDSTDKADLRLIYLALAHMIKFRGHFLIEGDLNPDNSDVDKLFIQLVQTYNQLFEENPINASGVDAKAILSARLSKSRRLENLIAQLPGEKKNGLFGNLIALSLGLTPNFKSNFDLAEDAKLQLSKDTYDDDLDNLLAQIGDQYADLFLAAKNLSDAILLSDILRVNTEITKAPLSASMIKRYDEHHQDLTLLKALVRQQLPEKYKEIFFDQSKNGYAGYIDGGASQEEFYKFIKPILEKMDGTEELLVKLNREDLLRKQRTFDNGSIPHQIHLGELHAILRRQEDFYPFLKDNREKIEKILTFRIPYYVGPLARGNSRFAWMTRKSEETITPWNFEEVVDKGASAQSFIERMTNFDKNLPNEKVLPKHSLLYEYFTVYNELTKVKYVTEGMRKPAFLSGEQKKAIVDLLFKTNRKVTVKQLKEDYFKKIECFDSVEISGVEDRFNASLGTYHDLLKIIKDKDFLDNEENEDILEDIVLTLTLFEDREMIEERLKTYAHLFDDKVMKQLKRRRYTGWGRLSRKLINGIRDKQSGKTILDFLKSDGFANRNFMQLIHDDSLTFKEDIQKAQVSGQGDSLHEHIANLAGSPAIKKGILQTVKVVDELVKVMGRHKPENIVIEMARENQTTQKGQKNSRERMKRIEEGIKELGSQILKEHPVENTQLQNEKLYLYYLQNGRDMYVDQELDINRLSDYDVDHIVPQSFLKDDSIDNKVLTRSDKARGKSDNVPSEEVVKKMKNYWRQLLNAKLITQRKFDNLTKAERGGLSELDKAGFIKRQLVETRQITKHVAQILDSRMNTKYDENDKLIREVKVITLKSKLVSDFRKDFQFYKVREINNYHHAHDAYLNAVVGTALIKKYPKLESEFVYGDYKVYDVRKMIAKSEQEIGKATAKYFFYSNIMNFFKTEITLANGEIRKRPLIETNGETGEIVWDKGRDFATVRKVLSMPQVNIVKKTEVQTGGFSKESILPKRNSDKLIARKKDWDPKKYGGFDSPTVAYSVLVVAKVEKGKSKKLKSVKELLGITIMERSSFEKNPIDFLEAKGYKEVKKDLIIKLPKYSLFELENGRKRMLASAGELQKGNELALPSKYVNFLYLASHYEKLKGSPEDNEQKQLFVEQHKHYLDEIIEQISEFSKRVILADANLDKVLSAYNKHRDKPIREQAENIIHLFTLTNLGAPAAFKYFDTTIDRKRYTSTKEVLDATLIHQSITGLYETRIDLSQLGGDGGEAAAKEAAAKEAAAKEAAAKEAAAKEAAAKGGIPWLMKKPLQLTTLVPLQEYEERLLKQTMLTGSYKEKLQSLFLKYDALWQHWENQVGHRRIKPHHIATGTVNPRPQKQYPINPKAKASIQTVINDLLKQGVLIQQNSIMNTPVYPVPKPDGKWRMVLDYREVNKTIPLIAAQNQHSAGILSSIFRGKYKTTLDLSNGFWAHSITPESYWLTAFTWLGQQYCWTRLPQGFLNSPALFNADVVDLLKEVPNVQVYVDDIYISHDDPREHLEQLEKVFSLLLNAGYVVSLKKSEIAQHEVEFLGFNITKEGRGLTETFKQKLLNITPPRDLKQLQSILGLLNFARNFIPNFSELVKPLYNIIATAPGKYITWTTDNSQQLQNIISMLNSAENLEERNPEVRLIMKVNTSPSAGYIRFYNEFAKRPIMYLNYVYTKAEVKFTNTEKLLTTIHKGLIKALDLGMGQEILVYSPIVSMTKIQKTPLPERKALPIRWITWMSYLEDPRIQFHYDKTLPELQQVPTVTDDIIAKIKHPSEFSMVFYTDGSAIKHPNVNKSHNAGMGIAQVQFKPEFTVINTWSIPLGDHTAQLAEVAAVEFACKKALKIDGPVLIVTDSFYVAESVNKELPYWQSNGFFNNKKKPLKHVSKWKSIADCIQLKPDIIIIHEKGHQPTASTFHTEGNNLADKLATQGSYVVNAGKRTADGSEFEKRTADGSEFESPKKKAKVE

SEQ ID NO: 6467 - protein, 2113 aa, synthetic construct
MPAAKRVKLDGGDKKYSIGLDIGTNSVGWAVITDEYKVPSKKFKVLGNTDRHSIKKNLIGALLFDSGETAEATRLKRTARRRYTRRKNRICYLQEIFSNEMAKVDDSFFHRLEESFLVEEDKKHERHPIFGNIVDEVAYHEKYPTIYHLRKKLVDSTDKADLRLIYLALAHMIKFRGHFLIEGDLNPDNSDVDKLFIQLVQTYNQLFEENPINASGVDAKAILSARLSKSRRLENLIAQLPGEKKNGLFGNLIALSLGLTPNFKSNFDLAEDAKLQLSKDTYDDDLDNLLAQIGDQYADLFLAAKNLSDAILLSDILRVNTEITKAPLSASMIKRYDEHHQDLTLLKALVRQQLPEKYKEIFFDQSKNGYAGYIDGGASQEEFYKFIKPILEKMDGTEELLVKLNREDLLRKQRTFDNGSIPHQIHLGELHAILRRQEDFYPFLKDNREKIEKILTFRIPYYVGPLARGNSRFAWMTRKSEETITPWNFEEVVDKGASAQSFIERMTNFDKNLPNEKVLPKHSLLYEYFTVYNELTKVKYVTEGMRKPAFLSGEQKKAIVDLLFKTNRKVTVKQLKEDYFKKIECFDSVEISGVEDRFNASLGTYHDLLKIIKDKDFLDNEENEDILEDIVLTLTLFEDREMIEERLKTYAHLFDDKVMKQLKRRRYTGWGRLSRKLINGIRDKQSGKTILDFLKSDGFANRNFMQLIHDDSLTFKEDIQKAQVSGQGDSLHEHIANLAGSPAIKKGILQTVKVVDELVKVMGRHKPENIVIEMARENQTTQKGQKNSRERMKRIEEGIKELGSQILKEHPVENTQLQNEKLYLYYLQNGRDMYVDQELDINRLSDYDVDHIVPQSFLKDDSIDNKVLTRSDKARGKSDNVPSEEVVKKMKNYWRQLLNAKLITQRKFDNLTKAERGGLSELDKAGFIKRQLVETRQITKHVAQILDSRMNTKYDENDKLIREVKVITLKSKLVSDFRKDFQFYKVREINNYHHAHDAYLNAVVGTALIKKYPKLESEFVYGDYKVYDVRKMIAKSEQEIGKATAKYFFYSNIMNFFKTEITLANGEIRKRPLIETNGETGEIVWDKGRDFATVRKVLSMPQVNIVKKTEVQTGGFSKESILPKRNSDKLIARKKDWDPKKYGGFDSPTVAYSVLVVAKVEKGKSKKLKSVKELLGITIMERSSFEKNPIDFLEAKGYKEVKKDLIIKLPKYSLFELENGRKRMLASAGELQKGNELALPSKYVNFLYLASHYEKLKGSPEDNEQKQLFVEQHKHYLDEIIEQISEFSKRVILADANLDKVLSAYNKHRDKPIREQAENIIHLFTLTNLGAPAAFKYFDTTIDRKRYTSTKEVLDATLIHQSITGLYETRIDLSQLGGDGGEAAAKEAAAKEAAAKEAAAKEAAAKEAAAKGGVLNLEEEYRLHEKPVPSSIDPSWLQLFPTVWAERAGMGLANQVPPVVVELRSGASPVAVRQYPMSKEAREGIRPHIQRFLDLGVLVPCQSPWNTPLLPVKKPGTNDYRPVQDLREINKRVQDIHPTVPNPYNLLSSLPPSHTWYSVLDLKDAFFCLKLHPNSQPLFAFEWRDPEKGNTGQLTWTRLPQGFKNSPTLFDEALHRDLAPFRALNPQVVLLQYVDDLLVAAPTYRDCKEGTQKLLQELSKLGYRVSAKKAQLCQKEVTYLGYLLKEGKRWLTPARKATVMKIPPPTTPRQVREFLGTAGFCRLWIPGFASLAAPLYPLTKESIPFIWTEEHQKAFDRIKEALLSAPALALPDLTKPFTLYVDERAGVARGVLTQTLGPWRRPVAYLSKKLDPVASGWPTCLKAVAAVALLLKDADKLTLGQNVTVIASHSLESIVRQPPDRWMTNARMTHYQSLLLNERVSFAPPAVLNPATLLPVESEATPVHRCSEILAEETGTRRDLKDQPLPGVPAWYTDGSSFIAEGKRRAGAAIVDGKRTVWASSLPEGTSAQKAELVALTQALRLAEGKDINIYTDSRYAFATAHIHGAIYKQRGLLTSAGKDIKNKEEILALLEAIHLPKRVAIIHCPGHQKGNDPVATGNRRADEAAKQAALSTRVLAETTKPAGKRTADGSEFEKRTADGSEFESPKKKAKVE

SEQ ID NO: 6468 - protein, 2113 aa, synthetic construct
MPAAKRVKLDGGDKKYSIGLDIGTNSVGWAVITDEYKVPSKKFKVLGNTDRHSIKKNLIGALLFDSGETAEATRLKRTARRRYTRRKNRICYLQEIFSNEMAKVDDSFFHRLEESFLVEEDKKHERHPIFGNIVDEVAYHEKYPTIYHLRKKLVDSTDKADLRLIYLALAHMIKFRGHFLIEGDLNPDNSDVDKLFIQLVQTYNQLFEENPINASGVDAKAILSARLSKSRRLENLIAQLPGEKKNGLFGNLIALSLGLTPNFKSNFDLAEDAKLQLSKDTYDDDLDNLLAQIGDQYADLFLAAKNLSDAILLSDILRVNTEITKAPLSASMIKRYDEHHQDLTLLKALVRQQLPEKYKEIFFDQSKNGYAGYIDGGASQEEFYKFIKPILEKMDGTEELLVKLNREDLLRKQRTFDNGSIPHQIHLGELHAILRRQEDFYPFLKDNREKIEKILTFRIPYYVGPLARGNSRFAWMTRKSEETITPWNFEEVVDKGASAQSFIERMTNFDKNLPNEKVLPKHSLLYEYFTVYNELTKVKYVTEGMRKPAFLSGEQKKAIVDLLFKTNRKVTVKQLKEDYFKKIECFDSVEISGVEDRFNASLGTYHDLLKIIKDKDFLDNEENEDILEDIVLTLTLFEDREMIEERLKTYAHLFDDKVMKQLKRRRYTGWGRLSRKLINGIRDKQSGKTILDFLKSDGFANRNFMQLIHDDSLTFKEDIQKAQVSGQGDSLHEHIANLAGSPAIKKGILQTVKVVDELVKVMGRHKPENIVIEMARENQTTQKGQKNSRERMKRIEEGIKELGSQILKEHPVENTQLQNEKLYLYYLQNGRDMYVDQELDINRLSDYDVDHIVPQSFLKDDSIDNKVLTRSDKARGKSDNVPSEEVVKKMKNYWRQLLNAKLITQRKFDNLTKAERGGLSELDKAGFIKRQLVETRQITKHVAQILDSRMNTKYDENDKLIREVKVITLKSKLVSDFRKDFQFYKVREINNYHHAHDAYLNAVVGTALIKKYPKLESEFVYGDYKVYDVRKMIAKSEQEIGKATAKYFFYSNIMNFFKTEITLANGEIRKRPLIETNGETGEIVWDKGRDFATVRKVLSMPQVNIVKKTEVQTGGFSKESILPKRNSDKLIARKKDWDPKKYGGFDSPTVAYSVLVVAKVEKGKSKKLKSVKELLGITIMERSSFEKNPIDFLEAKGYKEVKKDLIIKLPKYSLFELENGRKRMLASAGELQKGNELALPSKYVNFLYLASHYEKLKGSPEDNEQKQLFVEQHKHYLDEIIEQISEFSKRVILADANLDKVLSAYNKHRDKPIREQAENIIHLFTLTNLGAPAAFKYFDTTIDRKRYTSTKEVLDATLIHQSITGLYETRIDLSQLGGDGGEAAAKEAAAKEAAAKEAAAKEAAAKEAAAKGGVLNLEEEYRLHEKPVPSSIDPSWLQLFPTVWAERAGMGLANQVPPVVVELRSGASPVAVRQYPMSKEAREGIRPHIQRFLDLGVLVPCQSPWNTPLLPVKKPGTNDYRPVQDLREINKRVQDIHPTVPNPYNLLSSLPPSHTWYSVLDLKDAFFCLKLHPNSQPLFAFEWRDPEKGNTGQLTWTRLPQGFKNSPTLFNEALHRDLAPFRALNPQVVLLQYVDDLLVAAPTYRDCKEGTQKLLQELSKLGYRVSAKKAQLCQKEVTYLGYLLKEGKRWLTPARKATVMKIPPPTTPRQVREFLGTAGFCRLWIPGFASLAAPLYPLTKPSIPFIWTEEHQKAFDRIKEALLSAPALALPDLTKPFTLYVDERAGVARGVLTQTLGPWRRPVAYLSKKLDPVASGWPTCLKAVAAVALLLKDADKLTLGQNVTVIASHSLESIVRQPPDRWMTNARMTHYQSLLLNERVSFAPPAVLNPATLLPVESEATPVHRCSEILAEETGTRRDLKDQPLPGVPAWYTDGSSFIAEGKRRAGAAIVDGKRTVWASSLPEGTSAQKAELVALTQALRLAEGKDINIYTDSRYAFATAHIHGAIYKQRGWLTSAGKDIKNKEEILALLEAIHLPKRVAIIHCPGHQKGNDPVATGNRRADEAAKQAALSTRVLAETTKPAGKRTADGSEFEKRTADGSEFESPKKKAKVE

SEQ ID NO: 6469 - protein, 2115 aa, synthetic construct
MPAAKRVKLDGGDKKYSIGLDIGTNSVGWAVITDEYKVPSKKFKVLGNTDRHSIKKNLIGALLFDSGETAEATRLKRTARRRYTRRKNRICYLQEIFSNEMAKVDDSFFHRLEESFLVEEDKKHERHPIFGNIVDEVAYHEKYPTIYHLRKKLVDSTDKADLRLIYLALAHMIKFRGHFLIEGDLNPDNSDVDKLFIQLVQTYNQLFEENPINASGVDAKAILSARLSKSRRLENLIAQLPGEKKNGLFGNLIALSLGLTPNFKSNFDLAEDAKLQLSKDTYDDDLDNLLAQIGDQYADLFLAAKNLSDAILLSDILRVNTEITKAPLSASMIKRYDEHHQDLTLLKALVRQQLPEKYKEIFFDQSKNGYAGYIDGGASQEEFYKFIKPILEKMDGTEELLVKLNREDLLRKQRTFDNGSIPHQIHLGELHAILRRQEDFYPFLKDNREKIEKILTFRIPYYVGPLARGNSRFAWMTRKSEETITPWNFEEVVDKGASAQSFIERMTNFDKNLPNEKVLPKHSLLYEYFTVYNELTKVKYVTEGMRKPAFLSGEQKKAIVDLLFKTNRKVTVKQLKEDYFKKIECFDSVEISGVEDRFNASLGTYHDLLKIIKDKDFLDNEENEDILEDIVLTLTLFEDREMIEERLKTYAHLFDDKVMKQLKRRRYTGWGRLSRKLINGIRDKQSGKTILDFLKSDGFANRNFMQLIHDDSLTFKEDIQKAQVSGQGDSLHEHIANLAGSPAIKKGILQTVKVVDELVKVMGRHKPENIVIEMARENQTTQKGQKNSRERMKRIEEGIKELGSQILKEHPVENTQLQNEKLYLYYLQNGRDMYVDQELDINRLSDYDVDHIVPQSFLKDDSIDNKVLTRSDKARGKSDNVPSEEVVKKMKNYWRQLLNAKLITQRKFDNLTKAERGGLSELDKAGFIKRQLVETRQITKHVAQILDSRMNTKYDENDKLIREVKVITLKSKLVSDFRKDFQFYKVREINNYHHAHDAYLNAVVGTALIKKYPKLESEFVYGDYKVYDVRKMIAKSEQEIGKATAKYFFYSNIMNFFKTEITLANGEIRKRPLIETNGETGEIVWDKGRDFATVRKVLSMPQVNIVKKTEVQTGGFSKESILPKRNSDKLIARKKDWDPKKYGGFDSPTVAYSVLVVAKVEKGKSKKLKSVKELLGITIMERSSFEKNPIDFLEAKGYKEVKKDLIIKLPKYSLFELENGRKRMLASAGELQKGNELALPSKYVNFLYLASHYEKLKGSPEDNEQKQLFVEQHKHYLDEIIEQISEFSKRVILADANLDKVLSAYNKHRDKPIREQAENIIHLFTLTNLGAPAAFKYFDTTIDRKRYTSTKEVLDATLIHQSITGLYETRIDLSQLGGDGGEAAAKEAAAKEAAAKEAAAKEAAAKEAAAKGGTLNIEDEYRLHETSKEPDVPLGSTWLSDFPQAWAETGGMGLAVRQAPLIIPLKATSTPVSIKQYPMSQEARLGIKPHIQRLLDQGILVPCQSPWNTPLLPVKKPGTNDYRPVQDLREVNKRVEDIHPTVPNPYNLLSGLPPSHQWYTVLDLKDAFFCLRLHPTSQPLFAFEWRDPEMGISGQLTWTRLPQGFKNSPTLFDEALHRDLADFRIQHPDLILLQYVDDLLLAATSEQDCQRGTRALLQTLGNLGYRASAKKAQICQKQVKYLGYLLKEGQRWLTEARKETVMGQPTPKTPRQLREFLGTAGFCRLWIPGFAEMAAPLYPLTKTGTLFNWGPDQQKAYQEIKQALLTAPALGLPDLTKPFELFVDEKQGYAKGVLTQKLGPWRRPVAYLSKKLDPVAAGWPPCLRMVAAIAVLTKDAGKLTMGQPLVILAPHAVEALVKQPPDRWLSNARMTHYQAMLLDTDRVQFGPVVALNPATLLPLPEKEAPHDCLEILAETHGTRPDLTDQPIPDADYTWYTDGSSFLQEGQRRAGAAVTTETEVIWARALPAGTSAQRAELIALTQALKMAEGKKLNVYTDSRYAFATAHVHGEIYRRRGLLTSEGREIKNKNEILALLKALFLPKRLSIIHCPGHQKGNSAEARGNRMADQAAREAAMKAVLETSTLLAGKRTADGSEFEKRTADGSEFESPKKKAKVE

SEQ ID NO: 6470 - protein, 2115 aa, synthetic construct
MPAAKRVKLDGGDKKYSIGLDIGTNSVGWAVITDEYKVPSKKFKVLGNTDRHSIKKNLIGALLFDSGETAEATRLKRTARRRYTRRKNRICYLQEIFSNEMAKVDDSFFHRLEESFLVEEDKKHERHPIFGNIVDEVAYHEKYPTIYHLRKKLVDSTDKADLRLIYLALAHMIKFRGHFLIEGDLNPDNSDVDKLFIQLVQTYNQLFEENPINASGVDAKAILSARLSKSRRLENLIAQLPGEKKNGLFGNLIALSLGLTPNFKSNFDLAEDAKLQLSKDTYDDDLDNLLAQIGDQYADLFLAAKNLSDAILLSDILRVNTEITKAPLSASMIKRYDEHHQDLTLLKALVRQQLPEKYKEIFFDQSKNGYAGYIDGGASQEEFYKFIKPILEKMDGTEELLVKLNREDLLRKQRTFDNGSIPHQIHLGELHAILRRQEDFYPFLKDNREKIEKILTFRIPYYVGPLARGNSRFAWMTRKSEETITPWNFEEVVDKGASAQSFIERMTNFDKNLPNEKVLPKHSLLYEYFTVYNELTKVKYVTEGMRKPAFLSGEQKKAIVDLLFKTNRKVTVKQLKEDYFKKIECFDSVEISGVEDRFNASLGTYHDLLKIIKDKDFLDNEENEDILEDIVLTLTLFEDREMIEERLKTYAHLFDDKVMKQLKRRRYTGWGRLSRKLINGIRDKQSGKTILDFLKSDGFANRNFMQLIHDDSLTFKEDIQKAQVSGQGDSLHEHIANLAGSPAIKKGILQTVKVVDELVKVMGRHKPENIVIEMARENQTTQKGQKNSRERMKRIEEGIKELGSQILKEHPVENTQLQNEKLYLYYLQNGRDMYVDQELDINRLSDYDVDHIVPQSFLKDDSIDNKVLTRSDKARGKSDNVPSEEVVKKMKNYWRQLLNAKLITQRKFDNLTKAERGGLSELDKAGFIKRQLVETRQITKHVAQILDSRMNTKYDENDKLIREVKVITLKSKLVSDFRKDFQFYKVREINNYHHAHDAYLNAVVGTALIKKYPKLESEFVYGDYKVYDVRKMIAKSEQEIGKATAKYFFYSNIMNFFKTEITLANGEIRKRPLIETNGETGEIVWDKGRDFATVRKVLSMPQVNIVKKTEVQTGGFSKESILPKRNSDKLIARKKDWDPKKYGGFDSPTVAYSVLVVAKVEKGKSKKLKSVKELLGITIMERSSFEKNPIDFLEAKGYKEVKKDLIIKLPKYSLFELENGRKRMLASAGELQKGNELALPSKYVNFLYLASHYEKLKGSPEDNEQKQLFVEQHKHYLDEIIEQISEFSKRVILADANLDKVLSAYNKHRDKPIREQAENIIHLFTLTNLGAPAAFKYFDTTIDRKRYTSTKEVLDATLIHQSITGLYETRIDLSQLGGDGGEAAAKEAAAKEAAAKEAAAKEAAAKEAAAKGGTLNIEDEYRLHETSKEPDVPLGSTWLSDFPQAWAETGGMGLAVRQAPLIIPLKATSTPVSIKQYPMSQEARLGIKPHIQRLLDQGILVPCQSPWNTPLLPVKKPGTNDYRPVQDLREVNKRVEDIHPTVPNPYNLLSGLPPSHQWYTVLDLKDAFFCLRLHPTSQPLFAFEWRDPEMGISGQLTWTRLPQGFKNSPTLFNEALHRDLADFRIQHPDLILLQYVDDLLLAATSEQDCQRGTRALLQTLGNLGYRASAKKAQICQKQVKYLGYLLKEGQRWLTEARKETVMGQPTPKTPRQLREFLGTAGFCRLWIPGFAEMAAPLYPLTKPGTLFNWGPDQQKAYQEIKQALLTAPALGLPDLTKPFELFVDEKQGYAKGVLTQKLGPWRRPVAYLSKKLDPVAAGWPPCLRMVAAIAVLTKDAGKLTMGQPLVILAPHAVEALVKQPPDRWLSNARMTHYQAMLLDTDRVQFGPVVALNPATLLPLPEKEAPHDCLEILAETHGTRPDLTDQPIPDADYTWYTDGSSFLQEGQRRAGAAVTTETEVIWARALPAGTSAQRAELIALTQALKMAEGKKLNVYTDSRYAFATAHVHGEIYRRRGWLTSEGREIKNKNEILALLKALFLPKRLSIIHCPGHQKGNSAEARGNRMADQAAREAAMKAVLETSTLLAGKRTADGSEFEKRTADGSEFESPKKKAKVE

SEQ ID NO: 6471 - protein, 2094 aa, synthetic construct
MPAAKRVKLDGGDKKYSIGLDIGTNSVGWAVITDEYKVPSKKFKVLGNTDRHSIKKNLIGALLFDSGETAEATRLKRTARRRYTRRKNRICYLQEIFSNEMAKVDDSFFHRLEESFLVEEDKKHERHPIFGNIVDEVAYHEKYPTIYHLRKKLVDSTDKADLRLIYLALAHMIKFRGHFLIEGDLNPDNSDVDKLFIQLVQTYNQLFEENPINASGVDAKAILSARLSKSRRLENLIAQLPGEKKNGLFGNLIALSLGLTPNFKSNFDLAEDAKLQLSKDTYDDDLDNLLAQIGDQYADLFLAAKNLSDAILLSDILRVNTEITKAPLSASMIKRYDEHHQDLTLLKALVRQQLPEKYKEIFFDQSKNGYAGYIDGGASQEEFYKFIKPILEKMDGTEELLVKLNREDLLRKQRTFDNGSIPHQIHLGELHAILRRQEDFYPFLKDNREKIEKILTFRIPYYVGPLARGNSRFAWMTRKSEETITPWNFEEVVDKGASAQSFIERMTNFDKNLPNEKVLPKHSLLYEYFTVYNELTKVKYVTEGMRKPAFLSGEQKKAIVDLLFKTNRKVTVKQLKEDYFKKIECFDSVEISGVEDRFNASLGTYHDLLKIIKDKDFLDNEENEDILEDIVLTLTLFEDREMIEERLKTYAHLFDDKVMKQLKRRRYTGWGRLSRKLINGIRDKQSGKTILDFLKSDGFANRNFMQLIHDDSLTFKEDIQKAQVSGQGDSLHEHIANLAGSPAIKKGILQTVKVVDELVKVMGRHKPENIVIEMARENQTTQKGQKNSRERMKRIEEGIKELGSQILKEHPVENTQLQNEKLYLYYLQNGRDMYVDQELDINRLSDYDVDHIVPQSFLKDDSIDNKVLTRSDKARGKSDNVPSEEVVKKMKNYWRQLLNAKLITQRKFDNLTKAERGGLSELDKAGFIKRQLVETRQITKHVAQILDSRMNTKYDENDKLIREVKVITLKSKLVSDFRKDFQFYKVREINNYHHAHDAYLNAVVGTALIKKYPKLESEFVYGDYKVYDVRKMIAKSEQEIGKATAKYFFYSNIMNFFKTEITLANGEIRKRPLIETNGETGEIVWDKGRDFATVRKVLSMPQVNIVKKTEVQTGGFSKESILPKRNSDKLIARKKDWDPKKYGGFDSPTVAYSVLVVAKVEKGKSKKLKSVKELLGITIMERSSFEKNPIDFLEAKGYKEVKKDLIIKLPKYSLFELENGRKRMLASAGELQKGNELALPSKYVNFLYLASHYEKLKGSPEDNEQKQLFVEQHKHYLDEIIEQISEFSKRVILADANLDKVLSAYNKHRDKPIREQAENIIHLFTLTNLGAPAAFKYFDTTIDRKRYTSTKEVLDATLIHQSITGLYETRIDLSQLGGDGGPAPGGTVSLQDEHRLFDIPVTTSLPDVWLQDFPQAWAETGGLGRAKCQAPIIIDLKPTAVPVSIKQYPMSLEAHMGIRQHIIKFLELGVLRPCRSPWNTPLLPVKKPGTQDYRPVQDLREINKRTVDIHPTVPNPYNLLSTLKPDYSWYTVLDLKDAFFCLPLAPQSQELFAFEWKDPERGISGQLTWTRLPQGFKNSPTLFNEALHRDLTDFRTQHPEVTLLQYVDDLLLAAPTKKACTQGTRHLLQELGEKGYRASAKKAQICQTKVTYLGYILSEGKRWLTPGRIETVARIPPPRNPREVREFLGTAGFCRLWIPGFAELAAPLYALTKPSTPFTWQTEHQLAFEALKKALLSAPALGLPDTSKPFTLFLDERQGIAKGVLTQKLGPWKRPVAYLSKKLDPVAAGWPPCLRIMAATAMLVKDSAKLTLGQPLTVITPHTLEAIVRQPPDRWITNARLTHYQALLLDTDRVQFGPPVTLNPATLLPVPENQPSPHDCRQVLAETHGTREDLKDQELPDADHTWYTDGSSYLDSGTRRAGAAVVDGHNTIWAQSLPPGTSAQKAELIALTKALELSKGKKANIYTDSRYAFATAHTHGSIYERRGWLTSEGKEIKNKAEIIALLKALFLPQEVAIIHCPGHQKGQDPVAVGNRQADRVARQAAMAEVLTLATEPDNTSHITAGKRTADGSEFEKRTADGSEFESPKKKAKVE

SEQ ID NO: 6472 - protein, 2088 aa, synthetic construct
MPAAKRVKLDGGDKKYSIGLDIGTNSVGWAVITDEYKVPSKKFKVLGNTDRHSIKKNLIGALLFDSGETAEATRLKRTARRRYTRRKNRICYLQEIFSNEMAKVDDSFFHRLEESFLVEEDKKHERHPIFGNIVDEVAYHEKYPTIYHLRKKLVDSTDKADLRLIYLALAHMIKFRGHFLIEGDLNPDNSDVDKLFIQLVQTYNQLFEENPINASGVDAKAILSARLSKSRRLENLIAQLPGEKKNGLFGNLIALSLGLTPNFKSNFDLAEDAKLQLSKDTYDDDLDNLLAQIGDQYADLFLAAKNLSDAILLSDILRVNTEITKAPLSASMIKRYDEHHQDLTLLKALVRQQLPEKYKEIFFDQSKNGYAGYIDGGASQEEFYKFIKPILEKMDGTEELLVKLNREDLLRKQRTFDNGSIPHQIHLGELHAILRRQEDFYPFLKDNREKIEKILTFRIPYYVGPLARGNSRFAWMTRKSEETITPWNFEEVVDKGASAQSFIERMTNFDKNLPNEKVLPKHSLLYEYFTVYNELTKVKYVTEGMRKPAFLSGEQKKAIVDLLFKTNRKVTVKQLKEDYFKKIECFDSVEISGVEDRFNASLGTYHDLLKIIKDKDFLDNEENEDILEDIVLTLTLFEDREMIEERLKTYAHLFDDKVMKQLKRRRYTGWGRLSRKLINGIRDKQSGKTILDFLKSDGFANRNFMQLIHDDSLTFKEDIQKAQVSGQGDSLHEHIANLAGSPAIKKGILQTVKVVDELVKVMGRHKPENIVIEMARENQTTQKGQKNSRERMKRIEEGIKELGSQILKEHPVENTQLQNEKLYLYYLQNGRDMYVDQELDINRLSDYDVDHIVPQSFLKDDSIDNKVLTRSDKARGKSDNVPSEEVVKKMKNYWRQLLNAKLITQRKFDNLTKAERGGLSELDKAGFIKRQLVETRQITKHVAQILDSRMNTKYDENDKLIREVKVITLKSKLVSDFRKDFQFYKVREINNYHHAHDAYLNAVVGTALIKKYPKLESEFVYGDYKVYDVRKMIAKSEQEIGKATAKYFFYSNIMNFFKTEITLANGEIRKRPLIETNGETGEIVWDKGRDFATVRKVLSMPQVNIVKKTEVQTGGFSKESILPKRNSDKLIARKKDWDPKKYGGFDSPTVAYSVLVVAKVEKGKSKKLKSVKELLGITIMERSSFEKNPIDFLEAKGYKEVKKDLIIKLPKYSLFELENGRKRMLASAGELQKGNELALPSKYVNFLYLASHYEKLKGSPEDNEQKQLFVEQHKHYLDEIIEQISEFSKRVILADANLDKVLSAYNKHRDKPIREQAENIIHLFTLTNLGAPAAFKYFDTTIDRKRYTSTKEVLDATLIHQSITGLYETRIDLSQLGGDGGPAPGGTLNLEDEYRLYETSAEPEVSPGSTWLSDFPQAWAETGGMGLAVRQAPLIIPLKATSTPVSIKQYPMSQEAKLGIKPHIQRLLDQGILVPCQSPWNTPLLPVKKPGTNDYRPVQDLREVNKRVEDIHPTVPNPYNLLSGLPPSHRWYTVLDLKDAFFCLRLHPTSQPLFAFEWRDPGMGISGQLTWTRLPQGFKNSPTLFNEALHRDLADFRIQHPDLILLQYVDDILLAATSELDCQQGTRALLLTLGNLGYRASAKKAQLCQKQVKYLGYLLKEGQRWLTEARKETVMGQPTPKTPRQLREFLGKAGFCRLFIPGFAEMAAPLYPLTKPGTLFNWGPDQQKAYQEIKQALLTAPALGLPDLTKPFELFVDEKQGYAKGVLTQKLGPWRRPVAYLSKKLDPVAAGWPPCLRMVAAIAVLRKDAGKLTMGQPLVILAPHAVEALVKQPPDRWLSNARMTHYQAMLLDTDRVQFGPVVALNPATLLPLPEEGAPHDCLEILAETHGTRPDLTDQPIPDADHTWYTDGSSFLQEGQRKAGAAVTTETEVIWARALPAGTSAQRAELIALTQALKMAEGKRLNVYTDSRYAFATAHIHGEIYRRRGWLTSEGREIKNKSEILALLKALFLPKRLSIIHCLGHQKGDSAEARGNRLADQAAREAAIKTPPDTSTLLAGKRTADGSEFEKRTADGSEFESPKKKAKVE

SEQ ID NO: 6473 - protein, 2088 aa, synthetic construct
MPAAKRVKLDGGDKKYSIGLDIGTNSVGWAVITDEYKVPSKKFKVLGNTDRHSIKKNLIGALLFDSGETAEATRLKRTARRRYTRRKNRICYLQEIFSNEMAKVDDSFFHRLEESFLVEEDKKHERHPIFGNIVDEVAYHEKYPTIYHLRKKLVDSTDKADLRLIYLALAHMIKFRGHFLIEGDLNPDNSDVDKLFIQLVQTYNQLFEENPINASGVDAKAILSARLSKSRRLENLIAQLPGEKKNGLFGNLIALSLGLTPNFKSNFDLAEDAKLQLSKDTYDDDLDNLLAQIGDQYADLFLAAKNLSDAILLSDILRVNTEITKAPLSASMIKRYDEHHQDLTLLKALVRQQLPEKYKEIFFDQSKNGYAGYIDGGASQEEFYKFIKPILEKMDGTEELLVKLNREDLLRKQRTFDNGSIPHQIHLGELHAILRRQEDFYPFLKDNREKIEKILTFRIPYYVGPLARGNSRFAWMTRKSEETITPWNFEEVVDKGASAQSFIERMTNFDKNLPNEKVLPKHSLLYEYFTVYNELTKVKYVTEGMRKPAFLSGEQKKAIVDLLFKTNRKVTVKQLKEDYFKKIECFDSVEISGVEDRFNASLGTYHDLLKIIKDKDFLDNEENEDILEDIVLTLTLFEDREMIEERLKTYAHLFDDKVMKQLKRRRYTGWGRLSRKLINGIRDKQSGKTILDFLKSDGFANRNFMQLIHDDSLTFKEDIQKAQVSGQGDSLHEHIANLAGSPAIKKGILQTVKVVDELVKVMGRHKPENIVIEMARENQTTQKGQKNSRERMKRIEEGIKELGSQILKEHPVENTQLQNEKLYLYYLQNGRDMYVDQELDINRLSDYDVDHIVPQSFLKDDSIDNKVLTRSDKARGKSDNVPSEEVVKKMKNYWRQLLNAKLITQRKFDNLTKAERGGLSELDKAGFIKRQLVETRQITKHVAQILDSRMNTKYDENDKLIREVKVITLKSKLVSDFRKDFQFYKVREINNYHHAHDAYLNAVVGTALIKKYPKLESEFVYGDYKVYDVRKMIAKSEQEIGKATAKYFFYSNIMNFFKTEITLANGEIRKRPLIETNGETGEIVWDKGRDFATVRKVLSMPQVNIVKKTEVQTGGFSKESILPKRNSDKLIARKKDWDPKKYGGFDSPTVAYSVLVVAKVEKGKSKKLKSVKELLGITIMERSSFEKNPIDFLEAKGYKEVKKDLIIKLPKYSLFELENGRKRMLASAGELQKGNELALPSKYVNFLYLASHYEKLKGSPEDNEQKQLFVEQHKHYLDEIIEQISEFSKRVILADANLDKVLSAYNKHRDKPIREQAENIIHLFTLTNLGAPAAFKYFDTTIDRKRYTSTKEVLDATLIHQSITGLYETRIDLSQLGGDGGPAPGGTLGIEDEYRLHETSTEPDVSLGSTWLSDFPQAWAETGGMGLAVRQAPLIIPLKATSTPVSIQQYPMSHEARLGIKPHIQRLLDQGILVPCQSPWNTPLLPVKKPGTNDYRPVQDLREVNKRVEDIHPTVPNPYNLLSGLPPSHQWYTVLDLKDAFFCLRLHPTSQPLFAFEWRDPGMGISGQLTWTRLPQGFKNSPTLFNEALHRDLADFRIQHPDLILLQYVDDILLAATSELDCQQGTRALLQTLGDLGYRASAKKAQICQKQVKYLGYLLREGQRWLTEARKETVMGQPVPKTPRQLREFLGTAGFCRLWIPGFAEMAAPLYPLTKPGTLFSWGPDQQKAYQEIKQALLTAPALGLPDLTKPFELFVDEKQGYAKGVLTQKLGPWRRPVAYLSKKLDPVAAGWPPCLRMVAAIAVLTKDAGKLTMGQPLVILAPHAVEALVKQPPDRWLSNARMTHYQAMLLDTDRVQFGPVVALNPATLLPLPEEGAPHDCLEILAETHGTRPDLTDQPIPDADHTWYTDGSSFLQEGQRKAGAAVTTETEVIWAGALPAGTSAQRAELIALTQALKMAEGKRLNVYTDSRYAFATAHIHGEIYRRRGWLTSEGREIKNKSEILALLKALFLPKRLSIIHCLGHQKGDSAEARGNRLADQAAREAAIKTPPDTSTLLAGKRTADGSEFEKRTADGSEFESPKKKAKVE

SEQ ID NO: 6474 - protein, 2088 aa, synthetic construct
MPAAKRVKLDGGDKKYSIGLDIGTNSVGWAVITDEYKVPSKKFKVLGNTDRHSIKKNLIGALLFDSGETAEATRLKRTARRRYTRRKNRICYLQEIFSNEMAKVDDSFFHRLEESFLVEEDKKHERHPIFGNIVDEVAYHEKYPTIYHLRKKLVDSTDKADLRLIYLALAHMIKFRGHFLIEGDLNPDNSDVDKLFIQLVQTYNQLFEENPINASGVDAKAILSARLSKSRRLENLIAQLPGEKKNGLFGNLIALSLGLTPNFKSNFDLAEDAKLQLSKDTYDDDLDNLLAQIGDQYADLFLAAKNLSDAILLSDILRVNTEITKAPLSASMIKRYDEHHQDLTLLKALVRQQLPEKYKEIFFDQSKNGYAGYIDGGASQEEFYKFIKPILEKMDGTEELLVKLNREDLLRKQRTFDNGSIPHQIHLGELHAILRRQEDFYPFLKDNREKIEKILTFRIPYYVGPLARGNSRFAWMTRKSEETITPWNFEEVVDKGASAQSFIERMTNFDKNLPNEKVLPKHSLLYEYFTVYNELTKVKYVTEGMRKPAFLSGEQKKAIVDLLFKTNRKVTVKQLKEDYFKKIECFDSVEISGVEDRFNASLGTYHDLLKIIKDKDFLDNEENEDILEDIVLTLTLFEDREMIEERLKTYAHLFDDKVMKQLKRRRYTGWGRLSRKLINGIRDKQSGKTILDFLKSDGFANRNFMQLIHDDSLTFKEDIQKAQVSGQGDSLHEHIANLAGSPAIKKGILQTVKVVDELVKVMGRHKPENIVIEMARENQTTQKGQKNSRERMKRIEEGIKELGSQILKEHPVENTQLQNEKLYLYYLQNGRDMYVDQELDINRLSDYDVDHIVPQSFLKDDSIDNKVLTRSDKARGKSDNVPSEEVVKKMKNYWRQLLNAKLITQRKFDNLTKAERGGLSELDKAGFIKRQLVETRQITKHVAQILDSRMNTKYDENDKLIREVKVITLKSKLVSDFRKDFQFYKVREINNYHHAHDAYLNAVVGTALIKKYPKLESEFVYGDYKVYDVRKMIAKSEQEIGKATAKYFFYSNIMNFFKTEITLANGEIRKRPLIETNGETGEIVWDKGRDFATVRKVLSMPQVNIVKKTEVQTGGFSKESILPKRNSDKLIARKKDWDPKKYGGFDSPTVAYSVLVVAKVEKGKSKKLKSVKELLGITIMERSSFEKNPIDFLEAKGYKEVKKDLIIKLPKYSLFELENGRKRMLASAGELQKGNELALPSKYVNFLYLASHYEKLKGSPEDNEQKQLFVEQHKHYLDEIIEQISEFSKRVILADANLDKVLSAYNKHRDKPIREQAENIIHLFTLTNLGAPAAFKYFDTTIDRKRYTSTKEVLDATLIHQSITGLYETRIDLSQLGGDGGPAPGGTLNIEDEYRLHETSKGPDVPLGSTWLSDFPQAWAETGGMGLAVRQAPLIIPLKATSTPVSIKQYPMSQEARLGIKPHIQRLLDQGILVPCQSPWNTPLLPVKKPGTNDYRPVQDLREVNKRVEDIHPTVPNPYNLLSGLPPSHQWYTVLDLKDAFFCLRLHPTSQSLFAFEWRDPEMGISGQLTWTRLPQGFKNSPTLFDEALHRDLADFRIQHPDLILLQYVDDLLLAATSELDCQQGTRALLQTLGDLGYRASAKKAQICQKQVKYLGYLLKEGQRWLTEARKETVMGQPTPKTPRQLREFLGTAGFCRLWIPGFAEMAAPLYPLTKTGTLFEWGPDQQKAYQEIKQALLTAPALGLPDLTKPFELFVDEKQGYAKGVLTQKLGPWRRPVAYLSKKLDPVAAGWPPCLRMVAAIAVLTKDAGKLTMGQPLVILAPHAVEALVKQPPDRWLSNARMTHYQALLLDTDRVQFGPIVALNPATLLPLPEEGLQHDCLDILAEAHGTRPDLTDQPLPDADHTWYTDGSSFLQEGQRKAGAAVTTETEVVWAKALPAGTSAQRAELIALTQALKMAEGKKLNVYTDSRYAFATAHIHGEIYRRRGLLTSEGKEIKNKDEILALLKALFLPKRLSIIHCPGHQKGNRAEARGNRMADQAAREVATRETPETSTLLAGKRTADGSEFEKRTADGSEFESPKKKAKVE

SEQ ID NO: 6475 - protein, 2088 aa, synthetic construct
MPAAKRVKLDGGDKKYSIGLDIGTNSVGWAVITDEYKVPSKKFKVLGNTDRHSIKKNLIGALLFDSGETAEATRLKRTARRRYTRRKNRICYLQEIFSNEMAKVDDSFFHRLEESFLVEEDKKHERHPIFGNIVDEVAYHEKYPTIYHLRKKLVDSTDKADLRLIYLALAHMIKFRGHFLIEGDLNPDNSDVDKLFIQLVQTYNQLFEENPINASGVDAKAILSARLSKSRRLENLIAQLPGEKKNGLFGNLIALSLGLTPNFKSNFDLAEDAKLQLSKDTYDDDLDNLLAQIGDQYADLFLAAKNLSDAILLSDILRVNTEITKAPLSASMIKRYDEHHQDLTLLKALVRQQLPEKYKEIFFDQSKNGYAGYIDGGASQEEFYKFIKPILEKMDGTEELLVKLNREDLLRKQRTFDNGSIPHQIHLGELHAILRRQEDFYPFLKDNREKIEKILTFRIPYYVGPLARGNSRFAWMTRKSEETITPWNFEEVVDKGASAQSFIERMTNFDKNLPNEKVLPKHSLLYEYFTVYNELTKVKYVTEGMRKPAFLSGEQKKAIVDLLFKTNRKVTVKQLKEDYFKKIECFDSVEISGVEDRFNASLGTYHDLLKIIKDKDFLDNEENEDILEDIVLTLTLFEDREMIEERLKTYAHLFDDKVMKQLKRRRYTGWGRLSRKLINGIRDKQSGKTILDFLKSDGFANRNFMQLIHDDSLTFKEDIQKAQVSGQGDSLHEHIANLAGSPAIKKGILQTVKVVDELVKVMGRHKPENIVIEMARENQTTQKGQKNSRERMKRIEEGIKELGSQILKEHPVENTQLQNEKLYLYYLQNGRDMYVDQELDINRLSDYDVDHIVPQSFLKDDSIDNKVLTRSDKARGKSDNVPSEEVVKKMKNYWRQLLNAKLITQRKFDNLTKAERGGLSELDKAGFIKRQLVETRQITKHVAQILDSRMNTKYDENDKLIREVKVITLKSKLVSDFRKDFQFYKVREINNYHHAHDAYLNAVVGTALIKKYPKLESEFVYGDYKVYDVRKMIAKSEQEIGKATAKYFFYSNIMNFFKTEITLANGEIRKRPLIETNGETGEIVWDKGRDFATVRKVLSMPQVNIVKKTEVQTGGFSKESILPKRNSDKLIARKKDWDPKKYGGFDSPTVAYSVLVVAKVEKGKSKKLKSVKELLGITIMERSSFEKNPIDFLEAKGYKEVKKDLIIKLPKYSLFELENGRKRMLASAGELQKGNELALPSKYVNFLYLASHYEKLKGSPEDNEQKQLFVEQHKHYLDEIIEQISEFSKRVILADANLDKVLSAYNKHRDKPIREQAENIIHLFTLTNLGAPAAFKYFDTTIDRKRYTSTKEVLDATLIHQSITGLYETRIDLSQLGGDGGPAPGGTLNIEDEYRLHEISTEPDVSPGSTWLSDFPQAWAETGGMGLAVRQAPLIIPLKATSTPVSIKQYPMSQEAKLGIKPHIQRLLDQGILVPCQSPWNTPLLPVKKPGTNDYRPVQGLREVNKRVEDIHPTVPNPYNLLSGLPTSHRWYTVLDLKDAFFCLRLHPTSQPLFASEWRDPGMGISGQLTWTRLPQGFKNSPTLFNEALHRGLADFRIQHPDLILLQYVDDLLLAATSELDCQQGTRALLKTLGNLGYRASAKKAQICQKQVKYLGYLLREGQRWLTEARKETVMGQPTPKTPRQLREFLGTAGFCRLWIPRFAEMAAPLYPLTKPGTLFNWGPDQQKAYHEIKQALLTAPALGLPDLTKPFELFVDEKQGYAKGVLTQKLGPWRRPVAYLSKKLDPVAAGWPPCLRMVAAIAVLTKDAGKLTMGQPLVILAPHAVEALVKQPPDRWLSNARMTHYQAMLLDTDRVQFGPVVALNPATLLPLPEEGAPHDCLEILAETHGTEPDLTDQPIPDADHTWYTDGSSFLQEGQRKAGAAVTTETEVIWARALPAGTSAQRAELIALTQALKMAEGKRLNVYTDSRYAFATAHIHGEIYKRRGWLTSEGREIKNKSEILALLKALFLPKRLSIIHCLGHQKGDSAEARGNRLADQAAREAAIKTPPDTSTLLAGKRTADGSEFEKRTADGSEFESPKKKAKVE

SEQ ID NO: 6476 - protein, 2082 aa, synthetic construct
MPAAKRVKLDGGDKKYSIGLDIGTNSVGWAVITDEYKVPSKKFKVLGNTDRHSIKKNLIGALLFDSGETAEATRLKRTARRRYTRRKNRICYLQEIFSNEMAKVDDSFFHRLEESFLVEEDKKHERHPIFGNIVDEVAYHEKYPTIYHLRKKLVDSTDKADLRLIYLALAHMIKFRGHFLIEGDLNPDNSDVDKLFIQLVQTYNQLFEENPINASGVDAKAILSARLSKSRRLENLIAQLPGEKKNGLFGNLIALSLGLTPNFKSNFDLAEDAKLQLSKDTYDDDLDNLLAQIGDQYADLFLAAKNLSDAILLSDILRVNTEITKAPLSASMIKRYDEHHQDLTLLKALVRQQLPEKYKEIFFDQSKNGYAGYIDGGASQEEFYKFIKPILEKMDGTEELLVKLNREDLLRKQRTFDNGSIPHQIHLGELHAILRRQEDFYPFLKDNREKIEKILTFRIPYYVGPLARGNSRFAWMTRKSEETITPWNFEEVVDKGASAQSFIERMTNFDKNLPNEKVLPKHSLLYEYFTVYNELTKVKYVTEGMRKPAFLSGEQKKAIVDLLFKTNRKVTVKQLKEDYFKKIECFDSVEISGVEDRFNASLGTYHDLLKIIKDKDFLDNEENEDILEDIVLTLTLFEDREMIEERLKTYAHLFDDKVMKQLKRRRYTGWGRLSRKLINGIRDKQSGKTILDFLKSDGFANRNFMQLIHDDSLTFKEDIQKAQVSGQGDSLHEHIANLAGSPAIKKGILQTVKVVDELVKVMGRHKPENIVIEMARENQTTQKGQKNSRERMKRIEEGIKELGSQILKEHPVENTQLQNEKLYLYYLQNGRDMYVDQELDINRLSDYDVDHIVPQSFLKDDSIDNKVLTRSDKARGKSDNVPSEEVVKKMKNYWRQLLNAKLITQRKFDNLTKAERGGLSELDKAGFIKRQLVETRQITKHVAQILDSRMNTKYDENDKLIREVKVITLKSKLVSDFRKDFQFYKVREINNYHHAHDAYLNAVVGTALIKKYPKLESEFVYGDYKVYDVRKMIAKSEQEIGKATAKYFFYSNIMNFFKTEITLANGEIRKRPLIETNGETGEIVWDKGRDFATVRKVLSMPQVNIVKKTEVQTGGFSKESILPKRNSDKLIARKKDWDPKKYGGFDSPTVAYSVLVVAKVEKGKSKKLKSVKELLGITIMERSSFEKNPIDFLEAKGYKEVKKDLIIKLPKYSLFELENGRKRMLASAGELQKGNELALPSKYVNFLYLASHYEKLKGSPEDNEQKQLFVEQHKHYLDEIIEQISEFSKRVILADANLDKVLSAYNKHRDKPIREQAENIIHLFTLTNLGAPAAFKYFDTTIDRKRYTSTKEVLDATLIHQSITGLYETRIDLSQLGGDGGPAPGGTLQLDDEYRLYSPLVKPDQNIQFWLEQFPQAWAETAGMGLAKQVPPQVIQLKASATPVSVRQYPLSKEAQEGIRPHVQRLIQQGILVPVQSPWNTPLLPVRKPGTNDYRPVQDLREVNKRVQDIHPTVPNPYNLLCALPPQRSWYTVLDLKDAFFCLRLHPTSQPLFAFEWRDPGTGRTGQLTWTRLPQGFKNSPTIFDEALHRDLANFRIQHPQVTLLQYVDDLLLAGATKQDCLEGTKALLLELSDLGYRASAKKAQICRREVTYLGYSLRDGQRWLTEARKKTVVQIPAPTTAKQVREFLGTAGFCRLWIPGFATLAAPLYPLTKEKGEFSWAPEHQKAFDAIKKALLSAPALALPDVTKPFTLYVDERKGVARGVLTQTLGPWRRPVAYLSKKLDPVASGWPVCLKAIAAVAILVKDADKLTLGQNITVIAPHALENIVRQPPDRWMTNARMTHYQSLLLTERVTFAPPAALNPATLLPEETDEPVTHDCHQLLIEETGVRKDLTDIPLTGEVLTWFTDGSSYVVEGKRMAGAAVVDGTRTIWASSLPEGTSAQKAELMALTQALRLAEGKSINIYTDSRYAFATAHVHGAIYKQRGLLTSAGREIKNKEEILSLLEALHLPKRLAIIHCPGHQKAKDPISRGNQMADRVAKQAAQGVNLLAGKRTADGSEFEKRTADGSEFESPKKKAKVE

SEQ ID NO: 6477 - protein, 2168 aa, synthetic construct
MPAAKRVKLDGGDKKYSIGLDIGTNSVGWAVITDEYKVPSKKFKVLGNTDRHSIKKNLIGALLFDSGETAEATRLKRTARRRYTRRKNRICYLQEIFSNEMAKVDDSFFHRLEESFLVEEDKKHERHPIFGNIVDEVAYHEKYPTIYHLRKKLVDSTDKADLRLIYLALAHMIKFRGHFLIEGDLNPDNSDVDKLFIQLVQTYNQLFEENPINASGVDAKAILSARLSKSRRLENLIAQLPGEKKNGLFGNLIALSLGLTPNFKSNFDLAEDAKLQLSKDTYDDDLDNLLAQIGDQYADLFLAAKNLSDAILLSDILRVNTEITKAPLSASMIKRYDEHHQDLTLLKALVRQQLPEKYKEIFFDQSKNGYAGYIDGGASQEEFYKFIKPILEKMDGTEELLVKLNREDLLRKQRTFDNGSIPHQIHLGELHAILRRQEDFYPFLKDNREKIEKILTFRIPYYVGPLARGNSRFAWMTRKSEETITPWNFEEVVDKGASAQSFIERMTNFDKNLPNEKVLPKHSLLYEYFTVYNELTKVKYVTEGMRKPAFLSGEQKKAIVDLLFKTNRKVTVKQLKEDYFKKIECFDSVEISGVEDRFNASLGTYHDLLKIIKDKDFLDNEENEDILEDIVLTLTLFEDREMIEERLKTYAHLFDDKVMKQLKRRRYTGWGRLSRKLINGIRDKQSGKTILDFLKSDGFANRNFMQLIHDDSLTFKEDIQKAQVSGQGDSLHEHIANLAGSPAIKKGILQTVKVVDELVKVMGRHKPENIVIEMARENQTTQKGQKNSRERMKRIEEGIKELGSQILKEHPVENTQLQNEKLYLYYLQNGRDMYVDQELDINRLSDYDVDHIVPQSFLKDDSIDNKVLTRSDKARGKSDNVPSEEVVKKMKNYWRQLLNAKLITQRKFDNLTKAERGGLSELDKAGFIKRQLVETRQITKHVAQILDSRMNTKYDENDKLIREVKVITLKSKLVSDFRKDFQFYKVREINNYHHAHDAYLNAVVGTALIKKYPKLESEFVYGDYKVYDVRKMIAKSEQEIGKATAKYFFYSNIMNFFKTEITLANGEIRKRPLIETNGETGEIVWDKGRDFATVRKVLSMPQVNIVKKTEVQTGGFSKESILPKRNSDKLIARKKDWDPKKYGGFDSPTVAYSVLVVAKVEKGKSKKLKSVKELLGITIMERSSFEKNPIDFLEAKGYKEVKKDLIIKLPKYSLFELENGRKRMLASAGELQKGNELALPSKYVNFLYLASHYEKLKGSPEDNEQKQLFVEQHKHYLDEIIEQISEFSKRVILADANLDKVLSAYNKHRDKPIREQAENIIHLFTLTNLGAPAAFKYFDTTIDRKRYTSTKEVLDATLIHQSITGLYETRIDLSQLGGDGGPAPGGMDPLQLLQPLEAEIKGTKLKAHWNSGATITCVPQAFLEEEVPIKNIWIKTIHGEKEQPVYYLTFKIQGRKVEAEVISSPYDYILVSPSDIPWLMKKPLQLTTLVPLQEYEERLLKQTMLTGSYKEKLQSLFLKYDALWQHWENQVGHRRIKPHHIATGTVNPRPQKQYPINPKAKASIQTVINDLLKQGVLIQQNSIMNTPVYPVPKPDGKWRMVLDYREVNKTIPLIAAQNQHSAGILSSIFRGKYKTTLDLSNGFWAHSITPESYWLTAFTWLGQQYCWTRLPQGFLNSPALFNADVVDLLKEVPNVQVYVDDIYISHDDPREHLEQLEKVFSLLLNAGYVVSLKKSEIAQHEVEFLGFNITKEGRGLTETFKQKLLNITPPRDLKQLQSILGKLNFARNFIPNFSELVKPLYNIIATAPGKYITWTTDNSQQLQNIISMLNSAENLEERNPEVRLIMKVNTSPSAGYIRFYNEFAKRPIMYLNYVYTKAEVKFTNTEKLLTTIHKGLIKALDLGMGQEILVYSPIVSMTKIQKTPLPERKALPIRWITWMSYLEDPRIQFHYDKTLPELQQVPTVTDDIIAKIKHPSEFSMVFYTDGSAIKHPNVNKSHNAGMGIAQVQFKPEFTVINTWSIPLGDHTAQLAEVAAVEFACKKALKIDGPVLIVTDSFYVAESVNKELPYWQSNGFFNNKKKPLKHVSKWKSIADCIQLKPDIIIIHEKGHQPTASTFHTEGNNLADKLATQGSYVVNAGKRTADGSEFEKRTADGSEFESPKKKAKVE

SEQ ID NO: 6478 - protein, 2086 aa, synthetic construct
MPAAKRVKLDGGDKKYSIGLDIGTNSVGWAVITDEYKVPSKKFKVLGNTDRHSIKKNLIGALLFDSGETAEATRLKRTARRRYTRRKNRICYLQEIFSNEMAKVDDSFFHRLEESFLVEEDKKHERHPIFGNIVDEVAYHEKYPTIYHLRKKLVDSTDKADLRLIYLALAHMIKFRGHFLIEGDLNPDNSDVDKLFIQLVQTYNQLFEENPINASGVDAKAILSARLSKSRRLENLIAQLPGEKKNGLFGNLIALSLGLTPNFKSNFDLAEDAKLQLSKDTYDDDLDNLLAQIGDQYADLFLAAKNLSDAILLSDILRVNTEITKAPLSASMIKRYDEHHQDLTLLKALVRQQLPEKYKEIFFDQSKNGYAGYIDGGASQEEFYKFIKPILEKMDGTEELLVKLNREDLLRKQRTFDNGSIPHQIHLGELHAILRRQEDFYPFLKDNREKIEKILTFRIPYYVGPLARGNSRFAWMTRKSEETITPWNFEEVVDKGASAQSFIERMTNFDKNLPNEKVLPKHSLLYEYFTVYNELTKVKYVTEGMRKPAFLSGEQKKAIVDLLFKTNRKVTVKQLKEDYFKKIECFDSVEISGVEDRFNASLGTYHDLLKIIKDKDFLDNEENEDILEDIVLTLTLFEDREMIEERLKTYAHLFDDKVMKQLKRRRYTGWGRLSRKLINGIRDKQSGKTILDFLKSDGFANRNFMQLIHDDSLTFKEDIQKAQVSGQGDSLHEHIANLAGSPAIKKGILQTVKVVDELVKVMGRHKPENIVIEMARENQTTQKGQKNSRERMKRIEEGIKELGSQILKEHPVENTQLQNEKLYLYYLQNGRDMYVDQELDINRLSDYDVDHIVPQSFLKDDSIDNKVLTRSDKARGKSDNVPSEEVVKKMKNYWRQLLNAKLITQRKFDNLTKAERGGLSELDKAGFIKRQLVETRQITKHVAQILDSRMNTKYDENDKLIREVKVITLKSKLVSDFRKDFQFYKVREINNYHHAHDAYLNAVVGTALIKKYPKLESEFVYGDYKVYDVRKMIAKSEQEIGKATAKYFFYSNIMNFFKTEITLANGEIRKRPLIETNGETGEIVWDKGRDFATVRKVLSMPQVNIVKKTEVQTGGFSKESILPKRNSDKLIARKKDWDPKKYGGFDSPTVAYSVLVVAKVEKGKSKKLKSVKELLGITIMERSSFEKNPIDFLEAKGYKEVKKDLIIKLPKYSLFELENGRKRMLASAGELQKGNELALPSKYVNFLYLASHYEKLKGSPEDNEQKQLFVEQHKHYLDEIIEQISEFSKRVILADANLDKVLSAYNKHRDKPIREQAENIIHLFTLTNLGAPAAFKYFDTTIDRKRYTSTKEVLDATLIHQSITGLYETRIDLSQLGGDGGPAPGGVLNLEEEYRLHEKPVPSSIDPSWLQLFPTVWAERAGMGLANQVPPVVVELRSGASPVAVRQYPMSKEAREGIRPHIQRFLDLGVLVPCQSPWNTPLLPVKKPGTNDYRPVQDLREINKRVQDIHPTVPNPYNLLSSLPPSHTWYSVLDLKDAFFCLKLHPNSQPLFAFEWRDPEKGNTGQLTWTRLPQGFKNSPTLFNEALHRDLAPFRALNPQVVLLQYVDDLLVAAPTYRDCKEGTQKLLQELSKLGYRVSAKKAQLCQKEVTYLGYLLKEGKRWLTPARKATVMKIPPPTTPRQVREFLGTAGFCRLWIPGFASLAAPLYPLTKPSIPFIWTEEHQKAFDRIKEALLSAPALALPDLTKPFTLYVDERAGVARGVLTQTLGPWRRPVAYLSKKLDPVASGWPTCLKAVAAVALLLKDADKLTLGQNVTVIASHSLESIVRQPPDRWMTNARMTHYQSLLLNERVSFAPPAVLNPATLLPVESEATPVHRCSEILAEETGTRRDLKDQPLPGVPAWYTDGSSFIAEGKRRAGAAIVDGKRTVWASSLPEGTSAQKAELVALTQALRLAEGKDINIYTDSRYAFATAHIHGAIYKQRGWLTSAGKDIKNKEEILALLEAIHLPKRVAIIHCPGHQKGNDPVATGNRRADEAAKQAALSTRVLAETTKPAGKRTADGSEFEKRTADGSEFESPKKKAKVE

SEQ ID NO: 6479 - protein, 2086 aa, synthetic construct
MPAAKRVKLDGGDKKYSIGLDIGTNSVGWAVITDEYKVPSKKFKVLGNTDRHSIKKNLIGALLFDSGETAEATRLKRTARRRYTRRKNRICYLQEIFSNEMAKVDDSFFHRLEESFLVEEDKKHERHPIFGNIVDEVAYHEKYPTIYHLRKKLVDSTDKADLRLIYLALAHMIKFRGHFLIEGDLNPDNSDVDKLFIQLVQTYNQLFEENPINASGVDAKAILSARLSKSRRLENLIAQLPGEKKNGLFGNLIALSLGLTPNFKSNFDLAEDAKLQLSKDTYDDDLDNLLAQIGDQYADLFLAAKNLSDAILLSDILRVNTEITKAPLSASMIKRYDEHHQDLTLLKALVRQQLPEKYKEIFFDQSKNGYAGYIDGGASQEEFYKFIKPILEKMDGTEELLVKLNREDLLRKQRTFDNGSIPHQIHLGELHAILRRQEDFYPFLKDNREKIEKILTFRIPYYVGPLARGNSRFAWMTRKSEETITPWNFEEVVDKGASAQSFIERMTNFDKNLPNEKVLPKHSLLYEYFTVYNELTKVKYVTEGMRKPAFLSGEQKKAIVDLLFKTNRKVTVKQLKEDYFKKIECFDSVEISGVEDRFNASLGTYHDLLKIIKDKDFLDNEENEDILEDIVLTLTLFEDREMIEERLKTYAHLFDDKVMKQLKRRRYTGWGRLSRKLINGIRDKQSGKTILDFLKSDGFANRNFMQLIHDDSLTFKEDIQKAQVSGQGDSLHEHIANLAGSPAIKKGILQTVKVVDELVKVMGRHKPENIVIEMARENQTTQKGQKNSRERMKRIEEGIKELGSQILKEHPVENTQLQNEKLYLYYLQNGRDMYVDQELDINRLSDYDVDHIVPQSFLKDDSIDNKVLTRSDKARGKSDNVPSEEVVKKMKNYWRQLLNAKLITQRKFDNLTKAERGGLSELDKAGFIKRQLVETRQITKHVAQILDSRMNTKYDENDKLIREVKVITLKSKLVSDFRKDFQFYKVREINNYHHAHDAYLNAVVGTALIKKYPKLESEFVYGDYKVYDVRKMIAKSEQEIGKATAKYFFYSNIMNFFKTEITLANGEIRKRPLIETNGETGEIVWDKGRDFATVRKVLSMPQVNIVKKTEVQTGGFSKESILPKRNSDKLIARKKDWDPKKYGGFDSPTVAYSVLVVAKVEKGKSKKLKSVKELLGITIMERSSFEKNPIDFLEAKGYKEVKKDLIIKLPKYSLFELENGRKRMLASAGELQKGNELALPSKYVNFLYLASHYEKLKGSPEDNEQKQLFVEQHKHYLDEIIEQISEFSKRVILADANLDKVLSAYNKHRDKPIREQAENIIHLFTLTNLGAPAAFKYFDTTIDRKRYTSTKEVLDATLIHQSITGLYETRIDLSQLGGDGGPAPGGVLNLEEEYRLHEKPVPSSIDPSWLQLFPTVWAERAGMGLANQVPPVVVELRSGASPVAVRQYPMSKEAREGIRPHIQRFLDLGVLVPCQSPWNTPLLPVKKPGTNDYRPVQDLREINKRVQDIHPTVPNPYNLLSSLPPSHTWYSVLDLKDAFFCLKLHPNSQPLFAFEWRDPEKGNTGQLTWTRLPQGFKNSPTLFNEALHRDLAPFRALNPQVVLLQYVDDLLVAAPTYRDCKEGTQKLLQELSKLGYRVSAKKAQLCQKEVTYLGYLLKEGKRWLTPARKATVMKIPPPTTPRQVREFLGKAGFCRLFIPGFASLAAPLYPLTKPSIPFIWTEEHQKAFDRIKEALLSAPALALPDLTKPFTLYVDERAGVARGVLTQTLGPWRRPVAYLSKKLDPVASGWPTCLKAVAAVALLLKDADKLTLGQNVTVIASHSLESIVRQPPDRWMTNARMTHYQSLLLNERVSFAPPAVLNPATLLPVESEATPVHRCSEILAEETGTRRDLKDQPLPGVPAWYTDGSSFIAEGKRRAGAAIVDGKRTVWASSLPEGTSAQKAELVALTQALRLAEGKDINIYTDSRYAFATAHIHGAIYKQRGWLTSAGKDIKNKEEILALLEAIHLPKRVAIIHCPGHQKGNDPVATGNRRADEAAKQAALSTRVLAETTKPAGKRTADGSEFEKRTADGSEFESPKKKAKVE

SEQ ID NO: 6480 - protein, 2088 aa, synthetic construct
MPAAKRVKLDGGDKKYSIGLDIGTNSVGWAVITDEYKVPSKKFKVLGNTDRHSIKKNLIGALLFDSGETAEATRLKRTARRRYTRRKNRICYLQEIFSNEMAKVDDSFFHRLEESFLVEEDKKHERHPIFGNIVDEVAYHEKYPTIYHLRKKLVDSTDKADLRLIYLALAHMIKFRGHFLIEGDLNPDNSDVDKLFIQLVQTYNQLFEENPINASGVDAKAILSARLSKSRRLENLIAQLPGEKKNGLFGNLIALSLGLTPNFKSNFDLAEDAKLQLSKDTYDDDLDNLLAQIGDQYADLFLAAKNLSDAILLSDILRVNTEITKAPLSASMIKRYDEHHQDLTLLKALVRQQLPEKYKEIFFDQSKNGYAGYIDGGASQEEFYKFIKPILEKMDGTEELLVKLNREDLLRKQRTFDNGSIPHQIHLGELHAILRRQEDFYPFLKDNREKIEKILTFRIPYYVGPLARGNSRFAWMTRKSEETITPWNFEEVVDKGASAQSFIERMTNFDKNLPNEKVLPKHSLLYEYFTVYNELTKVKYVTEGMRKPAFLSGEQKKAIVDLLFKTNRKVTVKQLKEDYFKKIECFDSVEISGVEDRFNASLGTYHDLLKIIKDKDFLDNEENEDILEDIVLTLTLFEDREMIEERLKTYAHLFDDKVMKQLKRRRYTGWGRLSRKLINGIRDKQSGKTILDFLKSDGFANRNFMQLIHDDSLTFKEDIQKAQVSGQGDSLHEHIANLAGSPAIKKGILQTVKVVDELVKVMGRHKPENIVIEMARENQTTQKGQKNSRERMKRIEEGIKELGSQILKEHPVENTQLQNEKLYLYYLQNGRDMYVDQELDINRLSDYDVDHIVPQSFLKDDSIDNKVLTRSDKARGKSDNVPSEEVVKKMKNYWRQLLNAKLITQRKFDNLTKAERGGLSELDKAGFIKRQLVETRQITKHVAQILDSRMNTKYDENDKLIREVKVITLKSKLVSDFRKDFQFYKVREINNYHHAHDAYLNAVVGTALIKKYPKLESEFVYGDYKVYDVRKMIAKSEQEIGKATAKYFFYSNIMNFFKTEITLANGEIRKRPLIETNGETGEIVWDKGRDFATVRKVLSMPQVNIVKKTEVQTGGFSKESILPKRNSDKLIARKKDWDPKKYGGFDSPTVAYSVLVVAKVEKGKSKKLKSVKELLGITIMERSSFEKNPIDFLEAKGYKEVKKDLIIKLPKYSLFELENGRKRMLASAGELQKGNELALPSKYVNFLYLASHYEKLKGSPEDNEQKQLFVEQHKHYLDEIIEQISEFSKRVILADANLDKVLSAYNKHRDKPIREQAENIIHLFTLTNLGAPAAFKYFDTTIDRKRYTSTKEVLDATLIHQSITGLYETRIDLSQLGGDGGPAPGGTLNIEDEYRLHETSKEPDVPLGSTWLSDFPQAWAETGGMGLAVRQAPLIIPLKATSTPVSIKQYPMSQEARLGIKPHIQRLLDQGILVPCQSPWNTPLLPVKKPGTNDYRPVQDLREVNKRVEDIHPTVPNPYNLLSGLPPSHQWYTVLDLKDAFFCLRLHPTSQPLFAFEWRDPEMGISGQLTWTRLPQGFKNSPTLFNEALHRDLADFRIQHPDLILLQYVDDLLLAATSEQDCQRGTRALLQTLGNLGYRASAKKAQICQKQVKYLGYLLKEGQRWLTEARKETVMGQPTPKTPRQLREFLGKAGFCRLFIPGFAEMAAPLYPLTKPGTLFNWGPDQQKAYQEIKQALLTAPALGLPDLTKPFELFVDEKQGYAKGVLTQKLGPWRRPVAYLSKKLDPVAAGWPPCLRMVAAIAVLTKDAGKLTMGQPLVILAPHAVEALVKQPPDRWLSNARMTHYQAMLLDTDRVQFGPVVALNPATLLPLPEKEAPHDCLEILAETHGTRPDLTDQPIPDADYTWYTDGSSFLQEGQRRAGAAVTTETEVIWARALPAGTSAQRAELIALTQALKMAEGKKLNVYTDSRYAFATAHVHGEIYRRRGWLTSEGREIKNKNEILALLKALFLPKRLSIIHCPGHQKGNSAEARGNRMADQAAREAAMKAVLETSTLLAGKRTADGSEFEKRTADGSEFESPKKKAKVE

SEQ ID NO: 6481 - protein, 2167 aa, synthetic construct
MPAAKRVKLDGGDKKYSIGLDIGTNSVGWAVITDEYKVPSKKFKVLGNTDRHSIKKNLIGALLFDSGETAEATRLKRTARRRYTRRKNRICYLQEIFSNEMAKVDDSFFHRLEESFLVEEDKKHERHPIFGNIVDEVAYHEKYPTIYHLRKKLVDSTDKADLRLIYLALAHMIKFRGHFLIEGDLNPDNSDVDKLFIQLVQTYNQLFEENPINASGVDAKAILSARLSKSRRLENLIAQLPGEKKNGLFGNLIALSLGLTPNFKSNFDLAEDAKLQLSKDTYDDDLDNLLAQIGDQYADLFLAAKNLSDAILLSDILRVNTEITKAPLSASMIKRYDEHHQDLTLLKALVRQQLPEKYKEIFFDQSKNGYAGYIDGGASQEEFYKFIKPILEKMDGTEELLVKLNREDLLRKQRTFDNGSIPHQIHLGELHAILRRQEDFYPFLKDNREKIEKILTFRIPYYVGPLARGNSRFAWMTRKSEETITPWNFEEVVDKGASAQSFIERMTNFDKNLPNEKVLPKHSLLYEYFTVYNELTKVKYVTEGMRKPAFLSGEQKKAIVDLLFKTNRKVTVKQLKEDYFKKIECFDSVEISGVEDRFNASLGTYHDLLKIIKDKDFLDNEENEDILEDIVLTLTLFEDREMIEERLKTYAHLFDDKVMKQLKRRRYTGWGRLSRKLINGIRDKQSGKTILDFLKSDGFANRNFMQLIHDDSLTFKEDIQKAQVSGQGDSLHEHIANLAGSPAIKKGILQTVKVVDELVKVMGRHKPENIVIEMARENQTTQKGQKNSRERMKRIEEGIKELGSQILKEHPVENTQLQNEKLYLYYLQNGRDMYVDQELDINRLSDYDVDHIVPQSFLKDDSIDNKVLTRSDKARGKSDNVPSEEVVKKMKNYWRQLLNAKLITQRKFDNLTKAERGGLSELDKAGFIKRQLVETRQITKHVAQILDSRMNTKYDENDKLIREVKVITLKSKLVSDFRKDFQFYKVREINNYHHAHDAYLNAVVGTALIKKYPKLESEFVYGDYKVYDVRKMIAKSEQEIGKATAKYFFYSNIMNFFKTEITLANGEIRKRPLIETNGETGEIVWDKGRDFATVRKVLSMPQVNIVKKTEVQTGGFSKESILPKRNSDKLIARKKDWDPKKYGGFDSPTVAYSVLVVAKVEKGKSKKLKSVKELLGITIMERSSFEKNPIDFLEAKGYKEVKKDLIIKLPKYSLFELENGRKRMLASAGELQKGNELALPSKYVNFLYLASHYEKLKGSPEDNEQKQLFVEQHKHYLDEIIEQISEFSKRVILADANLDKVLSAYNKHRDKPIREQAENIIHLFTLTNLGAPAAFKYFDTTIDRKRYTSTKEVLDATLIHQSITGLYETRIDLSQLGGDGGPAPAPGGMDLLKPLTVERKGVKIKGYWNSQADITCVPKDLLQGEEPVRQQNVTTIHGTQEGDVYYVNLKIDGRRINTEVIGTTLDYAIITPGDVPWILKKPLELTIKLDLEEQQGTLLNNSILSKKGKEELKQLFEKYSALWQSWENQVGHRRIRPHKIATGTVKPTPQKQYHINPKAKPDIQIVINDLLKQGVLIQKESTMNTPVYPVPKPNGRWRMVLDYRAVNKVTPLIAVQNQHSYGILGSLFKGRYKTTIDLSNGFWAHPIVPEDYWITAFTWQGKQYCWTVLPQGFLNSPGLFNGDVVDLLQGIPNVEVYVDDVYISHDSEKEHLEYLDILFNRLKEAGYIISLKKSNIANSIVDFLGFQITNEGRGLTDTFKEKLENITAPTTLKQLQSILGLLNFARNFIPDFTELIAPLYALIPKSPKNYVPWQIEHSTTLETLITKLNGAEYLQGRKGDKTLIMKVNASYTTGYIRYYNEGEKKPISYVSIVFSKTELKFTELEKLLTTVHKGLLKALDLSMGQNIHVYSPIVSMQNIQKTPQTAKKALASRWLSWLSYLEDPRIRFFYDPQMPALKDLPAVDTGKDNKKHPSNFQHIFYTDGSAITSPTKEGHLNAGMGIVYFINKDGNLQKQQEWSISLGNHTAQFAEIAAFEFALKKCLPLGGNILVVTDSNYVAKAYNEELDVWASNGFVNNRKKPLKHISKWKSVADLKRLRPDVVVTHEPGHQKLDSSPHAYGNNLADQLATQASFKVHAGKRTADGSEFEKRTADGSEFESPKKKAKVE

SEQ ID NO: 6482 - protein, 2089 aa, synthetic construct
MPAAKRVKLDGGDKKYSIGLDIGTNSVGWAVITDEYKVPSKKFKVLGNTDRHSIKKNLIGALLFDSGETAEATRLKRTARRRYTRRKNRICYLQEIFSNEMAKVDDSFFHRLEESFLVEEDKKHERHPIFGNIVDEVAYHEKYPTIYHLRKKLVDSTDKADLRLIYLALAHMIKFRGHFLIEGDLNPDNSDVDKLFIQLVQTYNQLFEENPINASGVDAKAILSARLSKSRRLENLIAQLPGEKKNGLFGNLIALSLGLTPNFKSNFDLAEDAKLQLSKDTYDDDLDNLLAQIGDQYADLFLAAKNLSDAILLSDILRVNTEITKAPLSASMIKRYDEHHQDLTLLKALVRQQLPEKYKEIFFDQSKNGYAGYIDGGASQEEFYKFIKPILEKMDGTEELLVKLNREDLLRKQRTFDNGSIPHQIHLGELHAILRRQEDFYPFLKDNREKIEKILTFRIPYYVGPLARGNSRFAWMTRKSEETITPWNFEEVVDKGASAQSFIERMTNFDKNLPNEKVLPKHSLLYEYFTVYNELTKVKYVTEGMRKPAFLSGEQKKAIVDLLFKTNRKVTVKQLKEDYFKKIECFDSVEISGVEDRFNASLGTYHDLLKIIKDKDFLDNEENEDILEDIVLTLTLFEDREMIEERLKTYAHLFDDKVMKQLKRRRYTGWGRLSRKLINGIRDKQSGKTILDFLKSDGFANRNFMQLIHDDSLTFKEDIQKAQVSGQGDSLHEHIANLAGSPAIKKGILQTVKVVDELVKVMGRHKPENIVIEMARENQTTQKGQKNSRERMKRIEEGIKELGSQILKEHPVENTQLQNEKLYLYYLQNGRDMYVDQELDINRLSDYDVDHIVPQSFLKDDSIDNKVLTRSDKARGKSDNVPSEEVVKKMKNYWRQLLNAKLITQRKFDNLTKAERGGLSELDKAGFIKRQLVETRQITKHVAQILDSRMNTKYDENDKLIREVKVITLKSKLVSDFRKDFQFYKVREINNYHHAHDAYLNAVVGTALIKKYPKLESEFVYGDYKVYDVRKMIAKSEQEIGKATAKYFFYSNIMNFFKTEITLANGEIRKRPLIETNGETGEIVWDKGRDFATVRKVLSMPQVNIVKKTEVQTGGFSKESILPKRNSDKLIARKKDWDPKKYGGFDSPTVAYSVLVVAKVEKGKSKKLKSVKELLGITIMERSSFEKNPIDFLEAKGYKEVKKDLIIKLPKYSLFELENGRKRMLASAGELQKGNELALPSKYVNFLYLASHYEKLKGSPEDNEQKQLFVEQHKHYLDEIIEQISEFSKRVILADANLDKVLSAYNKHRDKPIREQAENIIHLFTLTNLGAPAAFKYFDTTIDRKRYTSTKEVLDATLIHQSITGLYETRIDLSQLGGDGGPAPAPGGTLQLEEEYRLFEPESTQKQEMDIWLKNFPQAWAETGGMGTAHCQAPVLIQLKATATPISIRQYPMPHEAYQGIKPHIRRMLDQGILKPCQSPWNTPLLPVKKPGTEDYRPVQDLREVNKRVEDIHPTVPNPYNLLSTLPPSHPWYTVLDLKDAFFCLRLHSESQLLFAFEWRDPEIGLSGQLTWTRLPQGFKNSPTLFNEALHSDLADFRVRYPALVLLQYVDDLLLAAATRTECLEGTKALLETLGNKGYRASAKKAQICLQEVTYLGYSLKDGQRWLTKARKEAILSIPVPKNSRQVREFLGTAGYCRLWIPGFAELAAPLYPLTRPGTLFQWGTEQQLAFEDIKKALLSSPALGLPDITKPFELFIDENSGFAKGVLVQKLGPWKRPVAYLSKKLDTVASGWPPCLRMVAAIAILVKDAGKLTLGQPLTILTSHPVEALVRQPPNKWLSNARMTHYQAMLLDAERVHFGPTVSLNPATLLPLPSGGNHHDCLQILAETHGTRPDLTDQPLPDADLTWYTDGSSFIRNGEREAGAAVTTESEVIWAAPLPPGTSAQRAELIALTQALKMAEGKKLTVYTDSRYAFATTHVHGEIYRRRGWLTSEGKEIKNKNEILALLEALFLPKRLSIIHCPGHQKGDSPQAKGNRLADDTAKKAATETHSSLTVLPAGKRTADGSEFEKRTADGSEFESPKKKAKVE

SEQ ID NO: 6483 - protein, 2003 aa, synthetic construct
MPAAKRVKLDGGDKKYSIGLDIGTNSVGWAVITDEYKVPSKKFKVLGNTDRHSIKKNLIGALLFDSGETAEATRLKRTARRRYTRRKNRICYLQEIFSNEMAKVDDSFFHRLEESFLVEEDKKHERHPIFGNIVDEVAYHEKYPTIYHLRKKLVDSTDKADLRLIYLALAHMIKFRGHFLIEGDLNPDNSDVDKLFIQLVQTYNQLFEENPINASGVDAKAILSARLSKSRRLENLIAQLPGEKKNGLFGNLIALSLGLTPNFKSNFDLAEDAKLQLSKDTYDDDLDNLLAQIGDQYADLFLAAKNLSDAILLSDILRVNTEITKAPLSASMIKRYDEHHQDLTLLKALVRQQLPEKYKEIFFDQSKNGYAGYIDGGASQEEFYKFIKPILEKMDGTEELLVKLNREDLLRKQRTFDNGSIPHQIHLGELHAILRRQEDFYPFLKDNREKIEKILTFRIPYYVGPLARGNSRFAWMTRKSEETITPWNFEEVVDKGASAQSFIERMTNFDKNLPNEKVLPKHSLLYEYFTVYNELTKVKYVTEGMRKPAFLSGEQKKAIVDLLFKTNRKVTVKQLKEDYFKKIECFDSVEISGVEDRFNASLGTYHDLLKIIKDKDFLDNEENEDILEDIVLTLTLFEDREMIEERLKTYAHLFDDKVMKQLKRRRYTGWGRLSRKLINGIRDKQSGKTILDFLKSDGFANRNFMQLIHDDSLTFKEDIQKAQVSGQGDSLHEHIANLAGSPAIKKGILQTVKVVDELVKVMGRHKPENIVIEMARENQTTQKGQKNSRERMKRIEEGIKELGSQILKEHPVENTQLQNEKLYLYYLQNGRDMYVDQELDINRLSDYDVDHIVPQSFLKDDSIDNKVLTRSDKARGKSDNVPSEEVVKKMKNYWRQLLNAKLITQRKFDNLTKAERGGLSELDKAGFIKRQLVETRQITKHVAQILDSRMNTKYDENDKLIREVKVITLKSKLVSDFRKDFQFYKVREINNYHHAHDAYLNAVVGTALIKKYPKLESEFVYGDYKVYDVRKMIAKSEQEIGKATAKYFFYSNIMNFFKTEITLANGEIRKRPLIETNGETGEIVWDKGRDFATVRKVLSMPQVNIVKKTEVQTGGFSKESILPKRNSDKLIARKKDWDPKKYGGFDSPTVAYSVLVVAKVEKGKSKKLKSVKELLGITIMERSSFEKNPIDFLEAKGYKEVKKDLIIKLPKYSLFELENGRKRMLASAGELQKGNELALPSKYVNFLYLASHYEKLKGSPEDNEQKQLFVEQHKHYLDEIIEQISEFSKRVILADANLDKVLSAYNKHRDKPIREQAENIIHLFTLTNLGAPAAFKYFDTTIDRKRYTSTKEVLDATLIHQSITGLYETRIDLSQLGGDGGPAPAPGGGLEHLPPPPEVSQFPLNPERLQALTDLVSRALEAKHIEPYQGPGNNPIFPVKKPNGKWRFIHDLRATNSLTRDLASPSPGPPDLTSLPQDLPHLRTIDLTDAFFQIPLPAVFQPYFAFTLPQPNNHGPGTRYSWRVLPQGFKNSPTLFQQQLSHILAPVRKAFPNSLIIQYMDDILLASPALRELTALTDKVTNALTKEGLPMSLEKTQATPGSIHFLGQVISPDCITYETLPSIHVKSIWSLAELQSMLGELQWVSKGTPVLRSSLHQLYLALRGHRDPRDTIELTSTQVQALKTIQKALALNCRSRLVSQLPILALIILRPTGTTAVLFQTKQKWPLVWLHTPHPATSLRPWGQLLANAIITLDKYSLQHYGQICKSFHHNISNQALTYYLHTSDQSSVAILLQHSHRFHNLGAQPSGPWRSLLQVPQIFQNIDVLRPPFIISPVVIDHAPCLFSDGATSKAAFILWDKQVIHQQVLPLPSTCSAQAGELFGLLAGLQKSKPWPALNIFLDSKFLIGHLRRMAWGAFLGPSTQCDLHARLFPLLQGKTVYVHHVRSHTLLQDPISRLNEATDALMLAPLLPLAGKRTADGSEFEKRTADGSEFESPKKKAKVE

SEQ ID NO: 6484 - protein, 2090 aa, synthetic construct
MPAAKRVKLDGGDKKYSIGLDIGTNSVGWAVITDEYKVPSKKFKVLGNTDRHSIKKNLIGALLFDSGETAEATRLKRTARRRYTRRKNRICYLQEIFSNEMAKVDDSFFHRLEESFLVEEDKKHERHPIFGNIVDEVAYHEKYPTIYHLRKKLVDSTDKADLRLIYLALAHMIKFRGHFLIEGDLNPDNSDVDKLFIQLVQTYNQLFEENPINASGVDAKAILSARLSKSRRLENLIAQLPGEKKNGLFGNLIALSLGLTPNFKSNFDLAEDAKLQLSKDTYDDDLDNLLAQIGDQYADLFLAAKNLSDAILLSDILRVNTEITKAPLSASMIKRYDEHHQDLTLLKALVRQQLPEKYKEIFFDQSKNGYAGYIDGGASQEEFYKFIKPILEKMDGTEELLVKLNREDLLRKQRTFDNGSIPHQIHLGELHAILRRQEDFYPFLKDNREKIEKILTFRIPYYVGPLARGNSRFAWMTRKSEETITPWNFEEVVDKGASAQSFIERMTNFDKNLPNEKVLPKHSLLYEYFTVYNELTKVKYVTEGMRKPAFLSGEQKKAIVDLLFKTNRKVTVKQLKEDYFKKIECFDSVEISGVEDRFNASLGTYHDLLKIIKDKDFLDNEENEDILEDIVLTLTLFEDREMIEERLKTYAHLFDDKVMKQLKRRRYTGWGRLSRKLINGIRDKQSGKTILDFLKSDGFANRNFMQLIHDDSLTFKEDIQKAQVSGQGDSLHEHIANLAGSPAIKKGILQTVKVVDELVKVMGRHKPENIVIEMARENQTTQKGQKNSRERMKRIEEGIKELGSQILKEHPVENTQLQNEKLYLYYLQNGRDMYVDQELDINRLSDYDVDHIVPQSFLKDDSIDNKVLTRSDKARGKSDNVPSEEVVKKMKNYWRQLLNAKLITQRKFDNLTKAERGGLSELDKAGFIKRQLVETRQITKHVAQILDSRMNTKYDENDKLIREVKVITLKSKLVSDFRKDFQFYKVREINNYHHAHDAYLNAVVGTALIKKYPKLESEFVYGDYKVYDVRKMIAKSEQEIGKATAKYFFYSNIMNFFKTEITLANGEIRKRPLIETNGETGEIVWDKGRDFATVRKVLSMPQVNIVKKTEVQTGGFSKESILPKRNSDKLIARKKDWDPKKYGGFDSPTVAYSVLVVAKVEKGKSKKLKSVKELLGITIMERSSFEKNPIDFLEAKGYKEVKKDLIIKLPKYSLFELENGRKRMLASAGELQKGNELALPSKYVNFLYLASHYEKLKGSPEDNEQKQLFVEQHKHYLDEIIEQISEFSKRVILADANLDKVLSAYNKHRDKPIREQAENIIHLFTLTNLGAPAAFKYFDTTIDRKRYTSTKEVLDATLIHQSITGLYETRIDLSQLGGDGGPAPAPGGTLNLEDEYRLYETSAEPEVSPGSTWLSDFPQAWAETGGMGLAVRQAPLIIPLKATSTPVSIKQYPMSQEAKLGIKPHIQRLLDQGILVPCQSPWNTPLLPVKKPGTNDYRPVQDLREVNKRVEDIHPTVPNPYNLLSGLPPSHRWYTVLDLKDAFFCLRLHPTSQPLFAFEWRDPGMGISGQLTWTRLPQGFKNSPTLFNEALHRDLADFRIQHPDLILLQYVDDILLAATSELDCQQGTRALLLTLGNLGYRASAKKAQLCQKQVKYLGYLLKEGQRWLTEARKETVMGQPTPKTPRQLREFLGKAGFCRLFIPGFAEMAAPLYPLTKPGTLFNWGPDQQKAYQEIKQALLTAPALGLPDLTKPFELFVDEKQGYAKGVLTQKLGPWRRPVAYLSKKLDPVAAGWPPCLRMVAAIAVLRKDAGKLTMGQPLVILAPHAVEALVKQPPDRWLSNARMTHYQAMLLDTDRVQFGPVVALNPATLLPLPEEGAPHDCLEILAETHGTRPDLTDQPIPDADHTWYTDGSSFLQEGQRKAGAAVTTETEVIWARALPAGTSAQRAELIALTQALKMAEGKRLNVYTDSRYAFATAHIHGEIYRRRGWLTSEGREIKNKSEILALLKALFLPKRLSIIHCLGHQKGDSAEARGNRLADQAAREAAIKTPPDTSTLLAGKRTADGSEFEKRTADGSEFESPKKKAKVE

SEQ ID NO: 6485 - protein, 2110 aa, synthetic construct
MPAAKRVKLDGGDKKYSIGLDIGTNSVGWAVITDEYKVPSKKFKVLGNTDRHSIKKNLIGALLFDSGETAEATRLKRTARRRYTRRKNRICYLQEIFSNEMAKVDDSFFHRLEESFLVEEDKKHERHPIFGNIVDEVAYHEKYPTIYHLRKKLVDSTDKADLRLIYLALAHMIKFRGHFLIEGDLNPDNSDVDKLFIQLVQTYNQLFEENPINASGVDAKAILSARLSKSRRLENLIAQLPGEKKNGLFGNLIALSLGLTPNFKSNFDLAEDAKLQLSKDTYDDDLDNLLAQIGDQYADLFLAAKNLSDAILLSDILRVNTEITKAPLSASMIKRYDEHHQDLTLLKALVRQQLPEKYKEIFFDQSKNGYAGYIDGGASQEEFYKFIKPILEKMDGTEELLVKLNREDLLRKQRTFDNGSIPHQIHLGELHAILRRQEDFYPFLKDNREKIEKILTFRIPYYVGPLARGNSRFAWMTRKSEETITPWNFEEVVDKGASAQSFIERMTNFDKNLPNEKVLPKHSLLYEYFTVYNELTKVKYVTEGMRKPAFLSGEQKKAIVDLLFKTNRKVTVKQLKEDYFKKIECFDSVEISGVEDRFNASLGTYHDLLKIIKDKDFLDNEENEDILEDIVLTLTLFEDREMIEERLKTYAHLFDDKVMKQLKRRRYTGWGRLSRKLINGIRDKQSGKTILDFLKSDGFANRNFMQLIHDDSLTFKEDIQKAQVSGQGDSLHEHIANLAGSPAIKKGILQTVKVVDELVKVMGRHKPENIVIEMARENQTTQKGQKNSRERMKRIEEGIKELGSQILKEHPVENTQLQNEKLYLYYLQNGRDMYVDQELDINRLSDYDVDHIVPQSFLKDDSIDNKVLTRSDKARGKSDNVPSEEVVKKMKNYWRQLLNAKLITQRKFDNLTKAERGGLSELDKAGFIKRQLVETRQITKHVAQILDSRMNTKYDENDKLIREVKVITLKSKLVSDFRKDFQFYKVREINNYHHAHDAYLNAVVGTALIKKYPKLESEFVYGDYKVYDVRKMIAKSEQEIGKATAKYFFYSNIMNFFKTEITLANGEIRKRPLIETNGETGEIVWDKGRDFATVRKVLSMPQVNIVKKTEVQTGGFSKESILPKRNSDKLIARKKDWDPKKYGGFDSPTVAYSVLVVAKVEKGKSKKLKSVKELLGITIMERSSFEKNPIDFLEAKGYKEVKKDLIIKLPKYSLFELENGRKRMLASAGELQKGNELALPSKYVNFLYLASHYEKLKGSPEDNEQKQLFVEQHKHYLDEIIEQISEFSKRVILADANLDKVLSAYNKHRDKPIREQAENIIHLFTLTNLGAPAAFKYFDTTIDRKRYTSTKEVLDATLIHQSITGLYETRIDLSQLGGDGGPAPAPGGTLNIEDEYRLHETSKEPDVSLGSTWLSDFPQAWAETGGMGLAVRQAPLIIPLKATSTPVSIKQYPMSQEARLGIKPHIQRLLDQGILVPCQSPWNTPLLPVKKPGTNDYRPVQDLREVNKRVEDIHPTVPNPYNLLSGLPPSHQWYTVLDLKDAFFCLRLHPTSQPLFAFEWRDPEMGISGQLTWTRLPQGFKNSPTLFNEALHRDLADFRIQHPDLILLQYVDDLLLAATSELDCQQGTRALLQTLGNLGYRASAKKAQICQKQVKYLGYLLKEGQRWLTEARKETVMGQPTPKTPRQLREFLGKAGFCRLFIPGFAEMAAPLYPLTKPGTLFNWGPDQQKAYQEIKQALLTAPALGLPDLTKPFELFVDEKQGYAKGVLTQKLGPWRRPVAYLSKKLDPVAAGWPPCLRMVAAIAVLTKDAGKLTMGQPLVILAPHAVEALVKQPPDRWLSNARMTHYQALLLDTDRVQFGPVVALNPATLLPLPEEGLQHNCLDILAEAHGTRPDLTDQPLPDADHTWYTDGSSLLQEGQRKAGAAVTTETEVIWAKALPAGTSAQRAELIALTQALKMAEGKKLNVYTDSRYAFATAHIHGEIYRRRGWLTSEGKEIKNKDEILALLKALFLPKRLSIIHCPGHQKGHSAEARGNRMADQAARKAAITETPDTSTLLIENSSPSGGSKRTADGSEFEAGKRTADGSEFEKRTADGSEFESPKKKAKVE

SEQ ID NO: 6486 - protein, 2110 aa, synthetic construct; identical to SEQ ID NO: 6485

SEQ ID NO: 6487 - protein, 2110 aa, synthetic construct
MPAAKRVKLDGGDKKYSIGLDIGTNSVGWAVITDEYKVPSKKFKVLGNTDRHSIKKNLIGALLFDSGETAEATRLKRTARRRYTRRKNRICYLQEIFSNEMAKVDDSFFHRLEESFLVEEDKKHERHPIFGNIVDEVAYHEKYPTIYHLRKKLVDSTDKADLRLIYLALAHMIKFRGHFLIEGDLNPDNSDVDKLFIQLVQTYNQLFEENPINASGVDAKAILSARLSKSRRLENLIAQLPGEKKNGLFGNLIALSLGLTPNFKSNFDLAEDAKLQLSKDTYDDDLDNLLAQIGDQYADLFLAAKNLSDAILLSDILRVNTEITKAPLSASMIKRYDEHHQDLTLLKALVRQQLPEKYKEIFFDQSKNGYAGYIDGGASQEEFYKFIKPILEKMDGTEELLVKLNREDLLRKQRTFDNGSIPHQIHLGELHAILRRQEDFYPFLKDNREKIEKILTFRIPYYVGPLARGNSRFAWMTRKSEETITPWNFEEVVDKGASAQSFIERMTNFDKNLPNEKVLPKHSLLYEYFTVYNELTKVKYVTEGMRKPAFLSGEQKKAIVDLLFKTNRKVTVKQLKEDYFKKIECFDSVEISGVEDRFNASLGTYHDLLKIIKDKDFLDNEENEDILEDIVLTLTLFEDREMIEERLKTYAHLFDDKVMKQLKRRRYTGWGRLSRKLINGIRDKQSGKTILDFLKSDGFANRNFMQLIHDDSLTFKEDIQKAQVSGQGDSLHEHIANLAGSPAIKKGILQTVKVVDELVKVMGRHKPENIVIEMARENQTTQKGQKNSRERMKRIEEGIKELGSQILKEHPVENTQLQNEKLYLYYLQNGRDMYVDQELDINRLSDYDVDHIVPQSFLKDDSIDNKVLTRSDKARGKSDNVPSEEVVKKMKNYWRQLLNAKLITQRKFDNLTKAERGGLSELDKAGFIKRQLVETRQITKHVAQILDSRMNTKYDENDKLIREVKVITLKSKLVSDFRKDFQFYKVREINNYHHAHDAYLNAVVGTALIKKYPKLESEFVYGDYKVYDVRKMIAKSEQEIGKATAKYFFYSNIMNFFKTEITLANGEIRKRPLIETNGETGEIVWDKGRDFATVRKVLSMPQVNIVKKTEVQTGGFSKESILPKRNSDKLIARKKDWDPKKYGGFDSPTVAYSVLVVAKVEKGKSKKLKSVKELLGITIMERSSFEKNPIDFLEAKGYKEVKKDLIIKLPKYSLFELENGRKRMLASAGELQKGNELALPSKYVNFLYLASHYEKLKGSPEDNEQKQLFVEQHKHYLDEIIEQISEFSKRVILADANLDKVLSAYNKHRDKPIREQAENIIHLFTLTNLGAPAAFKYFDTTIDRKRYTSTKEVLDATLIHQSITGLYETRIDLSQLGGDGGPAPAPGGVQEISDSRPMLHIYLNGRRFLGLLDTGADKTCIAGRDWPANWPIHQTESSLQGLGMACGVARSSQPLRWQHEDKSGIIHPFVIPTLPFTLWGRDIMKDIKVRLMTDSPDDSQDLMIGAIESNLFADQISWKSDQPVWLNQWPLKQEKLQALQQLVTEQLQLGHLEESNSPWNTPVFVIKKKSGKWRLLQDLRAVNATMHDMGALQPGLPSPVAVPKGWEIIIIDLQDCFFNIKLHPEDCKRFAFSVPSPNFKRPYQRFQWKVLPQGMKNSPTLCQKFVDKAILTVRDKYQDSYIVHYMDDILLAHPSRSIVDEILTSMIQALNKHGLVVSTEKIQKYDNLKYLGTHIQGDSVSYQKLQIRTDKLRTLNDFQKLLGNINWIRPFLKLTTGELKPLFEILNGDSNPISTRKLTPEACKALQLMNERLSTARVKRLDLSQPWSLCILKTEYTPTACLWQDGVVEWIHLPHISPKVITPYDIFCTQLIIKGRHRSKELFSKDPDYIVVPYTKVQFDLLLQEKEDWPISLLGFLGEVHFHLPKDPLLTFTLQTAIIFPHMTSTTPLEKGIVIFTDGSANGRSVTYIQGREPIIKENTQNTAQQAEIVAVITAFEEVSQPFNLYTDSKYVTGLFPEIETATLSPRTKIYTELKHLQRLIHKRQEKFYIGHIRGHTGLPGPLAQGNAYADSLTRILTAAGKRTADGSEFEKRTADGSEFESPKKKAKVE

SEQ ID NO: 6488 - protein, 2084 aa, synthetic construct
MPAAKRVKLDGGDKKYSIGLDIGTNSVGWAVITDEYKVPSKKFKVLGNTDRHSIKKNLIGALLFDSGETAEATRLKRTARRRYTRRKNRICYLQEIFSNEMAKVDDSFFHRLEESFLVEEDKKHERHPIFGNIVDEVAYHEKYPTIYHLRKKLVDSTDKADLRLIYLALAHMIKFRGHFLIEGDLNPDNSDVDKLFIQLVQTYNQLFEENPINASGVDAKAILSARLSKSRRLENLIAQLPGEKKNGLFGNLIALSLGLTPNFKSNFDLAEDAKLQLSKDTYDDDLDNLLAQIGDQYADLFLAAKNLSDAILLSDILRVNTEITKAPLSASMIKRYDEHHQDLTLLKALVRQQLPEKYKEIFFDQSKNGYAGYIDGGASQEEFYKFIKPILEKMDGTEELLVKLNREDLLRKQRTFDNGSIPHQIHLGELHAILRRQEDFYPFLKDNREKIEKILTFRIPYYVGPLARGNSRFAWMTRKSEETITPWNFEEVVDKGASAQSFIERMTNFDKNLPNEKVLPKHSLLYEYFTVYNELTKVKYVTEGMRKPAFLSGEQKKAIVDLLFKTNRKVTVKQLKEDYFKKIECFDSVEISGVEDRFNASLGTYHDLLKIIKDKDFLDNEENEDILEDIVLTLTLFEDREMIEERLKTYAHLFDDKVMKQLKRRRYTGWGRLSRKLINGIRDKQSGKTILDFLKSDGFANRNFMQLIHDDSLTFKEDIQKAQVSGQGDSLHEHIANLAGSPAIKKGILQTVKVVDELVKVMGRHKPENIVIEMARENQTTQKGQKNSRERMKRIEEGIKELGSQILKEHPVENTQLQNEKLYLYYLQNGRDMYVDQELDINRLSDYDVDHIVPQSFLKDDSIDNKVLTRSDKARGKSDNVPSEEVVKKMKNYWRQLLNAKLITQRKFDNLTKAERGGLSELDKAGFIKRQLVETRQITKHVAQILDSRMNTKYDENDKLIREVKVITLKSKLVSDFRKDFQFYKVREINNYHHAHDAYLNAVVGTALIKKYPKLESEFVYGDYKVYDVRKMIAKSEQEIGKATAKYFFYSNIMNFFKTEITLANGEIRKRPLIETNGETGEIVWDKGRDFATVRKVLSMPQVNIVKKTEVQTGGFSKESILPKRNSDKLIARKKDWDPKKYGGFDSPTVAYSVLVVAKVEKGKSKKLKSVKELLGITIMERSSFEKNPIDFLEAKGYKEVKKDLIIKLPKYSLFELENGRKRMLASAGELQKGNELALPSKYVNFLYLASHYEKLKGSPEDNEQKQLFVEQHKHYLDEIIEQISEFSKRVILADANLDKVLSAYNKHRDKPIREQAENIIHLFTLTNLGAPAAFKYFDTTIDRKRYTSTKEVLDATLIHQSITGLYETRIDLSQLGGDGGPAPAPGGTLQLDDEYRLYSPLVKPDQNIQFWLEQFPQAWAETAGMGLAKQVPPQVIQLKASATPVSVRQYPLSKEAQEGIRPHVQRLIQQGILVPVQSPWNTPLLPVRKPGTNDYRPVQDLREVNKRVQDIHPTVPNPYNLLCALPPQRSWYTVLDLKDAFFCLRLHPTSQPLFAFEWRDPGTGRTGQLTWTRLPQGFKNSPTIFDEALHRDLANFRIQHPQVTLLQYVDDLLLAGATKQDCLEGTKALLLELSDLGYRASAKKAQICRREVTYLGYSLRDGQRWLTEARKKTVVQIPAPTTAKQVREFLGTAGFCRLWIPGFATLAAPLYPLTKEKGEFSWAPEHQKAFDAIKKALLSAPALALPDVTKPFTLYVDERKGVARGVLTQTLGPWRRPVAYLSKKLDPVASGWPVCLKAIAAVAILVKDADKLTLGQNITVIAPHALENIVRQPPDRWMTNARMTHYQSLLLTERVTFAPPAALNPATLLPEETDEPVTHDCHQLLIEETGVRKDLTDIPLTGEVLTWFTDGSSYVVEGKRMAGAAVVDGTRTIWASSLPEGTSAQKAELMALTQALRLAEGKSINIYTDSRYAFATAHVHGAIYKQRGLLTSAGREIKNKEEILSLLEALHLPKRLAIIHCPGHQKAKDPISRGNQMADRVAKQAAQGVNLLAGKRTADGSEFEKRTADGSEFESPKKKAKVE

SEQ ID NO: 6489 - protein, 2081 aa, synthetic construct
MPAAKRVKLDGGDKKYSIGLDIGTNSVGWAVITDEYKVPSKKFKVLGNTDRHSIKKNLIGALLFDSGETAEATRLKRTARRRYTRRKNRICYLQEIFSNEMAKVDDSFFHRLEESFLVEEDKKHERHPIFGNIVDEVAYHEKYPTIYHLRKKLVDSTDKADLRLIYLALAHMIKFRGHFLIEGDLNPDNSDVDKLFIQLVQTYNQLFEENPINASGVDAKAILSARLSKSRRLENLIAQLPGEKKNGLFGNLIALSLGLTPNFKSNFDLAEDAKLQLSKDTYDDDLDNLLAQIGDQYADLFLAAKNLSDAILLSDILRVNTEITKAPLSASMIKRYDEHHQDLTLLKALVRQQLPEKYKEIFFDQSKNGYAGYIDGGASQEEFYKFIKPILEKMDGTEELLVKLNREDLLRKQRTFDNGSIPHQIHLGELHAILRRQEDFYPFLKDNREKIEKILTFRIPYYVGPLARGNSRFAWMTRKSEETITPWNFEEVVDKGASAQSFIERMTNFDKNLPNEKVLPKHSLLYEYFTVYNELTKVKYVTEGMRKPAFLSGEQKKAIVDLLFKTNRKVTVKQLKEDYFKKIECFDSVEISGVEDRFNASLGTYHDLLKIIKDKDFLDNEENEDILEDIVLTLTLFEDREMIEERLKTYAHLFDDKVMKQLKRRRYTGWGRLSRKLINGIRDKQSGKTILDFLKSDGFANRNFMQLIHDDSLTFKEDIQKAQVSGQGDSLHEHIANLAGSPAIKKGILQTVKVVDELVKVMGRHKPENIVIEMARENQTTQKGQKNSRERMKRIEEGIKELGSQILKEHPVENTQLQNEKLYLYYLQNGRDMYVDQELDINRLSDYDVDHIVPQSFLKDDSIDNKVLTRSDKARGKSDNVPSEEVVKKMKNYWRQLLNAKLITQRKFDNLTKAERGGLSELDKAGFIKRQLVETRQITKHVAQILDSRMNTKYDENDKLIREVKVITLKSKLVSDFRKDFQFYKVREINNYHHAHDAYLNAVVGTALIKKYPKLESEFVYGDYKVYDVRKMIAKSEQEIGKATAKYFFYSNIMNFFKTEITLANGEIRKRPLIETNGETGEIVWDKGRDFATVRKVLSMPQVNIVKKTEVQTGGFSKESILPKRNSDKLIARKKDWDPKKYGGFDSPTVAYSVLVVAKVEKGKSKKLKSVKELLGITIMERSSFEKNPIDFLEAKGYKEVKKDLIIKLPKYSLFELENGRKRMLASAGELQKGNELALPSKYVNFLYLASHYEKLKGSPEDNEQKQLFVEQHKHYLDEIIEQISEFSKRVILADANLDKVLSAYNKHRDKPIREQAENIIHLFTLTNLGAPAAFKYFDTTIDRKRYTSTKEVLDATLIHQSITGLYETRIDLSQLGGDGGPAPAPGGIPWLMKKPLQLTTLVPLQEYEERLLKQTMLTGSYKEKLQSLFLKYDALWQHWENQVGHRRIKPHHIATGTVNPRPQKQYPINPKAKASIQTVINDLLKQGVLIQQNSIMNTPVYPVPKPDGKWRMVLDYREVNKTIPLIAAQNQHSAGILSSIFRGKYKTTLDLSNGFWAHSITPESYWLTAFTWLGQQYCWTRLPQGFLNSPALFNADVVDLLKEVPNVQVYVDDIYISHDDPREHLEQLEKVFSLLLNAGYVVSLKKSEIAQHEVEFLGFNITKEGRGLTETFKQKLLNITPPRDLKQLQSILGKLNFARNFIPNFSELVKPLYNIIATAPGKYITWTTDNSQQLQNIISMLNSAENLEERNPEVRLIMKVNTSPSAGYIRFYNEFAKRPIMYLNYVYTKAEVKFTNTEKLLTTIHKGLIKALDLGMGQEILVYSPIVSMTKIQKTPLPERKALPIRWITWMSYLEDPRIQFHYDKTLPELQQVPTVTDDIIAKIKHPSEFSMVFYTDGSAIKHPNVNKSHNAGMGIAQVQFKPEFTVINTWSIPLGDHTAQLAEVAAVEFACKKALKIDGPVLIVTDSFYVAESVNKELPYWQSNGFFNNKKKPLKHVSKWKSIADCIQLKPDIIIIHEKGHQPTASTFHTEGNNLADKLATQGSYVVNAGKRTADGSEFEKRTADGSEFESPKKKAKVE

SEQ ID NO: 6490 - protein, 2170 aa, synthetic construct
MPAAKRVKLDGGDKKYSIGLDIGTNSVGWAVITDEYKVPSKKFKVLGNTDRHSIKKNLIGALLFDSGETAEATRLKRTARRRYTRRKNRICYLQEIFSNEMAKVDDSFFHRLEESFLVEEDKKHERHPIFGNIVDEVAYHEKYPTIYHLRKKLVDSTDKADLRLIYLALAHMIKFRGHFLIEGDLNPDNSDVDKLFIQLVQTYNQLFEENPINASGVDAKAILSARLSKSRRLENLIAQLPGEKKNGLFGNLIALSLGLTPNFKSNFDLAEDAKLQLSKDTYDDDLDNLLAQIGDQYADLFLAAKNLSDAILLSDILRVNTEITKAPLSASMIKRYDEHHQDLTLLKALVRQQLPEKYKEIFFDQSKNGYAGYIDGGASQEEFYKFIKPILEKMDGTEELLVKLNREDLLRKQRTFDNGSIPHQIHLGELHAILRRQEDFYPFLKDNREKIEKILTFRIPYYVGPLARGNSRFAWMTRKSEETITPWNFEEVVDKGASAQSFIERMTNFDKNLPNEKVLPKHSLLYEYFTVYNELTKVKYVTEGMRKPAFLSGEQKKAIVDLLFKTNRKVTVKQLKEDYFKKIECFDSVEISGVEDRFNASLGTYHDLLKIIKDKDFLDNEENEDILEDIVLTLTLFEDREMIEERLKTYAHLFDDKVMKQLKRRRYTGWGRLSRKLINGIRDKQSGKTILDFLKSDGFANRNFMQLIHDDSLTFKEDIQKAQVSGQGDSLHEHIANLAGSPAIKKGILQTVKVVDELVKVMGRHKPENIVIEMARENQTTQKGQKNSRERMKRIEEGIKELGSQILKEHPVENTQLQNEKLYLYYLQNGRDMYVDQELDINRLSDYDVDHIVPQSFLKDDSIDNKVLTRSDKARGKSDNVPSEEVVKKMKNYWRQLLNAKLITQRKFDNLTKAERGGLSELDKAGFIKRQLVETRQITKHVAQILDSRMNTKYDENDKLIREVKVITLKSKLVSDFRKDFQFYKVREINNYHHAHDAYLNAVVGTALIKKYPKLESEFVYGDYKVYDVRKMIAKSEQEIGKATAKYFFYSNIMNFFKTEITLANGEIRKRPLIETNGETGEIVWDKGRDFATVRKVLSMPQVNIVKKTEVQTGGFSKESILPKRNSDKLIARKKDWDPKKYGGFDSPTVAYSVLVVAKVEKGKSKKLKSVKELLGITIMERSSFEKNPIDFLEAKGYKEVKKDLIIKLPKYSLFELENGRKRMLASAGELQKGNELALPSKYVNFLYLASHYEKLKGSPEDNEQKQLFVEQHKHYLDEIIEQISEFSKRVILADANLDKVLSAYNKHRDKPIREQAENIIHLFTLTNLGAPAAFKYFDTTIDRKRYTSTKEVLDATLIHQSITGLYETRIDLSQLGGDGGPAPAPGGMDPLQLLQPLEAEIKGTKLKAHWNSGATITCVPQAFLEEEVPIKNIWIKTIHGEKEQPVYYLTFKIQGRKVEAEVISSPYDYILVSPSDIPWLMKKPLQLTTLVPLQEYEERLLKQTMLTGSYKEKLQSLFLKYDALWQHWENQVGHRRIKPHHIATGTVNPRPQKQYPINPKAKASIQTVINDLLKQGVLIQQNSIMNTPVYPVPKPDGKWRMVLDYREVNKTIPLIAAQNQHSAGILSSIFRGKYKTTLDLSNGFWAHSITPESYWLTAFTWLGQQYCWTRLPQGFLNSPALFNADVVDLLKEVPNVQVYVDDIYISHDDPREHLEQLEKVFSLLLNAGYVVSLKKSEIAQHEVEFLGFNITKEGRGLTETFKQKLLNITPPRDLKQLQSILGKLNFARNFIPNFSELVKPLYNIIATAPGKYITWTTDNSQQLQNIISMLNSAENLEERNPEVRLIMKVNTSPSAGYIRFYNEFAKRPIMYLNYVYTKAEVKFTNTEKLLTTIHKGLIKALDLGMGQEILVYSPIVSMTKIQKTPLPERKALPIRWITWMSYLEDPRIQFHYDKTLPELQQVPTVTDDIIAKIKHPSEFSMVFYTDGSAIKHPNVNKSHNAGMGIAQVQFKPEFTVINTWSIPLGDHTAQLAEVAAVEFACKKALKIDGPVLIVTDSFYVAESVNKELPYWQSNGFFNNKKKPLKHVSKWKSIADCIQLKPDIIIIHEKGHQPTASTFHTEGNNLADKLATQGSYVVNAGKRTADGSEFEKRTADGSEFESPKKKAKVE

SEQ ID NO: 6491 - protein, 2090 aa, synthetic construct
MPAAKRVKLDGGDKKYSIGLDIGTNSVGWAVITDEYKVPSKKFKVLGNTDRHSIKKNLIGALLFDSGETAEATRLKRTARRRYTRRKNRICYLQEIFSNEMAKVDDSFFHRLEESFLVEEDKKHERHPIFGNIVDEVAYHEKYPTIYHLRKKLVDSTDKADLRLIYLALAHMIKFRGHFLIEGDLNPDNSDVDKLFIQLVQTYNQLFEENPINASGVDAKAILSARLSKSRRLENLIAQLPGEKKNGLFGNLIALSLGLTPNFKSNFDLAEDAKLQLSKDTYDDDLDNLLAQIGDQYADLFLAAKNLSDAILLSDILRVNTEITKAPLSASMIKRYDEHHQDLTLLKALVRQQLPEKYKEIFFDQSKNGYAGYIDGGASQEEFYKFIKPILEKMDGTEELLVKLNREDLLRKQRTFDNGSIPHQIHLGELHAILRRQEDFYPFLKDNREKIEKILTFRIPYYVGPLARGNSRFAWMTRKSEETITPWNFEEVVDKGASAQSFIERMTNFDKNLPNEKVLPKHSLLYEYFTVYNELTKVKYVTEGMRKPAFLSGEQKKAIVDLLFKTNRKVTVKQLKEDYFKKIECFDSVEISGVEDRFNASLGTYHDLLKIIKDKDFLDNEENEDILEDIVLTLTLFEDREMIEERLKTYAHLFDDKVMKQLKRRRYTGWGRLSRKLINGIRDKQSGKTILDFLKSDGFANRNFMQLIHDDSLTFKEDIQKAQVSGQGDSLHEHIANLAGSPAIKKGILQTVKVVDELVKVMGRHKPENIVIEMARENQTTQKGQKNSRERMKRIEEGIKELGSQILKEHPVENTQLQNEKLYLYYLQNGRDMYVDQELDINRLSDYDVDHIVPQSFLKDDSIDNKVLTRSDKARGKSDNVPSEEVVKKMKNYWRQLLNAKLITQRKFDNLTKAERGGLSELDKAGFIKRQLVETRQITKHVAQILDSRMNTKYDENDKLIREVKVITLKSKLVSDFRKDFQFYKVREINNYHHAHDAYLNAVVGTALIKKYPKLESEFVYGDYKVYDVRKMIAKSEQEIGKATAKYFFYSNIMNFFKTEITLANGEIRKRPLIETNGETGEIVWDKGRDFATVRKVLSMPQVNIVKKTEVQTGGFSKESILPKRNSDKLIARKKDWDPKKYGGFDSPTVAYSVLVVAKVEKGKSKKLKSVKELLGITIMERSSFEKNPIDFLEAKGYKEVKKDLIIKLPKYSLFELENGRKRMLASAGELQKGNELALPSKYVNFLYLASHYEKLKGSPEDNEQKQLFVEQHKHYLDEIIEQISEFSKRVILADANLDKVLSAYNKHRDKPIREQAENIIHLFTLTNLGAPAAFKYFDTTIDRKRYTSTKEVLDATLIHQSITGLYETRIDLSQLGGDGGPAPAPGGTLNIEDEYRLHETSKEPDVPLGSTWLSDFPQAWAETGGMGLAVRQAPLIIPLKATSTPVSIKQYPMSQEARLGIKPHIQRLLDQGILVPCQSPWNTPLLPVKKPGTNDYRPVQDLREVNKRVEDIHPTVPNPYNLLSGLPPSHQWYTVLDLKDAFFCLRLHPTSQPLFAFEWRDPEMGISGQLTWTRLPQGFKNSPTLFNEALHRDLADFRIQHPDLILLQYVDDLLLAATSEQDCQRGTRALLQTLGNLGYRASAKKAQICQKQVKYLGYLLKEGQRWLTEARKETVMGQPTPKTPRQLREFLGKAGFCRLFIPGFAEMAAPLYPLTKPGTLFNWGPDQQKAYQEIKQALLTAPALGLPDLTKPFELFVDEKQGYAKGVLTQKLGPWRRPVAYLSKKLDPVAAGWPPCLRMVAAIAVLTKDAGKLTMGQPLVILAPHAVEALVKQPPDRWLSNARMTHYQAMLLDTDRVQFGPVVALNPATLLPLPEKEAPHDCLEILAETHGTRPDLTDQPIPDADYTWYTDGSSFLQEGQRRAGAAVTTETEVIWARALPAGTSAQRAELIALTQALKMAEGKKLNVYTDSRYAFATAHVHGEIYRRRGWLTSEGREIKNKNEILALLKALFLPKRLSIIHCPGHQKGNSAEARGNRMADQAAREAAMKAVLETSTLLAGKRTADGSEFEKRTADGSEFESPKKKAKVE

SEQ ID NO: 6492 - protein, 2094 aa, synthetic construct
MPAAKRVKLDGGDKKYSIGLDIGTNSVGWAVITDEYKVPSKKFKVLGNTDRHSIKKNLIGALLFDSGETAEATRLKRTARRRYTRRKNRICYLQEIFSNEMAKVDDSFFHRLEESFLVEEDKKHERHPIFGNIVDEVAYHEKYPTIYHLRKKLVDSTDKADLRLIYLALAHMIKFRGHFLIEGDLNPDNSDVDKLFIQLVQTYNQLFEENPINASGVDAKAILSARLSKSRRLENLIAQLPGEKKNGLFGNLIALSLGLTPNFKSNFDLAEDAKLQLSKDTYDDDLDNLLAQIGDQYADLFLAAKNLSDAILLSDILRVNTEITKAPLSASMIKRYDEHHQDLTLLKALVRQQLPEKYKEIFFDQSKNGYAGYIDGGASQEEFYKFIKPILEKMDGTEELLVKLNREDLLRKQRTFDNGSIPHQIHLGELHAILRRQEDFYPFLKDNREKIEKILTFRIPYYVGPLARGNSRFAWMTRKSEETITPWNFEEVVDKGASAQSFIERMTNFDKNLPNEKVLPKHSLLYEYFTVYNELTKVKYVTEGMRKPAFLSGEQKKAIVDLLFKTNRKVTVKQLKEDYFKKIECFDSVEISGVEDRFNASLGTYHDLLKIIKDKDFLDNEENEDILEDIVLTLTLFEDREMIEERLKTYAHLFDDKVMKQLKRRRYTGWGRLSRKLINGIRDKQSGKTILDFLKSDGFANRNFMQLIHDDSLTFKEDIQKAQVSGQGDSLHEHIANLAGSPAIKKGILQTVKVVDELVKVMGRHKPENIVIEMARENQTTQKGQKNSRERMKRIEEGIKELGSQILKEHPVENTQLQNEKLYLYYLQNGRDMYVDQELDINRLSDYDVDHIVPQSFLKDDSIDNKVLTRSDKARGKSDNVPSEEVVKKMKNYWRQLLNAKLITQRKFDNLTKAERGGLSELDKAGFIKRQLVETRQITKHVAQILDSRMNTKYDENDKLIREVKVITLKSKLVSDFRKDFQFYKVREINNYHHAHDAYLNAVVGTALIKKYPKLESEFVYGDYKVYDVRKMIAKSEQEIGKATAKYFFYSNIMNFFKTEITLANGEIRKRPLIETNGETGEIVWDKGRDFATVRKVLSMPQVNIVKKTEVQTGGFSKESILPKRNSDKLIARKKDWDPKKYGGFDSPTVAYSVLVVAKVEKGKSKKLKSVKELLGITIMERSSFEKNPIDFLEAKGYKEVKKDLIIKLPKYSLFELENGRKRMLASAGELQKGNELALPSKYVNFLYLASHYEKLKGSPEDNEQKQLFVEQHKHYLDEIIEQISEFSKRVILADANLDKVLSAYNKHRDKPIREQAENIIHLFTLTNLGAPAAFKYFDTTIDRKRYTSTKEVLDATLIHQSITGLYETRIDLSQLGGDGGPAPAPAPGGTAPLEEEYRLFLEAPIQNVTLLEQWKREIPKVWAEINPPGLASTQAPIHVQLLSTALPVRVRQYPITLEAKRSLRETIRKFRAAGILRPVHSPWNTPLLPVRKSGTSEYRMVQDLREVNKRVETIHPTVPNPYTLLSLLPPDRIWYSVLDLKDAFFCIPLAPESQLIFAFEWADAEEGESGQLTWTRLPQGFKNSPTLFNEALNRDLQGFRLDHPSVSLLQYVDDLLIAADTQAACLSATRDLLMTLAELGYRVSGKKAQLCQEEVTYLGFKIHKGSRSLSNSRTQAILQIPVPKTKRQVREFLGTIGYCRLWIPGFAELAQPLYAATRPGNDPLVWGEKEEEAFQSLKLALTQPPALALPSLDKPFQLFVEETSGAAKGVLTQALGPWKRPVAYLSKRLDPVAAGWPRCLRAIAAAALLTREASKLTFGQDIEITSSHNLESLLRSPPDKWLTNARITQYQVLLLDPPRVRFKQTAALNPATLLPETDDTLPIHHCLDTLDSLTSTRPDLTDQPLAQAEATLFTDGSSYIRDGKRYAGAAVVTLDSVIWAEPLPIGTSAQKAELIALTKALEWSKDKSVNIYTDSRYAFATLHVHGMIYRERGWLTAGGKAIKNAPEILALLTAVWLPKRVAVMHCKGHQKDDAPTSTGNRRADEVAREVAIRPLSTQATISAGKRTADGSEFEKRTADGSEFESPKKKAKVE

SEQ ID NO: 6493 - protein, 2098 aa, synthetic construct
MPAAKRVKLDGGDKKYSIGLDIGTNSVGWAVITDEYKVPSKKFKVLGNTDRHSIKKNLIGALLFDSGETAEATRLKRTARRRYTRRKNRICYLQEIFSNEMAKVDDSFFHRLEESFLVEEDKKHERHPIFGNIVDEVAYHEKYPTIYHLRKKLVDSTDKADLRLIYLALAHMIKFRGHFLIEGDLNPDNSDVDKLFIQLVQTYNQLFEENPINASGVDAKAILSARLSKSRRLENLIAQLPGEKKNGLFGNLIALSLGLTPNFKSNFDLAEDAKLQLSKDTYDDDLDNLLAQIGDQYADLFLAAKNLSDAILLSDILRVNTEITKAPLSASMIKRYDEHHQDLTLLKALVRQQLPEKYKEIFFDQSKNGYAGYIDGGASQEEFYKFIKPILEKMDGTEELLVKLNREDLLRKQRTFDNGSIPHQIHLGELHAILRRQEDFYPFLKDNREKIEKILTFRIPYYVGPLARGNSRFAWMTRKSEETITPWNFEEVVDKGASAQSFIERMTNFDKNLPNEKVLPKHSLLYEYFTVYNELTKVKYVTEGMRKPAFLSGEQKKAIVDLLFKTNRKVTVKQLKEDYFKKIECFDSVEISGVEDRFNASLGTYHDLLKIIKDKDFLDNEENEDILEDIVLTLTLFEDREMIEERLKTYAHLFDDKVMKQLKRRRYTGWGRLSRKLINGIRDKQSGKTILDFLKSDGFANRNFMQLIHDDSLTFKEDIQKAQVSGQGDSLHEHIANLAGSPAIKKGILQTVKVVDELVKVMGRHKPENIVIEMARENQTTQKGQKNSRERMKRIEEGIKELGSQILKEHPVENTQLQNEKLYLYYLQNGRDMYVDQELDINRLSDYDVDHIVPQSFLKDDSIDNKVLTRSDKARGKSDNVPSEEVVKKMKNYWRQLLNAKLITQRKFDNLTKAERGGLSELDKAGFIKRQLVETRQITKHVAQILDSRMNTKYDENDKLIREVKVITLKSKLVSDFRKDFQFYKVREINNYHHAHDAYLNAVVGTALIKKYPKLESEFVYGDYKVYDVRKMIAKSEQEIGKATAKYFFYSNIMNFFKTEITLANGEIRKRPLIETNGETGEIVWDKGRDFATVRKVLSMPQVNIVKKTEVQTGGFSKESILPKRNSDKLIARKKDWDPKKYGGFDSPTVAYSVLVVAKVEKGKSKKLKSVKELLGITIMERSSFEKNPIDFLEAKGYKEVKKDLIIKLPKYSLFELENGRKRMLASAGELQKGNELALPSKYVNFLYLASHYEKLKGSPEDNEQKQLFVEQHKHYLDEIIEQISEFSKRVILADANLDKVLSAYNKHRDKPIREQAENIIHLFTLTNLGAPAAFKYFDTTIDRKRYTSTKEVLDATLIHQSITGLYETRIDLSQLGGDGGPAPAPAPGGTVSLQDEHRLFDIPVTTSLPDVWLQDFPQAWAETGGLGRAKCQAPIIIDLKPTAVPVSIKQYPMSLEAHMGIRQHIIKFLELGVLRPCRSPWNTPLLPVKKPGTQDYRPVQDLREINKRTVDIHPTVPNPYNLLSTLKPDYSWYTVLDLKDAFFCLPLAPQSQELFAFEWKDPERGISGQLTWTRLPQGFKNSPTLFNEALHRDLTDFRTQHPEVTLLQYVDDLLLAAPTKKACTQGTRHLLQELGEKGYRASAKKAQICQTKVTYLGYILSEGKRWLTPGRIETVARIPPPRNPREVREFLGTAGFCRLWIPGFAELAAPLYALTKPSTPFTWQTEHQLAFEALKKALLSAPALGLPDTSKPFTLFLDERQGIAKGVLTQKLGPWKRPVAYLSKKLDPVAAGWPPCLRIMAATAMLVKDSAKLTLGQPLTVITPHTLEAIVRQPPDRWITNARLTHYQALLLDTDRVQFGPPVTLNPATLLPVPENQPSPHDCRQVLAETHGTREDLKDQELPDADHTWYTDGSSYLDSGTRRAGAAVVDGHNTIWAQSLPPGTSAQKAELIALTKALELSKGKKANIYTDSRYAFATAHTHGSIYERRGWLTSEGKEIKNKAEIIALLKALFLPQEVAIIHCPGHQKGQDPVAVGNRQADRVARQAAMAEVLTLATEPDNTSHITAGKRTADGSEFEKRTADGSEFESPKKKAKVE

SEQ ID NO: 6494 - protein, 2169 aa, synthetic construct
MPAAKRVKLDGGDKKYSIGLDIGTNSVGWAVITDEYKVPSKKFKVLGNTDRHSIKKNLIGALLFDSGETAEATRLKRTARRRYTRRKNRICYLQEIFSNEMAKVDDSFFHRLEESFLVEEDKKHERHPIFGNIVDEVAYHEKYPTIYHLRKKLVDSTDKADLRLIYLALAHMIKFRGHFLIEGDLNPDNSDVDKLFIQLVQTYNQLFEENPINASGVDAKAILSARLSKSRRLENLIAQLPGEKKNGLFGNLIALSLGLTPNFKSNFDLAEDAKLQLSKDTYDDDLDNLLAQIGDQYADLFLAAKNLSDAILLSDILRVNTEITKAPLSASMIKRYDEHHQDLTLLKALVRQQLPEKYKEIFFDQSKNGYAGYIDGGASQEEFYKFIKPILEKMDGTEELLVKLNREDLLRKQRTFDNGSIPHQIHLGELHAILRRQEDFYPFLKDNREKIEKILTFRIPYYVGPLARGNSRFAWMTRKSEETITPWNFEEVVDKGASAQSFIERMTNFDKNLPNEKVLPKHSLLYEYFTVYNELTKVKYVTEGMRKPAFLSGEQKKAIVDLLFKTNRKVTVKQLKEDYFKKIECFDSVEISGVEDRFNASLGTYHDLLKIIKDKDFLDNEENEDILEDIVLTLTLFEDREMIEERLKTYAHLFDDKVMKQLKRRRYTGWGRLSRKLINGIRDKQSGKTILDFLKSDGFANRNFMQLIHDDSLTFKEDIQKAQVSGQGDSLHEHIANLAGSPAIKKGILQTVKVVDELVKVMGRHKPENIVIEMARENQTTQKGQKNSRERMKRIEEGIKELGSQILKEHPVENTQLQNEKLYLYYLQNGRDMYVDQELDINRLSDYDVDHIVPQSFLKDDSIDNKVLTRSDKARGKSDNVPSEEVVKKMKNYWRQLLNAKLITQRKFDNLTKAERGGLSELDKAGFIKRQLVETRQITKHVAQILDSRMNTKYDENDKLIREVKVITLKSKLVSDFRKDFQFYKVREINNYHHAHDAYLNAVVGTALIKKYPKLESEFVYGDYKVYDVRKMIAKSEQEIGKATAKYFFYSNIMNFFKTEITLANGEIRKRPLIETNGETGEIVWDKGRDFATVRKVLSMPQVNIVKKTEVQTGGFSKESILPKRNSDKLIARKKDWDPKKYGGFDSPTVAYSVLVVAKVEKGKSKKLKSVKELLGITIMERSSFEKNPIDFLEAKGYKEVKKDLIIKLPKYSLFELENGRKRMLASAGELQKGNELALPSKYVNFLYLASHYEKLKGSPEDNEQKQLFVEQHKHYLDEIIEQISEFSKRVILADANLDKVLSAYNKHRDKPIREQAENIIHLFTLTNLGAPAAFKYFDTTIDRKRYTSTKEVLDATLIHQSITGLYETRIDLSQLGGDGGPAPAPAPGGMDLLKPLTVERKGVKIKGYWNSQADITCVPKDLLQGEEPVRQQNVTTIHGTQEGDVYYVNLKIDGRRINTEVIGTTLDYAIITPGDVPWILKKPLELTIKLDLEEQQGTLLNNSILSKKGKEELKQLFEKYSALWQSWENQVGHRRIRPHKIATGTVKPTPQKQYHINPKAKPDIQIVINDLLKQGVLIQKESTMNTPVYPVPKPNGRWRMVLDYRAVNKVTPLIAVQNQHSYGILGSLFKGRYKTTIDLSNGFWAHPIVPEDYWITAFTWQGKQYCWTVLPQGFLNSPGLFNGDVVDLLQGIPNVEVYVDDVYISHDSEKEHLEYLDILFNRLKEAGYIISLKKSNIANSIVDFLGFQITNEGRGLTDTFKEKLENITAPTTLKQLQSILGLLNFARNFIPDFTELIAPLYALIPKSPKNYVPWQIEHSTTLETLITKLNGAEYLQGRKGDKTLIMKVNASYTTGYIRYYNEGEKKPISYVSIVFSKTELKFTELEKLLTTVHKGLLKALDLSMGQNIHVYSPIVSMQNIQKTPQTAKKALASRWLSWLSYLEDPRIRFFYDPQMPALKDLPAVDTGKDNKKHPSNFQHIFYTDGSAITSPTKEGHLNAGMGIVYFINKDGNLQKQQEWSISLGNHTAQFAEIAAFEFALKKCLPLGGNILVVTDSNYVAKAYNEELDVWASNGFVNNRKKPLKHISKWKSVADLKRLRPDVVVTHEPGHQKLDSSPHAYGNNLADQLATQASFKVHAGKRTADGSEFEKRTADGSEFESPKKKAKVE

SEQ ID NO: 6495 - protein, 2091 aa, synthetic construct
MPAAKRVKLDGGDKKYSIGLDIGTNSVGWAVITDEYKVPSKKFKVLGNTDRHSIKKNLIGALLFDSGETAEATRLKRTARRRYTRRKNRICYLQEIFSNEMAKVDDSFFHRLEESFLVEEDKKHERHPIFGNIVDEVAYHEKYPTIYHLRKKLVDSTDKADLRLIYLALAHMIKFRGHFLIEGDLNPDNSDVDKLFIQLVQTYNQLFEENPINASGVDAKAILSARLSKSRRLENLIAQLPGEKKNGLFGNLIALSLGLTPNFKSNFDLAEDAKLQLSKDTYDDDLDNLLAQIGDQYADLFLAAKNLSDAILLSDILRVNTEITKAPLSASMIKRYDEHHQDLTLLKALVRQQLPEKYKEIFFDQSKNGYAGYIDGGASQEEFYKFIKPILEKMDGTEELLVKLNREDLLRKQRTFDNGSIPHQIHLGELHAILRRQEDFYPFLKDNREKIEKILTFRIPYYVGPLARGNSRFAWMTRKSEETITPWNFEEVVDKGASAQSFIERMTNFDKNLPNEKVLPKHSLLYEYFTVYNELTKVKYVTEGMRKPAFLSGEQKKAIVDLLFKTNRKVTVKQLKEDYFKKIECFDSVEISGVEDRFNASLGTYHDLLKIIKDKDFLDNEENEDILEDIVLTLTLFEDREMIEERLKTYAHLFDDKVMKQLKRRRYTGWGRLSRKLINGIRDKQSGKTILDFLKSDGFANRNFMQLIHDDSLTFKEDIQKAQVSGQGDSLHEHIANLAGSPAIKKGILQTVKVVDELVKVMGRHKPENIVIEMARENQTTQKGQKNSRERMKRIEEGIKELGSQILKEHPVENTQLQNEKLYLYYLQNGRDMYVDQELDINRLSDYDVDHIVPQSFLKDDSIDNKVLTRSDKARGKSDNVPSEEVVKKMKNYWRQLLNAKLITQRKFDNLTKAERGGLSELDKAGFIKRQLVETRQITKHVAQILDSRMNTKYDENDKLIREVKVITLKSKLVSDFRKDFQFYKVREINNYHHAHDAYLNAVVGTALIKKYPKLESEFVYGDYKVYDVRKMIAKSEQEIGKATAKYFFYSNIMNFFKTEITLANGEIRKRPLIETNGETGEIVWDKGRDFATVRKVLSMPQVNIVKKTEVQTGGFSKESILPKRNSDKLIARKKDWDPKKYGGFDSPTVAYSVLVVAKVEKGKSKKLKSVKELLGITIMERSSFEKNPIDFLEAKGYKEVKKDLIIKLPKYSLFELENGRKRMLASAGELQKGNELALPSKYVNFLYLASHYEKLKGSPEDNEQKQLFVEQHKHYLDEIIEQISEFSKRVILADANLDKVLSAYNKHRDKPIREQAENIIHLFTLTNLGAPAAFKYFDTTIDRKRYTSTKEVLDATLIHQSITGLYETRIDLSQLGGDGGPAPAPAPGGTLQLEEEYRLFEPESTQKQEMDIWLKNFPQAWAETGGMGTAHCQAPVLIQLKATATPISIRQYPMPHEAYQGIKPHIRRMLDQGILKPCQSPWNTPLLPVKKPGTEDYRPVQDLREVNKRVEDIHPTVPNPYNLLSTLPPSHPWYTVLDLKDAFFCLRLHSESQLLFAFEWRDPEIGLSGQLTWTRLPQGFKNSPTLFNEALHSDLADFRVRYPALVLLQYVDDLLLAAATRTECLEGTKALLETLGNKGYRASAKKAQICLQEVTYLGYSLKDGQRWLTKARKEAILSIPVPKNSRQVREFLGTAGYCRLWIPGFAELAAPLYPLTRPGTLFQWGTEQQLAFEDIKKALLSSPALGLPDITKPFELFIDENSGFAKGVLVQKLGPWKRPVAYLSKKLDTVASGWPPCLRMVAAIAILVKDAGKLTLGQPLTILTSHPVEALVRQPPNKWLSNARMTHYQAMLLDAERVHFGPTVSLNPATLLPLPSGGNHHDCLQILAETHGTRPDLTDQPLPDADLTWYTDGSSFIRNGEREAGAAVTTESEVIWAAPLPPGTSAQRAELIALTQALKMAEGKKLTVYTDSRYAFATTHVHGEIYRRRGWLTSEGKEIKNKNEILALLEALFLPKRLSIIHCPGHQKGDSPQAKGNRLADDTAKKAATETHSSLTVLPAGKRTADGSEFEKRTADGSEFESPKKKAKVE

SEQ ID NO: 6496 - protein, 2091 aa, synthetic construct
MPAAKRVKLDGGDKKYSIGLDIGTNSVGWAVITDEYKVPSKKFKVLGNTDRHSIKKNLIGALLFDSGETAEATRLKRTARRRYTRRKNRICYLQEIFSNEMAKVDDSFFHRLEESFLVEEDKKHERHPIFGNIVDEVAYHEKYPTIYHLRKKLVDSTDKADLRLIYLALAHMIKFRGHFLIEGDLNPDNSDVDKLFIQLVQTYNQLFEENPINASGVDAKAILSARLSKSRRLENLIAQLPGEKKNGLFGNLIALSLGLTPNFKSNFDLAEDAKLQLSKDTYDDDLDNLLAQIGDQYADLFLAAKNLSDAILLSDILRVNTEITKAPLSASMIKRYDEHHQDLTLLKALVRQQLPEKYKEIFFDQSKNGYAGYIDGGASQEEFYKFIKPILEKMDGTEELLVKLNREDLLRKQRTFDNGSIPHQIHLGELHAILRRQEDFYPFLKDNREKIEKILTFRIPYYVGPLARGNSRFAWMTRKSEETITPWNFEEVVDKGASAQSFIERMTNFDKNLPNEKVLPKHSLLYEYFTVYNELTKVKYVTEGMRKPAFLSGEQKKAIVDLLFKTNRKVTVKQLKEDYFKKIECFDSVEISGVEDRFNASLGTYHDLLKIIKDKDFLDNEENEDILEDIVLTLTLFEDREMIEERLKTYAHLFDDKVMKQLKRRRYTGWGRLSRKLINGIRDKQSGKTILDFLKSDGFANRNFMQLIHDDSLTFKEDIQKAQVSGQGDSLHEHIANLAGSPAIKKGILQTVKVVDELVKVMGRHKPENIVIEMARENQTTQKGQKNSRERMKRIEEGIKELGSQILKEHPVENTQLQNEKLYLYYLQNGRDMYVDQELDINRLSDYDVDHIVPQSFLKDDSIDNKVLTRSDKARGKSDNVPSEEVVKKMKNYWRQLLNAKLITQRKFDNLTKAERGGLSELDKAGFIKRQLVETRQITKHVAQILDSRMNTKYDENDKLIREVKVITLKSKLVSDFRKDFQFYKVREINNYHHAHDAYLNAVVGTALIKKYPKLESEFVYGDYKVYDVRKMIAKSEQEIGKATAKYFFYSNIMNFFKTEITLANGEIRKRPLIETNGETGEIVWDKGRDFATVRKVLSMPQVNIVKKTEVQTGGFSKESILPKRNSDKLIARKKDWDPKKYGGFDSPTVAYSVLVVAKVEKGKSKKLKSVKELLGITIMERSSFEKNPIDFLEAKGYKEVKKDLIIKLPKYSLFELENGRKRMLASAGELQKGNELALPSKYVNFLYLASHYEKLKGSPEDNEQKQLFVEQHKHYLDEIIEQISEFSKRVILADANLDKVLSAYNKHRDKPIREQAENIIHLFTLTNLGAPAAFKYFDTTIDRKRYTSTKEVLDATLIHQSITGLYETRIDLSQLGGDGGPAPAPAPGGTLQLEEEYRLFEPESTQKQEMDIWLKNFPQAWAETGGMGTAHCQAPVLIQLKATATPISIRQYPMPHEAYQGIKPHIRRMLDQGILKPCQSPWNTPLLPVKKPGTEDYRPVQDLREVNKRVEDIHPTVPNPYNLLSTLPPSHPWYTVLDLKDAFFCLRLHSESQLLFAFEWRDPEIGLSGQLTWTRLPQGFKNSPTLFNEALHSDLADFRVRYPALVLLQYVDDLLLAAATRTECLEGTKALLETLGNKGYRASAKKAQICLQEVTYLGYSLKDGQRWLTKARKEAILSIPVPKNSRQVREFLGKAGYCRLFIPGFAELAAPLYPLTRPGTLFQWGTEQQLAFEDIKKALLSSPALGLPDITKPFELFIDENSGFAKGVLVQKLGPWKRPVAYLSKKLDTVASGWPPCLRMVAAIAILVKDAGKLTLGQPLTILTSHPVEALVRQPPNKWLSNARMTHYQAMLLDAERVHFGPTVSLNPATLLPLPSGGNHHDCLQILAETHGTRPDLTDQPLPDADLTWYTDGSSFIRNGEREAGAAVTTESEVIWAAPLPPGTSAQRAELIALTQALKMAEGKKLTVYTDSRYAFATTHVHGEIYRRRGWLTSEGKEIKNKNEILALLEALFLPKRLSIIHCPGHQKGDSPQAKGNRLADDTAKKAATETHSSLTVLPAGKRTADGSEFEKRTADGSEFESPKKKAKVE

SEQ ID NO: 6497 - protein, 2090 aa, synthetic construct
MPAAKRVKLDGGDKKYSIGLDIGTNSVGWAVITDEYKVPSKKFKVLGNTDRHSIKKNLIGALLFDSGETAEATRLKRTARRRYTRRKNRICYLQEIFSNEMAKVDDSFFHRLEESFLVEEDKKHERHPIFGNIVDEVAYHEKYPTIYHLRKKLVDSTDKADLRLIYLALAHMIKFRGHFLIEGDLNPDNSDVDKLFIQLVQTYNQLFEENPINASGVDAKAILSARLSKSRRLENLIAQLPGEKKNGLFGNLIALSLGLTPNFKSNFDLAEDAKLQLSKDTYDDDLDNLLAQIGDQYADLFLAAKNLSDAILLSDILRVNTEITKAPLSASMIKRYDEHHQDLTLLKALVRQQLPEKYKEIFFDQSKNGYAGYIDGGASQEEFYKFIKPILEKMDGTEELLVKLNREDLLRKQRTFDNGSIPHQIHLGELHAILRRQEDFYPFLKDNREKIEKILTFRIPYYVGPLARGNSRFAWMTRKSEETITPWNFEEVVDKGASAQSFIERMTNFDKNLPNEKVLPKHSLLYEYFTVYNELTKVKYVTEGMRKPAFLSGEQKKAIVDLLFKTNRKVTVKQLKEDYFKKIECFDSVEISGVEDRFNASLGTYHDLLKIIKDKDFLDNEENEDILEDIVLTLTLFEDREMIEERLKTYAHLFDDKVMKQLKRRRYTGWGRLSRKLINGIRDKQSGKTILDFLKSDGFANRNFMQLIHDDSLTFKEDIQKAQVSGQGDSLHEHIANLAGSPAIKKGILQTVKVVDELVKVMGRHKPENIVIEMARENQTTQKGQKNSRERMKRIEEGIKELGSQILKEHPVENTQLQNEKLYLYYLQNGRDMYVDQELDINRLSDYDVDHIVPQSFLKDDSIDNKVLTRSDKARGKSDNVPSEEVVKKMKNYWRQLLNAKLITQRKFDNLTKAERGGLSELDKAGFIKRQLVETRQITKHVAQILDSRMNTKYDENDKLIREVKVITLKSKLVSDFRKDFQFYKVREINNYHHAHDAYLNAVVGTALIKKYPKLESEFVYGDYKVYDVRKMIAKSEQEIGKATAKYFFYSNIMNFFKTEITLANGEIRKRPLIETNGETGEIVWDKGRDFATVRKVLSMPQVNIVKKTEVQTGGFSKESILPKRNSDKLIARKKDWDPKKYGGFDSPTVAYSVLVVAKVEKGKSKKLKSVKELLGITIMERSSFEKNPIDFLEAKGYKEVKKDLIIKLPKYSLFELENGRKRMLASAGELQKGNELALPSKYVNFLYLASHYEKLKGSPEDNEQKQLFVEQHKHYLDEIIEQISEFSKRVILADANLDKVLSAYNKHRDKPIREQAENIIHLFTLTNLGAPAAFKYFDTTIDRKRYTSTKEVLDATLIHQSITGLYETRIDLSQLGGDGGPAPAPAPGGVLNLEEEYRLHEKPVPSSIDPSWLQLFPTVWAERAGMGLANQVPPVVVELRSGASPVAVRQYPMSKEAREGIRPHIQKFLDLGVLVPCRSPWNTPLLPVKKPGTNDYRPVQDLREINKRVQDIHPTVPNPYNLLSSLPPSYTWYSVLDLKDAFFCLRLHPNSQPLFAFEWKDPEKGNTGQLTWTRLPQGFKNSPTLFNEALHRDLAPFRALNPQVVLLQYVDDLLVAAPTYEDCKKGTQKLLQELSKLGYRVSAKKAQLCQREVTYLGYLLKEGKRWLTPARKATVMKIPVPTTPRQVREFLGKAGFCRLFIPGFASLAAPLYPLTKPSIPFIWTEEHQQAFDHIKKALLSAPALALPDLTKPFTLYIDERAGVARGVLTQTLGPWRRPVAYLSKKLDPVASGWPTCLKAVAAVALLLKDADKLTLGQNVTVIASHSLESIVRQPPDRWMTNARMTHYQSLLLNERVSFAPPAVLNPATLLPVESEATPVHRCSEILAEETGTRRDLEDQPLPGVPTWYTDGSSFITEGKRRAGAPIVDGKRTVWASSLPEGTSAQKAELVALTQALRLAEGKNINIYTDSRYAFATAHIHGAIYKQRGWLTSAGKDIKNKEEILALLEAIHLPRRVAIIHCPGHQRGSNPVATGNRRADEAAKQAALSTRVLAGTTKPAGKRTADGSEFEKRTADGSEFESPKKKAKVE

SEQ ID NO: 6498 - protein, 2005 aa, synthetic construct
MPAAKRVKLDGGDKKYSIGLDIGTNSVGWAVITDEYKVPSKKFKVLGNTDRHSIKKNLIGALLFDSGETAEATRLKRTARRRYTRRKNRICYLQEIFSNEMAKVDDSFFHRLEESFLVEEDKKHERHPIFGNIVDEVAYHEKYPTIYHLRKKLVDSTDKADLRLIYLALAHMIKFRGHFLIEGDLNPDNSDVDKLFIQLVQTYNQLFEENPINASGVDAKAILSARLSKSRRLENLIAQLPGEKKNGLFGNLIALSLGLTPNFKSNFDLAEDAKLQLSKDTYDDDLDNLLAQIGDQYADLFLAAKNLSDAILLSDILRVNTEITKAPLSASMIKRYDEHHQDLTLLKALVRQQLPEKYKEIFFDQSKNGYAGYIDGGASQEEFYKFIKPILEKMDGTEELLVKLNREDLLRKQRTFDNGSIPHQIHLGELHAILRRQEDFYPFLKDNREKIEKILTFRIPYYVGPLARGNSRFAWMTRKSEETITPWNFEEVVDKGASAQSFIERMTNFDKNLPNEKVLPKHSLLYEYFTVYNELTKVKYVTEGMRKPAFLSGEQKKAIVDLLFKTNRKVTVKQLKEDYFKKIECFDSVEISGVEDRFNASLGTYHDLLKIIKDKDFLDNEENEDILEDIVLTLTLFEDREMIEERLKTYAHLFDDKVMKQLKRRRYTGWGRLSRKLINGIRDKQSGKTILDFLKSDGFANRNFMQLIHDDSLTFKEDIQKAQVSGQGDSLHEHIANLAGSPAIKKGILQTVKVVDELVKVMGRHKPENIVIEMARENQTTQKGQKNSRERMKRIEEGIKELGSQILKEHPVENTQLQNEKLYLYYLQNGRDMYVDQELDINRLSDYDVDHIVPQSFLKDDSIDNKVLTRSDKARGKSDNVPSEEVVKKMKNYWRQLLNAKLITQRKFDNLTKAERGGLSELDKAGFIKRQLVETRQITKHVAQILDSRMNTKYDENDKLIREVKVITLKSKLVSDFRKDFQFYKVREINNYHHAHDAYLNAVVGTALIKKYPKLESEFVYGDYKVYDVRKMIAKSEQEIGKATAKYFFYSNIMNFFKTEITLANGEIRKRPLIETNGETGEIVWDKGRDFATVRKVLSMPQVNIVKKTEVQTGGFSKESILPKRNSDKLIARKKDWDPKKYGGFDSPTVAYSVLVVAKVEKGKSKKLKSVKELLGITIMERSSFEKNPIDFLEAKGYKEVKKDLIIKLPKYSLFELENGRKRMLASAGELQKGNELALPSKYVNFLYLASHYEKLKGSPEDNEQKQLFVEQHKHYLDEIIEQISEFSKRVILADANLDKVLSAYNKHRDKPIREQAENIIHLFTLTNLGAPAAFKYFDTTIDRKRYTSTKEVLDATLIHQSITGLYETRIDLSQLGGDGGPAPAPAPGGHLPPPPQVDQFPLNLPERLQALNDLVSKALEAGHIEPYSGPGNNPVFPVKKPNGKWRFIHDLRATNAITTTLTSPSPGPPDLTSLPTALPHLQTIDLTDAFFQIPLPKQYQPYFAFTIPQPCNYGPGTRYAWTVLPQGFKNSPTLFQQQLAAVLNPMRKMFPTSTIVQYMDDILLASPTNEELQQLSQLTLQALTTHGLPISQEKTQQTPGQIRFLGQVISPNHITYESTPTIPIKSQWTLTELQVILGEIQWVSKGTPILRKHLQSLYSALHPYRDPRACITLTPQQLHALHAIQQALQHNCRGRLNPALPLLGLISLSTSGTTSVIFQPKQNWPLAWLHTPHPPTSLCPWGHLLACTILTLDKYTLQHYGQLCQSFHHNMSKQALCDFLRNSPHPSVGILIHHMGRFHNLGSQPSGPWKTLLHLPTLLQEPRLLRPIFTLSPVVLDTAPCLFSDGSPQKAAYVLWDQTILQQDITPLPSHETHSAQKGELLALICGLRAAKPWPSLNIFLDSKYLIKYLHSLAIGAFLGTSAHQTLQAALPPLLQGKTIYLHHVRSHTNLPDPISTFNEYTDSLILAPLVPLAGKRTADGSEFEKRTADGSEFESPKKKAKVE

SEQ ID NO: 6499 - protein, 2214 aa, synthetic construct
MPAAKRVKLDGGDKKYSIGLDIGTNSVGWAVITDEYKVPSKKFKVLGNTDRHSIKKNLIGALLFDSGETAEATRLKRTARRRYTRRKNRICYLQEIFSNEMAKVDDSFFHRLEESFLVEEDKKHERHPIFGNIVDEVAYHEKYPTIYHLRKKLVDSTDKADLRLIYLALAHMIKFRGHFLIEGDLNPDNSDVDKLFIQLVQTYNQLFEENPINASGVDAKAILSARLSKSRRLENLIAQLPGEKKNGLFGNLIALSLGLTPNFKSNFDLAEDAKLQLSKDTYDDDLDNLLAQIGDQYADLFLAAKNLSDAILLSDILRVNTEITKAPLSASMIKRYDEHHQDLTLLKALVRQQLPEKYKEIFFDQSKNGYAGYIDGGASQEEFYKFIKPILEKMDGTEELLVKLNREDLLRKQRTFDNGSIPHQIHLGELHAILRRQEDFYPFLKDNREKIEKILTFRIPYYVGPLARGNSRFAWMTRKSEETITPWNFEEVVDKGASAQSFIERMTNFDKNLPNEKVLPKHSLLYEYFTVYNELTKVKYVTEGMRKPAFLSGEQKKAIVDLLFKTNRKVTVKQLKEDYFKKIECFDSVEISGVEDRFNASLGTYHDLLKIIKDKDFLDNEENEDILEDIVLTLTLFEDREMIEERLKTYAHLFDDKVMKQLKRRRYTGWGRLSRKLINGIRDKQSGKTILDFLKSDGFANRNFMQLIHDDSLTFKEDIQKAQVSGQGDSLHEHIANLAGSPAIKKGILQTVKVVDELVKVMGRHKPENIVIEMARENQTTQKGQKNSRERMKRIEEGIKELGSQILKEHPVENTQLQNEKLYLYYLQNGRDMYVDQELDINRLSDYDVDHIVPQSFLKDDSIDNKVLTRSDKARGKSDNVPSEEVVKKMKNYWRQLLNAKLITQRKFDNLTKAERGGLSELDKAGFIKRQLVETRQITKHVAQILDSRMNTKYDENDKLIREVKVITLKSKLVSDFRKDFQFYKVREINNYHHAHDAYLNAVVGTALIKKYPKLESEFVYGDYKVYDVRKMIAKSEQEIGKATAKYFFYSNIMNFFKTEITLANGEIRKRPLIETNGETGEIVWDKGRDFATVRKVLSMPQVNIVKKTEVQTGGFSKESILPKRNSDKLIARKKDWDPKKYGGFDSPTVAYSVLVVAKVEKGKSKKLKSVKELLGITIMERSSFEKNPIDFLEAKGYKEVKKDLIIKLPKYSLFELENGRKRMLASAGELQKGNELALPSKYVNFLYLASHYEKLKGSPEDNEQKQLFVEQHKHYLDEIIEQISEFSKRVILADANLDKVLSAYNKHRDKPIREQAENIIHLFTLTNLGAPAAFKYFDTTIDRKRYTSTKEVLDATLIHQSITGLYETRIDLSQLGGDGGPAPAPAPGGTLGDQGSRGSDPLPEPRVTLTVEGIPTEFLVNTGAEHSVLTKPMGKMGSKRTVVAGATGSKVYPWTTKRLLKIGQKQVTHSFLVIPECPAPLLGRDLLTKLKAQIQFSTEGPQVTWEDRPAMCLVLNLEEEYRLHEKPVPPSIDPSWLQLFPMVWAEKAGMGLANQVPPVVVELKSDASPVAVRQYPMSKEAREGIRPHIQRFLDLGILVPCQSPWNTPLLPVKKPGTNDYRPVQDLREVNKRVQDIHPTVPNPYNLLSSLPPSHTWYSVLDLKDAFFCLKLHPNSQPLFAFEWRDPEKGNTGQLTWTRLPQGFKNSPTLFNEALHRDLASFRALNPQVVMLQYVDDLLVAAPTYRDCKEGTRRLLQELSKLGYRVSAKKAQLCREEVTYLGYLLKGGKRWLTPARKATVMKIPTPTTPRQVREFLGKAGFCRLFIPGFASLAAPLYPLTRPKVPFTWTEAHQEAFGRIKEALLSAPALALPDLTKPFALYVDEKEGVARGVLTQTLGPWRRPVAYLSKKLDPVASGWPTCLKAIAAVALLLKDADKLTLGQNVLVIAPHNLESIVRQPPDRWMTNARMTHYQSLLLNERVSFAPPAILNPATLLPVESDDTPIHICSEILAEETGTRPDLRDQPLPGVPAWYTDGSSFIMDGRRQAGAAIVDNKRTVWASNLPEGTSAQKAELIALTQALRLAEGKSINIYTDSRYAFATAHVHGAIYKQRGWLTSAGKDIKNKEEILALLEAIHLPKRVAIIHCPGHQRGTDPVATGNRKADEAAKQAAQSTRILTETTKNAGKRTADGSEFEKRTADGSEFESPKKKAKVE

SEQ ID NO: 6500 - protein, 2092 aa, synthetic construct
MPAAKRVKLDGGDKKYSIGLDIGTNSVGWAVITDEYKVPSKKFKVLGNTDRHSIKKNLIGALLFDSGETAEATRLKRTARRRYTRRKNRICYLQEIFSNEMAKVDDSFFHRLEESFLVEEDKKHERHPIFGNIVDEVAYHEKYPTIYHLRKKLVDSTDKADLRLIYLALAHMIKFRGHFLIEGDLNPDNSDVDKLFIQLVQTYNQLFEENPINASGVDAKAILSARLSKSRRLENLIAQLPGEKKNGLFGNLIALSLGLTPNFKSNFDLAEDAKLQLSKDTYDDDLDNLLAQIGDQYADLFLAAKNLSDAILLSDILRVNTEITKAPLSASMIKRYDEHHQDLTLLKALVRQQLPEKYKEIFFDQSKNGYAGYIDGGASQEEFYKFIKPILEKMDGTEELLVKLNREDLLRKQRTFDNGSIPHQIHLGELHAILRRQEDFYPFLKDNREKIEKILTFRIPYYVGPLARGNSRFAWMTRKSEETITPWNFEEVVDKGASAQSFIERMTNFDKNLPNEKVLPKHSLLYEYFTVYNELTKVKYVTEGMRKPAFLSGEQKKAIVDLLFKTNRKVTVKQLKEDYFKKIECFDSVEISGVEDRFNASLGTYHDLLKIIKDKDFLDNEENEDILEDIVLTLTLFEDREMIEERLKTYAHLFDDKVMKQLKRRRYTGWGRLSRKLINGIRDKQSGKTILDFLKSDGFANRNFMQLIHDDSLTFKEDIQKAQVSGQGDSLHEHIANLAGSPAIKKGILQTVKVVDELVKVMGRHKPENIVIEMARENQTTQKGQKNSRERMKRIEEGIKELGSQILKEHPVENTQLQNEKLYLYYLQNGRDMYVDQELDINRLSDYDVDHIVPQSFLKDDSIDNKVLTRSDKARGKSDNVPSEEVVKKMKNYWRQLLNAKLITQRKFDNLTKAERGGLSELDKAGFIKRQLVETRQITKHVAQILDSRMNTKYDENDKLIREVKVITLKSKLVSDFRKDFQFYKVREINNYHHAHDAYLNAVVGTALIKKYPKLESEFVYGDYKVYDVRKMIAKSEQEIGKATAKYFFYSNIMNFFKTEITLANGEIRKRPLIETNGETGEIVWDKGRDFATVRKVLSMPQVNIVKKTEVQTGGFSKESILPKRNSDKLIARKKDWDPKKYGGFDSPTVAYSVLVVAKVEKGKSKKLKSVKELLGITIMERSSFEKNPIDFLEAKGYKEVKKDLIIKLPKYSLFELENGRKRMLASAGELQKGNELALPSKYVNFLYLASHYEKLKGSPEDNEQKQLFVEQHKHYLDEIIEQISEFSKRVILADANLDKVLSAYNKHRDKPIREQAENIIHLFTLTNLGAPAAFKYFDTTIDRKRYTSTKEVLDATLIHQSITGLYETRIDLSQLGGDGGPAPAPAPGGTLNLEDEYRLYETSAEPEVSPGSTWLSDFPQAWAETGGMGLAVRQAPLIIPLKATSTPVSIKQYPMSQEAKLGIKPHIQRLLDQGILVPCQSPWNTPLLPVKKPGTNDYRPVQDLREVNKRVEDIHPTVPNPYNLLSGLPPSHRWYTVLDLKDAFFCLRLHPTSQPLFAFEWRDPGMGISGQLTWTRLPQGFKNSPTLFNEALHRDLADFRIQHPDLILLQYVDDILLAATSELDCQQGTRALLLTLGNLGYRASAKKAQLCQKQVKYLGYLLKEGQRWLTEARKETVMGQPTPKTPRQLREFLGTAGFCRLWIPGFAEMAAPLYPLTKPGTLFNWGPDQQKAYQEIKQALLTAPALGLPDLTKPFELFVDEKQGYAKGVLTQKLGPWRRPVAYLSKKLDPVAAGWPPCLRMVAAIAVLRKDAGKLTMGQPLVILAPHAVEALVKQPPDRWLSNARMTHYQAMLLDTDRVQFGPVVALNPATLLPLPEEGAPHDCLEILAETHGTRPDLTDQPIPDADHTWYTDGSSFLQEGQRKAGAAVTTETEVIWARALPAGTSAQRAELIALTQALKMAEGKRLNVYTDSRYAFATAHIHGEIYRRRGWLTSEGREIKNKSEILALLKALFLPKRLSIIHCLGHQKGDSAEARGNRLADQAAREAAIKTPPDTSTLLAGKRTADGSEFEKRTADGSEFESPKKKAKVE

SEQ ID NO: 6501 - protein, 2092 aa, synthetic construct
MPAAKRVKLDGGDKKYSIGLDIGTNSVGWAVITDEYKVPSKKFKVLGNTDRHSIKKNLIGALLFDSGETAEATRLKRTARRRYTRRKNRICYLQEIFSNEMAKVDDSFFHRLEESFLVEEDKKHERHPIFGNIVDEVAYHEKYPTIYHLRKKLVDSTDKADLRLIYLALAHMIKFRGHFLIEGDLNPDNSDVDKLFIQLVQTYNQLFEENPINASGVDAKAILSARLSKSRRLENLIAQLPGEKKNGLFGNLIALSLGLTPNFKSNFDLAEDAKLQLSKDTYDDDLDNLLAQIGDQYADLFLAAKNLSDAILLSDILRVNTEITKAPLSASMIKRYDEHHQDLTLLKALVRQQLPEKYKEIFFDQSKNGYAGYIDGGASQEEFYKFIKPILEKMDGTEELLVKLNREDLLRKQRTFDNGSIPHQIHLGELHAILRRQEDFYPFLKDNREKIEKILTFRIPYYVGPLARGNSRFAWMTRKSEETITPWNFEEVVDKGASAQSFIERMTNFDKNLPNEKVLPKHSLLYEYFTVYNELTKVKYVTEGMRKPAFLSGEQKKAIVDLLFKTNRKVTVKQLKEDYFKKIECFDSVEISGVEDRFNASLGTYHDLLKIIKDKDFLDNEENEDILEDIVLTLTLFEDREMIEERLKTYAHLFDDKVMKQLKRRRYTGWGRLSRKLINGIRDKQSGKTILDFLKSDGFANRNFMQLIHDDSLTFKEDIQKAQVSGQGDSLHEHIANLAGSPAIKKGILQTVKVVDELVKVMGRHKPENIVIEMARENQTTQKGQKNSRERMKRIEEGIKELGSQILKEHPVENTQLQNEKLYLYYLQNGRDMYVDQELDINRLSDYDVDHIVPQSFLKDDSIDNKVLTRSDKARGKSDNVPSEEVVKKMKNYWRQLLNAKLITQRKFDNLTKAERGGLSELDKAGFIKRQLVETRQITKHVAQILDSRMNTKYDENDKLIREVKVITLKSKLVSDFRKDFQFYKVREINNYHHAHDAYLNAVVGTALIKKYPKLESEFVYGDYKVYDVRKMIAKSEQEIGKATAKYFFYSNIMNFFKTEITLANGEIRKRPLIETNGETGEIVWDKGRDFATVRKVLSMPQVNIVKKTEVQTGGFSKESILPKRNSDKLIARKKDWDPKKYGGFDSPTVAYSVLVVAKVEKGKSKKLKSVKELLGITIMERSSFEKNPIDFLEAKGYKEVKKDLIIKLPKYSLFELENGRKRMLASAGELQKGNELALPSKYVNFLYLASHYEKLKGSPEDNEQKQLFVEQHKHYLDEIIEQISEFSKRVILADANLDKVLSAYNKHRDKPIREQAENIIHLFTLTNLGAPAAFKYFDTTIDRKRYTSTKEVLDATLIHQSITGLYETRIDLSQLGGDGGPAPAPAPGGTLGIEDEYRLHETSTEPDVSLGSTWLSDFPQAWAETGGMGLAVRQAPLIIPLKATSTPVSIQQYPMSHEARLGIKPHIQRLLDQGILVPCQSPWNTPLLPVKKPGTNDYRPVQDLREVNKRVEDIHPTVPNPYNLLSGLPPSHQWYTVLDLKDAFFCLRLHPTSQPLFAFEWRDPGMGISGQLTWTRLPQGFKNSPTLFNEALHRDLADFRIQHPDLILLQYVDDILLAATSELDCQQGTRALLQTLGDLGYRASAKKAQICQKQVKYLGYLLREGQRWLTEARKETVMGQPVPKTPRQLREFLGTAGFCRLWIPGFAEMAAPLYPLTKPGTLFSWGPDQQKAYQEIKQALLTAPALGLPDLTKPFELFVDEKQGYAKGVLTQKLGPWRRPVAYLSKKLDPVAAGWPPCLRMVAAIAVLTKDAGKLTMGQPLVILAPHAVEALVKQPPDRWLSNARMTHYQAMLLDTDRVQFGPVVALNPATLLPLPEEGAPHDCLEILAETHGTRPDLTDQPIPDADHTWYTDGSSFLQEGQRKAGAAVTTETEVIWAGALPAGTSAQRAELIALTQALKMAEGKRLNVYTDSRYAFATAHIHGEIYRRRGWLTSEGREIKNKSEILALLKALFLPKRLSIIHCLGHQKGDSAEARGNRLADQAAREAAIKTPPDTSTLLAGKRTADGSEFEKRTADGSEFESPKKKAKVE

SEQ ID NO: 6502 - protein, 2092 aa, synthetic construct
MPAAKRVKLDGGDKKYSIGLDIGTNSVGWAVITDEYKVPSKKFKVLGNTDRHSIKKNLIGALLFDSGETAEATRLKRTARRRYTRRKNRICYLQEIFSNEMAKVDDSFFHRLEESFLVEEDKKHERHPIFGNIVDEVAYHEKYPTIYHLRKKLVDSTDKADLRLIYLALAHMIKFRGHFLIEGDLNPDNSDVDKLFIQLVQTYNQLFEENPINASGVDAKAILSARLSKSRRLENLIAQLPGEKKNGLFGNLIALSLGLTPNFKSNFDLAEDAKLQLSKDTYDDDLDNLLAQIGDQYADLFLAAKNLSDAILLSDILRVNTEITKAPLSASMIKRYDEHHQDLTLLKALVRQQLPEKYKEIFFDQSKNGYAGYIDGGASQEEFYKFIKPILEKMDGTEELLVKLNREDLLRKQRTFDNGSIPHQIHLGELHAILRRQEDFYPFLKDNREKIEKILTFRIPYYVGPLARGNSRFAWMTRKSEETITPWNFEEVVDKGASAQSFIERMTNFDKNLPNEKVLPKHSLLYEYFTVYNELTKVKYVTEGMRKPAFLSGEQKKAIVDLLFKTNRKVTVKQLKEDYFKKIECFDSVEISGVEDRFNASLGTYHDLLKIIKDKDFLDNEENEDILEDIVLTLTLFEDREMIEERLKTYAHLFDDKVMKQLKRRRYTGWGRLSRKLINGIRDKQSGKTILDFLKSDGFANRNFMQLIHDDSLTFKEDIQKAQVSGQGDSLHEHIANLAGSPAIKKGILQTVKVVDELVKVMGRHKPENIVIEMARENQTTQKGQKNSRERMKRIEEGIKELGSQILKEHPVENTQLQNEKLYLYYLQNGRDMYVDQELDINRLSDYDVDHIVPQSFLKDDSIDNKVLTRSDKARGKSDNVPSEEVVKKMKNYWRQLLNAKLITQRKFDNLTKAERGGLSELDKAGFIKRQLVETRQITKHVAQILDSRMNTKYDENDKLIREVKVITLKSKLVSDFRKDFQFYKVREINNYHHAHDAYLNAVVGTALIKKYPKLESEFVYGDYKVYDVRKMIAKSEQEIGKATAKYFFYSNIMNFFKTEITLANGEIRKRPLIETNGETGEIVWDKGRDFATVRKVLSMPQVNIVKKTEVQTGGFSKESILPKRNSDKLIARKKDWDPKKYGGFDSPTVAYSVLVVAKVEKGKSKKLKSVKELLGITIMERSSFEKNPIDFLEAKGYKEVKKDLIIKLPKYSLFELENGRKRMLASAGELQKGNELALPSKYVNFLYLASHYEKLKGSPEDNEQKQLFVEQHKHYLDEIIEQISEFSKRVILADANLDKVLSAYNKHRDKPIREQAENIIHLFTLTNLGAPAAFKYFDTTIDRKRYTSTKEVLDATLIHQSITGLYETRIDLSQLGGDGGPAPAPAPGGTLNIEDEYRLHETSKGPDVPLGSTWLSDFPQAWAETGGMGLAVRQAPLIIPLKATSTPVSIKQYPMSQEARLGIKPHIQRLLDQGILVPCQSPWNTPLLPVKKPGTNDYRPVQDLREVNKRVEDIHPTVPNPYNLLSGLPPSHQWYTVLDLKDAFFCLRLHPTSQSLFAFEWRDPEMGISGQLTWTRLPQGFKNSPTLFNEALHRDLADFRIQHPDLILLQYVDDLLLAATSELDCQQGTRALLQTLGDLGYRASAKKAQICQKQVKYLGYLLKEGQRWLTEARKETVMGQPTPKTPRQLREFLGTAGFCRLWIPGFAEMAAPLYPLTKPGTLFEWGPDQQKAYQEIKQALLTAPALGLPDLTKPFELFVDEKQGYAKGVLTQKLGPWRRPVAYLSKKLDPVAAGWPPCLRMVAAIAVLTKDAGKLTMGQPLVILAPHAVEALVKQPPDRWLSNARMTHYQALLLDTDRVQFGPIVALNPATLLPLPEEGLQHDCLDILAEAHGTRPDLTDQPLPDADHTWYTDGSSFLQEGQRKAGAAVTTETEVVWAKALPAGTSAQRAELIALTQALKMAEGKKLNVYTDSRYAFATAHIHGEIYRRRGWLTSEGKEIKNKDEILALLKALFLPKRLSIIHCPGHQKGNRAEARGNRMADQAAREVATRETPETSTLLAGKRTADGSEFEKRTADGSEFESPKKKAKVE

SEQ ID NO: 6503 - protein, 2092 aa, synthetic construct
MPAAKRVKLDGGDKKYSIGLDIGTNSVGWAVITDEYKVPSKKFKVLGNTDRHSIKKNLIGALLFDSGETAEATRLKRTARRRYTRRKNRICYLQEIFSNEMAKVDDSFFHRLEESFLVEEDKKHERHPIFGNIVDEVAYHEKYPTIYHLRKKLVDSTDKADLRLIYLALAHMIKFRGHFLIEGDLNPDNSDVDKLFIQLVQTYNQLFEENPINASGVDAKAILSARLSKSRRLENLIAQLPGEKKNGLFGNLIALSLGLTPNFKSNFDLAEDAKLQLSKDTYDDDLDNLLAQIGDQYADLFLAAKNLSDAILLSDILRVNTEITKAPLSASMIKRYDEHHQDLTLLKALVRQQLPEKYKEIFFDQSKNGYAGYIDGGASQEEFYKFIKPILEKMDGTEELLVKLNREDLLRKQRTFDNGSIPHQIHLGELHAILRRQEDFYPFLKDNREKIEKILTFRIPYYVGPLARGNSRFAWMTRKSEETITPWNFEEVVDKGASAQSFIERMTNFDKNLPNEKVLPKHSLLYEYFTVYNELTKVKYVTEGMRKPAFLSGEQKKAIVDLLFKTNRKVTVKQLKEDYFKKIECFDSVEISGVEDRFNASLGTYHDLLKIIKDKDFLDNEENEDILEDIVLTLTLFEDREMIEERLKTYAHLFDDKVMKQLKRRRYTGWGRLSRKLINGIRDKQSGKTILDFLKSDGFANRNFMQLIHDDSLTFKEDIQKAQVSGQGDSLHEHIANLAGSPAIKKGILQTVKVVDELVKVMGRHKPENIVIEMARENQTTQKGQKNSRERMKRIEEGIKELGSQILKEHPVENTQLQNEKLYLYYLQNGRDMYVDQELDINRLSDYDVDHIVPQSFLKDDSIDNKVLTRSDKARGKSDNVPSEEVVKKMKNYWRQLLNAKLITQRKFDNLTKAERGGLSELDKAGFIKRQLVETRQITKHVAQILDSRMNTKYDENDKLIREVKVITLKSKLVSDFRKDFQFYKVREINNYHHAHDAYLNAVVGTALIKKYPKLESEFVYGDYKVYDVRKMIAKSEQEIGKATAKYFFYSNIMNFFKTEITLANGEIRKRPLIETNGETGEIVWDKGRDFATVRKVLSMPQVNIVKKTEVQTGGFSKESILPKRNSDKLIARKKDWDPKKYGGFDSPTVAYSVLVVAKVEKGKSKKLKSVKELLGITIMERSSFEKNPIDFLEAKGYKEVKKDLIIKLPKYSLFELENGRKRMLASAGELQKGNELALPSKYVNFLYLASHYEKLKGSPEDNEQKQLFVEQHKHYLDEIIEQISEFSKRVILADANLDKVLSAYNKHRDKPIREQAENIIHLFTLTNLGAPAAFKYFDTTIDRKRYTSTKEVLDATLIHQSITGLYETRIDLSQLGGDGGPAPAPAPGGTLNIEDEYRLHETSKGPDVPLGSTWLSDFPQAWAETGGMGLAVRQAPLIIPLKATSTPVSIKQYPMSQEARLGIKPHIQRLLDQGILVPCQSPWNTPLLPVKKPGTNDYRPVQDLREVNKRVEDIHPTVPNPYNLLSGLPPSHQWYTVLDLKDAFFCLRLHPTSQSLFAFEWRDPEMGISGQLTWTRLPQGFKNSPTLFNEALHRDLADFRIQHPDLILLQYVDDLLLAATSELDCQQGTRALLQTLGDLGYRASAKKAQICQKQVKYLGYLLKEGQRWLTEARKETVMGQPTPKTPRQLREFLGKAGFCRLFIPGFAEMAAPLYPLTKPGTLFEWGPDQQKAYQEIKQALLTAPALGLPDLTKPFELFVDEKQGYAKGVLTQKLGPWRRPVAYLSKKLDPVAAGWPPCLRMVAAIAVLTKDAGKLTMGQPLVILAPHAVEALVKQPPDRWLSNARMTHYQALLLDTDRVQFGPIVALNPATLLPLPEEGLQHDCLDILAEAHGTRPDLTDQPLPDADHTWYTDGSSFLQEGQRKAGAAVTTETEVVWAKALPAGTSAQRAELIALTQALKMAEGKKLNVYTDSRYAFATAHIHGEIYRRRGWLTSEGKEIKNKDEILALLKALFLPKRLSIIHCPGHQKGNRAEARGNRMADQAAREVATRETPETSTLLAGKRTADGSEFEKRTADGSEFESPKKKAKVE

SEQ ID NO: 6504 - protein, 2112 aa, synthetic construct; identical to SEQ ID NO: 4508

SEQ ID NO: 6505 - protein, 2112 aa, synthetic construct; identical to SEQ ID NO: 4508

SEQ ID NO: 6506 - protein, 2092 aa, synthetic construct
MPAAKRVKLDGGDKKYSIGLDIGTNSVGWAVITDEYKVPSKKFKVLGNTDRHSIKKNLIGALLFDSGETAEATRLKRTARRRYTRRKNRICYLQEIFSNEMAKVDDSFFHRLEESFLVEEDKKHERHPIFGNIVDEVAYHEKYPTIYHLRKKLVDSTDKADLRLIYLALAHMIKFRGHFLIEGDLNPDNSDVDKLFIQLVQTYNQLFEENPINASGVDAKAILSARLSKSRRLENLIAQLPGEKKNGLFGNLIALSLGLTPNFKSNFDLAEDAKLQLSKDTYDDDLDNLLAQIGDQYADLFLAAKNLSDAILLSDILRVNTEITKAPLSASMIKRYDEHHQDLTLLKALVRQQLPEKYKEIFFDQSKNGYAGYIDGGASQEEFYKFIKPILEKMDGTEELLVKLNREDLLRKQRTFDNGSIPHQIHLGELHAILRRQEDFYPFLKDNREKIEKILTFRIPYYVGPLARGNSRFAWMTRKSEETITPWNFEEVVDKGASAQSFIERMTNFDKNLPNEKVLPKHSLLYEYFTVYNELTKVKYVTEGMRKPAFLSGEQKKAIVDLLFKTNRKVTVKQLKEDYFKKIECFDSVEISGVEDRFNASLGTYHDLLKIIKDKDFLDNEENEDILEDIVLTLTLFEDREMIEERLKTYAHLFDDKVMKQLKRRRYTGWGRLSRKLINGIRDKQSGKTILDFLKSDGFANRNFMQLIHDDSLTFKEDIQKAQVSGQGDSLHEHIANLAGSPAIKKGILQTVKVVDELVKVMGRHKPENIVIEMARENQTTQKGQKNSRERMKRIEEGIKELGSQILKEHPVENTQLQNEKLYLYYLQNGRDMYVDQELDINRLSDYDVDHIVPQSFLKDDSIDNKVLTRSDKARGKSDNVPSEEVVKKMKNYWRQLLNAKLITQRKFDNLTKAERGGLSELDKAGFIKRQLVETRQITKHVAQILDSRMNTKYDENDKLIREVKVITLKSKLVSDFRKDFQFYKVREINNYHHAHDAYLNAVVGTALIKKYPKLESEFVYGDYKVYDVRKMIAKSEQEIGKATAKYFFYSNIMNFFKTEITLANGEIRKRPLIETNGETGEIVWDKGRDFATVRKVLSMPQVNIVKKTEVQTGGFSKESILPKRNSDKLIARKKDWDPKKYGGFDSPTVAYSVLVVAKVEKGKSKKLKSVKELLGITIMERSSFEKNPIDFLEAKGYKEVKKDLIIKLPKYSLFELENGRKRMLASAGELQKGNELALPSKYVNFLYLASHYEKLKGSPEDNEQKQLFVEQHKHYLDEIIEQISEFSKRVILADANLDKVLSAYNKHRDKPIREQAENIIHLFTLTNLGAPAAFKYFDTTIDRKRYTSTKEVLDATLIHQSITGLYETRIDLSQLGGDGGPAPAPAPGGTLNIEDEYRLHEISTEPDVSPGSTWLSDFPQAWAETGGMGLAVRQAPLIIPLKATSTPVSIKQYPMSQEAKLGIKPHIQRLLDQGILVPCQSPWNTPLLPVKKPGTNDYRPVQGLREVNKRVEDIHPTVPNPYNLLSGLPTSHRWYTVLDLKDAFFCLRLHPTSQPLFASEWRDPGMGISGQLTWTRLPQGFKNSPTLFNEALHRGLADFRIQHPDLILLQYVDDLLLAATSELDCQQGTRALLKTLGNLGYRASAKKAQICQKQVKYLGYLLREGQRWLTEARKETVMGQPTPKTPRQLREFLGTAGFCRLWIPRFAEMAAPLYPLTKPGTLFNWGPDQQKAYHEIKQALLTAPALGLPDLTKPFELFVDEKQGYAKGVLTQKLGPWRRPVAYLSKKLDPVAAGWPPCLRMVAAIAVLTKDAGKLTMGQPLVILAPHAVEALVKQPPDRWLSNARMTHYQAMLLDTDRVQFGPVVALNPATLLPLPEEGAPHDCLEILAETHGTEPDLTDQPIPDADHTWYTDGSSFLQEGQRKAGAAVTTETEVIWARALPAGTSAQRAELIALTQALKMAEGKRLNVYTDSRYAFATAHIHGEIYKRRGWLTSEGREIKNKSEILALLKALFLPKRLSIIHCLGHQKGDSAEARGNRLADQAAREAAIKTPPDTSTLLAGKRTADGSEFEKRTADGSEFESPKKKAKVE

SEQ ID NO: 6507 - protein, 2006 aa, synthetic construct
MPAAKRVKLDGGDKKYSIGLDIGTNSVGWAVITDEYKVPSKKFKVLGNTDRHSIKKNLIGALLFDSGETAEATRLKRTARRRYTRRKNRICYLQEIFSNEMAKVDDSFFHRLEESFLVEEDKKHERHPIFGNIVDEVAYHEKYPTIYHLRKKLVDSTDKADLRLIYLALAHMIKFRGHFLIEGDLNPDNSDVDKLFIQLVQTYNQLFEENPINASGVDAKAILSARLSKSRRLENLIAQLPGEKKNGLFGNLIALSLGLTPNFKSNFDLAEDAKLQLSKDTYDDDLDNLLAQIGDQYADLFLAAKNLSDAILLSDILRVNTEITKAPLSASMIKRYDEHHQDLTLLKALVRQQLPEKYKEIFFDQSKNGYAGYIDGGASQEEFYKFIKPILEKMDGTEELLVKLNREDLLRKQRTFDNGSIPHQIHLGELHAILRRQEDFYPFLKDNREKIEKILTFRIPYYVGPLARGNSRFAWMTRKSEETITPWNFEEVVDKGASAQSFIERMTNFDKNLPNEKVLPKHSLLYEYFTVYNELTKVKYVTEGMRKPAFLSGEQKKAIVDLLFKTNRKVTVKQLKEDYFKKIECFDSVEISGVEDRFNASLGTYHDLLKIIKDKDFLDNEENEDILEDIVLTLTLFEDREMIEERLKTYAHLFDDKVMKQLKRRRYTGWGRLSRKLINGIRDKQSGKTILDFLKSDGFANRNFMQLIHDDSLTFKEDIQKAQVSGQGDSLHEHIANLAGSPAIKKGILQTVKVVDELVKVMGRHKPENIVIEMARENQTTQKGQKNSRERMKRIEEGIKELGSQILKEHPVENTQLQNEKLYLYYLQNGRDMYVDQELDINRLSDYDVDHIVPQSFLKDDSIDNKVLTRSDKARGKSDNVPSEEVVKKMKNYWRQLLNAKLITQRKFDNLTKAERGGLSELDKAGFIKRQLVETRQITKHVAQILDSRMNTKYDENDKLIREVKVITLKSKLVSDFRKDFQFYKVREINNYHHAHDAYLNAVVGTALIKKYPKLESEFVYGDYKVYDVRKMIAKSEQEIGKATAKYFFYSNIMNFFKTEITLANGEIRKRPLIETNGETGEIVWDKGRDFATVRKVLSMPQVNIVKKTEVQTGGFSKESILPKRNSDKLIARKKDWDPKKYGGFDSPTVAYSVLVVAKVEKGKSKKLKSVKELLGITIMERSSFEKNPIDFLEAKGYKEVKKDLIIKLPKYSLFELENGRKRMLASAGELQKGNELALPSKYVNFLYLASHYEKLKGSPEDNEQKQLFVEQHKHYLDEIIEQISEFSKRVILADANLDKVLSAYNKHRDKPIREQAENIIHLFTLTNLGAPAAFKYFDTTIDRKRYTSTKEVLDATLIHQSITGLYETRIDLSQLGGDGGPAPAPAPGGLTAAIDILAPQQCAEPITWKSDEPVWVDQWPLTNDKLAAAQQLVQEQLEAGHITESSSPWNTPIFVIKKKSGKWRLLQDLRAVNATMVLMGALQPGLPSPVAIPQGYLKIIIDLKDCFFSIPLHPSDQKRFAFSLPSTNFKEPMQRFQWKVLPQGMANSPTLCQKYVATAIHKVRHAWKQMYIIHYMDDILIAGKDGQQVLQCFDQLKQELTAAGLHIAPEKVQLQDPYTYLGFELNGPKITNQKAVIRKDKLQTLNDFQKLLGDINWLRPYLKLTTGDLKPLFDTLKGDSDPNSHRSLSKEALASLEKVETAIAEQFVTHINYSLPLIFLIFNTALTPTGLFWQDNPIMWIHLPASPKKVLLPYYDAIADLIILGRDHSKKYFGIEPSTIIQPYSKSQIDWLMQNTEMWPIACASFVGILDNHYPPNKLIQFCKLHTFVFPQIISKTPLNNALLVFTDGSSTGMAAYTLTDTTIKFQTNLNSAQLVELQALIAVLSAFPNQPLNIYTDSAYLAHSIPLLETVAQIKHISETAKLFLQCQQLIYNRSIPFYIGHVRAHSGLPGPIAQGNQRADLATKIVASNINTAGKRTADGSEFEKRTADGSEFESPKKKAKVE

SEQ ID NO: 6508 - protein, 2086 aa, synthetic construct
MPAAKRVKLDGGDKKYSIGLDIGTNSVGWAVITDEYKVPSKKFKVLGNTDRHSIKKNLIGALLFDSGETAEATRLKRTARRRYTRRKNRICYLQEIFSNEMAKVDDSFFHRLEESFLVEEDKKHERHPIFGNIVDEVAYHEKYPTIYHLRKKLVDSTDKADLRLIYLALAHMIKFRGHFLIEGDLNPDNSDVDKLFIQLVQTYNQLFEENPINASGVDAKAILSARLSKSRRLENLIAQLPGEKKNGLFGNLIALSLGLTPNFKSNFDLAEDAKLQLSKDTYDDDLDNLLAQIGDQYADLFLAAKNLSDAILLSDILRVNTEITKAPLSASMIKRYDEHHQDLTLLKALVRQQLPEKYKEIFFDQSKNGYAGYIDGGASQEEFYKFIKPILEKMDGTEELLVKLNREDLLRKQRTFDNGSIPHQIHLGELHAILRRQEDFYPFLKDNREKIEKILTFRIPYYVGPLARGNSRFAWMTRKSEETITPWNFEEVVDKGASAQSFIERMTNFDKNLPNEKVLPKHSLLYEYFTVYNELTKVKYVTEGMRKPAFLSGEQKKAIVDLLFKTNRKVTVKQLKEDYFKKIECFDSVEISGVEDRFNASLGTYHDLLKIIKDKDFLDNEENEDILEDIVLTLTLFEDREMIEERLKTYAHLFDDKVMKQLKRRRYTGWGRLSRKLINGIRDKQSGKTILDFLKSDGFANRNFMQLIHDDSLTFKEDIQKAQVSGQGDSLHEHIANLAGSPAIKKGILQTVKVVDELVKVMGRHKPENIVIEMARENQTTQKGQKNSRERMKRIEEGIKELGSQILKEHPVENTQLQNEKLYLYYLQNGRDMYVDQELDINRLSDYDVDHIVPQSFLKDDSIDNKVLTRSDKARGKSDNVPSEEVVKKMKNYWRQLLNAKLITQRKFDNLTKAERGGLSELDKAGFIKRQLVETRQITKHVAQILDSRMNTKYDENDKLIREVKVITLKSKLVSDFRKDFQFYKVREINNYHHAHDAYLNAVVGTALIKKYPKLESEFVYGDYKVYDVRKMIAKSEQEIGKATAKYFFYSNIMNFFKTEITLANGEIRKRPLIETNGETGEIVWDKGRDFATVRKVLSMPQVNIVKKTEVQTGGFSKESILPKRNSDKLIARKKDWDPKKYGGFDSPTVAYSVLVVAKVEKGKSKKLKSVKELLGITIMERSSFEKNPIDFLEAKGYKEVKKDLIIKLPKYSLFELENGRKRMLASAGELQKGNELALPSKYVNFLYLASHYEKLKGSPEDNEQKQLFVEQHKHYLDEIIEQISEFSKRVILADANLDKVLSAYNKHRDKPIREQAENIIHLFTLTNLGAPAAFKYFDTTIDRKRYTSTKEVLDATLIHQSITGLYETRIDLSQLGGDGGPAPAPAPGGTLQLDDEYRLYSPLVKPDQNIQFWLEQFPQAWAETAGMGLAKQVPPQVIQLKASATPVSVRQYPLSKEAQEGIRPHVQRLIQQGILVPVQSPWNTPLLPVRKPGTNDYRPVQDLREVNKRVQDIHPTVPNPYNLLCALPPQRSWYTVLDLKDAFFCLRLHPTSQPLFAFEWRDPGTGRTGQLTWTRLPQGFKNSPTIFNEALHRDLANFRIQHPQVTLLQYVDDLLLAGATKQDCLEGTKALLLELSDLGYRASAKKAQICRREVTYLGYSLRDGQRWLTEARKKTVVQIPAPTTAKQVREFLGTAGFCRLWIPGFATLAAPLYPLTKPKGEFSWAPEHQKAFDAIKKALLSAPALALPDVTKPFTLYVDERKGVARGVLTQTLGPWRRPVAYLSKKLDPVASGWPVCLKAIAAVAILVKDADKLTLGQNITVIAPHALENIVRQPPDRWMTNARMTHYQSLLLTERVTFAPPAALNPATLLPEETDEPVTHDCHQLLIEETGVRKDLTDIPLTGEVLTWFTDGSSYVVEGKRMAGAAVVDGTRTIWASSLPEGTSAQKAELMALTQALRLAEGKSINIYTDSRYAFATAHVHGAIYKQRGWLTSAGREIKNKEEILSLLEALHLPKRLAIIHCPGHQKAKDPISRGNQMADRVAKQAAQGVNLLAGKRTADGSEFEKRTADGSEFESPKKKAKVE

SEQ ID NO: 6509 - protein, 2086 aa, synthetic construct; identical to SEQ ID NO: 6508

SEQ ID NO: 6510 - protein, 2083 aa, synthetic construct
MPAAKRVKLDGGDKKYSIGLDIGTNSVGWAVITDEYKVPSKKFKVLGNTDRHSIKKNLIGALLFDSGETAEATRLKRTARRRYTRRKNRICYLQEIFSNEMAKVDDSFFHRLEESFLVEEDKKHERHPIFGNIVDEVAYHEKYPTIYHLRKKLVDSTDKADLRLIYLALAHMIKFRGHFLIEGDLNPDNSDVDKLFIQLVQTYNQLFEENPINASGVDAKAILSARLSKSRRLENLIAQLPGEKKNGLFGNLIALSLGLTPNFKSNFDLAEDAKLQLSKDTYDDDLDNLLAQIGDQYADLFLAAKNLSDAILLSDILRVNTEITKAPLSASMIKRYDEHHQDLTLLKALVRQQLPEKYKEIFFDQSKNGYAGYIDGGASQEEFYKFIKPILEKMDGTEELLVKLNREDLLRKQRTFDNGSIPHQIHLGELHAILRRQEDFYPFLKDNREKIEKILTFRIPYYVGPLARGNSRFAWMTRKSEETITPWNFEEVVDKGASAQSFIERMTNFDKNLPNEKVLPKHSLLYEYFTVYNELTKVKYVTEGMRKPAFLSGEQKKAIVDLLFKTNRKVTVKQLKEDYFKKIECFDSVEISGVEDRFNASLGTYHDLLKIIKDKDFLDNEENEDILEDIVLTLTLFEDREMIEERLKTYAHLFDDKVMKQLKRRRYTGWGRLSRKLINGIRDKQSGKTILDFLKSDGFANRNFMQLIHDDSLTFKEDIQKAQVSGQGDSLHEHIANLAGSPAIKKGILQTVKVVDELVKVMGRHKPENIVIEMARENQTTQKGQKNSRERMKRIEEGIKELGSQILKEHPVENTQLQNEKLYLYYLQNGRDMYVDQELDINRLSDYDVDHIVPQSFLKDDSIDNKVLTRSDKARGKSDNVPSEEVVKKMKNYWRQLLNAKLITQRKFDNLTKAERGGLSELDKAGFIKRQLVETRQITKHVAQILDSRMNTKYDENDKLIREVKVITLKSKLVSDFRKDFQFYKVREINNYHHAHDAYLNAVVGTALIKKYPKLESEFVYGDYKVYDVRKMIAKSEQEIGKATAKYFFYSNIMNFFKTEITLANGEIRKRPLIETNGETGEIVWDKGRDFATVRKVLSMPQVNIVKKTEVQTGGFSKESILPKRNSDKLIARKKDWDPKKYGGFDSPTVAYSVLVVAKVEKGKSKKLKSVKELLGITIMERSSFEKNPIDFLEAKGYKEVKKDLIIKLPKYSLFELENGRKRMLASAGELQKGNELALPSKYVNFLYLASHYEKLKGSPEDNEQKQLFVEQHKHYLDEIIEQISEFSKRVILADANLDKVLSAYNKHRDKPIREQAENIIHLFTLTNLGAPAAFKYFDTTIDRKRYTSTKEVLDATLIHQSITGLYETRIDLSQLGGDGGPAPAPAPGGVPWLMKKPLQLTVLVPLHEYQERLLQQTALPKEQKELLQKLFLKYDALWQHWENQVGHRRIKPHNIATGTLAPRPQKQYPINPKAKPSIQIVIDDLLKQGVLIQQNSTMNTPVYPVPKPDGKWRMVLDYREVNKTIPLIAAQNQHSAGILSSIYRGKYKTTLDLTNGFWAHPITPESYWLTAFTWQGKQYCWTRLPQGFLNSPALFNADVVDLLKEIPNVQAYVDDIYISHDDPQEHLEQLEKIFSILLNAGYVVSLKKSEIAQREVEFLGFNITKEGRGLTDTFKQKLLNITPPKDLKQLQSILGLLNFARNFIPNYSELVKPLYTIVAPANGKFISWTEDNSNQLQHIISVLNQADNLEERNPETRLIIKVNSSPSAGYIRYYNEGSKRPIMYVNYIFSKAEAKFTQTEKLLTTMHKGLIKAMDLAMGQEILVYSPIVSMTKIQRTPLPERKALPVRWITWMTYLEDPRIQFHYDKSLPELQQIPNVTEDVIAKTKHPSEFAMVFYTDGSAIKHPDVNKSHSAGMGIAQVQFIPEYKIVHQWSIPLGDHTAQLAEIAAVEFACKKALKISGPVLIVTDSFYVAESANKELPYWKSNGFLNNKKKPLRHVSKWKSIAECLQLKPDIIIMHEKGHQQPMTTLHTEGNNLADKLATQGSYVVHAGKRTADGSEFEKRTADGSEFESPKKKAKVE

SEQ ID NO: 6511 - protein, 2172 aa, synthetic construct
MPAAKRVKLDGGDKKYSIGLDIGTNSVGWAVITDEYKVPSKKFKVLGNTDRHSIKKNLIGALLFDSGETAEATRLKRTARRRYTRRKNRICYLQEIFSNEMAKVDDSFFHRLEESFLVEEDKKHERHPIFGNIVDEVAYHEKYPTIYHLRKKLVDSTDKADLRLIYLALAHMIKFRGHFLIEGDLNPDNSDVDKLFIQLVQTYNQLFEENPINASGVDAKAILSARLSKSRRLENLIAQLPGEKKNGLFGNLIALSLGLTPNFKSNFDLAEDAKLQLSKDTYDDDLDNLLAQIGDQYADLFLAAKNLSDAILLSDILRVNTEITKAPLSASMIKRYDEHHQDLTLLKALVRQQLPEKYKEIFFDQSKNGYAGYIDGGASQEEFYKFIKPILEKMDGTEELLVKLNREDLLRKQRTFDNGSIPHQIHLGELHAILRRQEDFYPFLKDNREKIEKILTFRIPYYVGPLARGNSRFAWMTRKSEETITPWNFEEVVDKGASAQSFIERMTNFDKNLPNEKVLPKHSLLYEYFTVYNELTKVKYVTEGMRKPAFLSGEQKKAIVDLLFKTNRKVTVKQLKEDYFKKIECFDSVEISGVEDRFNASLGTYHDLLKIIKDKDFLDNEENEDILEDIVLTLTLFEDREMIEERLKTYAHLFDDKVMKQLKRRRYTGWGRLSRKLINGIRDKQSGKTILDFLKSDGFANRNFMQLIHDDSLTFKEDIQKAQVSGQGDSLHEHIANLAGSPAIKKGILQTVKVVDELVKVMGRHKPENIVIEMARENQTTQKGQKNSRERMKRIEEGIKELGSQILKEHPVENTQLQNEKLYLYYLQNGRDMYVDQELDINRLSDYDVDHIVPQSFLKDDSIDNKVLTRSDKARGKSDNVPSEEVVKKMKNYWRQLLNAKLITQRKFDNLTKAERGGLSELDKAGFIKRQLVETRQITKHVAQILDSRMNTKYDENDKLIREVKVITLKSKLVSDFRKDFQFYKVREINNYHHAHDAYLNAVVGTALIKKYPKLESEFVYGDYKVYDVRKMIAKSEQEIGKATAKYFFYSNIMNFFKTEITLANGEIRKRPLIETNGETGEIVWDKGRDFATVRKVLSMPQVNIVKKTEVQTGGFSKESILPKRNSDKLIARKKDWDPKKYGGFDSPTVAYSVLVVAKVEKGKSKKLKSVKELLGITIMERSSFEKNPIDFLEAKGYKEVKKDLIIKLPKYSLFELENGRKRMLASAGELQKGNELALPSKYVNFLYLASHYEKLKGSPEDNEQKQLFVEQHKHYLDEIIEQISEFSKRVILADANLDKVLSAYNKHRDKPIREQAENIIHLFTLTNLGAPAAFKYFDTTIDRKRYTSTKEVLDATLIHQSITGLYETRIDLSQLGGDGGPAPAPAPGGMDPLQLLQPLEAEIKGTKLKAHWNSGATITCVPQAFLEEEVPIKNIWIKTIHGEKEQPVYYLTFKIQGRKVEAEVISSPYDYILVSPSDIPWLMKKPLQLTTLVPLQEYEERLLKQTMLTGSYKEKLQSLFLKYDALWQHWENQVGHRRIKPHHIATGTVNPRPQKQYPINPKAKASIQTVINDLLKQGVLIQQNSIMNTPVYPVPKPDGKWRMVLDYREVNKTIPLIAAQNQHSAGILSSIFRGKYKTTLDLSNGFWAHSITPESYWLTAFTWLGQQYCWTRLPQGFLNSPALFNADVVDLLKEVPNVQVYVDDIYISHDDPREHLEQLEKVFSLLLNAGYVVSLKKSEIAQHEVEFLGFNITKEGRGLTETFKQKLLNITPPRDLKQLQSILGKLNFARNFIPNFSELVKPLYNIIATAPGKYITWTTDNSQQLQNIISMLNSAENLEERNPEVRLIMKVNTSPSAGYIRFYNEFAKRPIMYLNYVYTKAEVKFTNTEKLLTTIHKGLIKALDLGMGQEILVYSPIVSMTKIQKTPLPERKALPIRWITWMSYLEDPRIQFHYDKTLPELQQVPTVTDDIIAKIKHPSEFSMVFYTDGSAIKHPNVNKSHNAGMGIAQVQFKPEFTVINTWSIPLGDHTAQLAEVAAVEFACKKALKIDGPVLIVTDSFYVAESVNKELPYWQSNGFFNNKKKPLKHVSKWKSIADCIQLKPDIIIIHEKGHQPTASTFHTEGNNLADKLATQGSYVVNAGKRTADGSEFEKRTADGSEFESPKKKAKVE

SEQ ID NO: 6512 - protein, 2092 aa, synthetic construct
MPAAKRVKLDGGDKKYSIGLDIGTNSVGWAVITDEYKVPSKKFKVLGNTDRHSIKKNLIGALLFDSGETAEATRLKRTARRRYTRRKNRICYLQEIFSNEMAKVDDSFFHRLEESFLVEEDKKHERHPIFGNIVDEVAYHEKYPTIYHLRKKLVDSTDKADLRLIYLALAHMIKFRGHFLIEGDLNPDNSDVDKLFIQLVQTYNQLFEENPINASGVDAKAILSARLSKSRRLENLIAQLPGEKKNGLFGNLIALSLGLTPNFKSNFDLAEDAKLQLSKDTYDDDLDNLLAQIGDQYADLFLAAKNLSDAILLSDILRVNTEITKAPLSASMIKRYDEHHQDLTLLKALVRQQLPEKYKEIFFDQSKNGYAGYIDGGASQEEFYKFIKPILEKMDGTEELLVKLNREDLLRKQRTFDNGSIPHQIHLGELHAILRRQEDFYPFLKDNREKIEKILTFRIPYYVGPLARGNSRFAWMTRKSEETITPWNFEEVVDKGASAQSFIERMTNFDKNLPNEKVLPKHSLLYEYFTVYNELTKVKYVTEGMRKPAFLSGEQKKAIVDLLFKTNRKVTVKQLKEDYFKKIECFDSVEISGVEDRFNASLGTYHDLLKIIKDKDFLDNEENEDILEDIVLTLTLFEDREMIEERLKTYAHLFDDKVMKQLKRRRYTGWGRLSRKLINGIRDKQSGKTILDFLKSDGFANRNFMQLIHDDSLTFKEDIQKAQVSGQGDSLHEHIANLAGSPAIKKGILQTVKVVDELVKVMGRHKPENIVIEMARENQTTQKGQKNSRERMKRIEEGIKELGSQILKEHPVENTQLQNEKLYLYYLQNGRDMYVDQELDINRLSDYDVDHIVPQSFLKDDSIDNKVLTRSDKARGKSDNVPSEEVVKKMKNYWRQLLNAKLITQRKFDNLTKAERGGLSELDKAGFIKRQLVETRQITKHVAQILDSRMNTKYDENDKLIREVKVITLKSKLVSDFRKDFQFYKVREINNYHHAHDAYLNAVVGTALIKKYPKLESEFVYGDYKVYDVRKMIAKSEQEIGKATAKYFFYSNIMNFFKTEITLANGEIRKRPLIETNGETGEIVWDKGRDFATVRKVLSMPQVNIVKKTEVQTGGFSKESILPKRNSDKLIARKKDWDPKKYGGFDSPTVAYSVLVVAKVEKGKSKKLKSVKELLGITIMERSSFEKNPIDFLEAKGYKEVKKDLIIKLPKYSLFELENGRKRMLASAGELQKGNELALPSKYVNFLYLASHYEKLKGSPEDNEQKQLFVEQHKHYLDEIIEQISEFSKRVILADANLDKVLSAYNKHRDKPIREQAENIIHLFTLTNLGAPAAFKYFDTTIDRKRYTSTKEVLDATLIHQSITGLYETRIDLSQLGGDGGPAPAPAPGGTLNIEDEYRLHETSKEPDVPLGSTWLSDFPQAWAETGGMGLAVRQAPLIIPLKATSTPVSIKQYPMSQEARLGIKPHIQRLLDQGILVPCQSPWNTPLLPVKKPGTNDYRPVQDLREVNKRVEDIHPTVPNPYNLLSGLPPSHQWYTVLDLKDAFFCLRLHPTSQPLFAFEWRDPEMGISGQLTWTRLPQGFKNSPTLFNEALHRDLADFRIQHPDLILLQYVDDLLLAATSEQDCQRGTRALLQTLGNLGYRASAKKAQICQKQVKYLGYLLKEGQRWLTEARKETVMGQPTPKTPRQLREFLGKAGFCRLFIPGFAEMAAPLYPLTKPGTLFNWGPDQQKAYQEIKQALLTAPALGLPDLTKPFELFVDEKQGYAKGVLTQKLGPWRRPVAYLSKKLDPVAAGWPPCLRMVAAIAVLTKDAGKLTMGQPLVILAPHAVEALVKQPPDRWLSNARMTHYQAMLLDTDRVQFGPVVALNPATLLPLPEKEAPHDCLEILAETHGTRPDLTDQPIPDADYTWYTDGSSFLQEGQRRAGAAVTTETEVIWARALPAGTSAQRAELIALTQALKMAEGKKLNVYTDSRYAFATAHVHGEIYRRRGWLTSEGREIKNKNEILALLKALFLPKRLSIIHCPGHQKGNSAEARGNRMADQAAREAAMKAVLETSTLLAGKRTADGSEFEKRTADGSEFESPKKKAKVE

SEQ ID NO: 6513 - protein, 2096 aa, synthetic construct
MPAAKRVKLDGGDKKYSIGLDIGTNSVGWAVITDEYKVPSKKFKVLGNTDRHSIKKNLIGALLFDSGETAEATRLKRTARRRYTRRKNRICYLQEIFSNEMAKVDDSFFHRLEESFLVEEDKKHERHPIFGNIVDEVAYHEKYPTIYHLRKKLVDSTDKADLRLIYLALAHMIKFRGHFLIEGDLNPDNSDVDKLFIQLVQTYNQLFEENPINASGVDAKAILSARLSKSRRLENLIAQLPGEKKNGLFGNLIALSLGLTPNFKSNFDLAEDAKLQLSKDTYDDDLDNLLAQIGDQYADLFLAAKNLSDAILLSDILRVNTEITKAPLSASMIKRYDEHHQDLTLLKALVRQQLPEKYKEIFFDQSKNGYAGYIDGGASQEEFYKFIKPILEKMDGTEELLVKLNREDLLRKQRTFDNGSIPHQIHLGELHAILRRQEDFYPFLKDNREKIEKILTFRIPYYVGPLARGNSRFAWMTRKSEETITPWNFEEVVDKGASAQSFIERMTNFDKNLPNEKVLPKHSLLYEYFTVYNELTKVKYVTEGMRKPAFLSGEQKKAIVDLLFKTNRKVTVKQLKEDYFKKIECFDSVEISGVEDRFNASLGTYHDLLKIIKDKDFLDNEENEDILEDIVLTLTLFEDREMIEERLKTYAHLFDDKVMKQLKRRRYTGWGRLSRKLINGIRDKQSGKTILDFLKSDGFANRNFMQLIHDDSLTFKEDIQKAQVSGQGDSLHEHIANLAGSPAIKKGILQTVKVVDELVKVMGRHKPENIVIEMARENQTTQKGQKNSRERMKRIEEGIKELGSQILKEHPVENTQLQNEKLYLYYLQNGRDMYVDQELDINRLSDYDVDHIVPQSFLKDDSIDNKVLTRSDKARGKSDNVPSEEVVKKMKNYWRQLLNAKLITQRKFDNLTKAERGGLSELDKAGFIKRQLVETRQITKHVAQILDSRMNTKYDENDKLIREVKVITLKSKLVSDFRKDFQFYKVREINNYHHAHDAYLNAVVGTALIKKYPKLESEFVYGDYKVYDVRKMIAKSEQEIGKATAKYFFYSNIMNFFKTEITLANGEIRKRPLIETNGETGEIVWDKGRDFATVRKVLSMPQVNIVKKTEVQTGGFSKESILPKRNSDKLIARKKDWDPKKYGGFDSPTVAYSVLVVAKVEKGKSKKLKSVKELLGITIMERSSFEKNPIDFLEAKGYKEVKKDLIIKLPKYSLFELENGRKRMLASAGELQKGNELALPSKYVNFLYLASHYEKLKGSPEDNEQKQLFVEQHKHYLDEIIEQISEFSKRVILADANLDKVLSAYNKHRDKPIREQAENIIHLFTLTNLGAPAAFKYFDTTIDRKRYTSTKEVLDATLIHQSITGLYETRIDLSQLGGDGGPAPAPAPAPGGTAPLEEEYRLFLEAPIQNVTLLEQWKREIPKVWAEINPPGLASTQAPIHVQLLSTALPVRVRQYPITLEAKRSLRETIRKFRAAGILRPVHSPWNTPLLPVRKSGTSEYRMVQDLREVNKRVETIHPTVPNPYTLLSLLPPDRIWYSVLDLKDAFFCIPLAPESQLIFAFEWADAEEGESGQLTWTRLPQGFKNSPTLFDEALNRDLQGFRLDHPSVSLLQYVDDLLIAADTQAACLSATRDLLMTLAELGYRVSGKKAQLCQEEVTYLGFKIHKGSRSLSNSRTQAILQIPVPKTKRQVREFLGTIGYCRLWIPGFAELAQPLYAATRGGNDPLVWGEKEEEAFQSLKLALTQPPALALPSLDKPFQLFVEETSGAAKGVLTQALGPWKRPVAYLSKRLDPVAAGWPRCLRAIAAAALLTREASKLTFGQDIEITSSHNLESLLRSPPDKWLTNARITQYQVLLLDPPRVRFKQTAALNPATLLPETDDTLPIHHCLDTLDSLTSTRPDLTDQPLAQAEATLFTDGSSYIRDGKRYAGAAVVTLDSVIWAEPLPIGTSAQKAELIALTKALEWSKDKSVNIYTDSRYAFATLHVHGMIYRERGLLTAGGKAIKNAPEILALLTAVWLPKRVAVMHCKGHQKDDAPTSTGNRRADEVAREVAIRPLSTQATISAGKRTADGSEFEKRTADGSEFESPKKKAKVE

SEQ ID NO: 6514 - protein, 2096 aa, synthetic construct
MPAAKRVKLDGGDKKYSIGLDIGTNSVGWAVITDEYKVPSKKFKVLGNTDRHSIKKNLIGALLFDSGETAEATRLKRTARRRYTRRKNRICYLQEIFSNEMAKVDDSFFHRLEESFLVEEDKKHERHPIFGNIVDEVAYHEKYPTIYHLRKKLVDSTDKADLRLIYLALAHMIKFRGHFLIEGDLNPDNSDVDKLFIQLVQTYNQLFEENPINASGVDAKAILSARLSKSRRLENLIAQLPGEKKNGLFGNLIALSLGLTPNFKSNFDLAEDAKLQLSKDTYDDDLDNLLAQIGDQYADLFLAAKNLSDAILLSDILRVNTEITKAPLSASMIKRYDEHHQDLTLLKALVRQQLPEKYKEIFFDQSKNGYAGYIDGGASQEEFYKFIKPILEKMDGTEELLVKLNREDLLRKQRTFDNGSIPHQIHLGELHAILRRQEDFYPFLKDNREKIEKILTFRIPYYVGPLARGNSRFAWMTRKSEETITPWNFEEVVDKGASAQSFIERMTNFDKNLPNEKVLPKHSLLYEYFTVYNELTKVKYVTEGMRKPAFLSGEQKKAIVDLLFKTNRKVTVKQLKEDYFKKIECFDSVEISGVEDRFNASLGTYHDLLKIIKDKDFLDNEENEDILEDIVLTLTLFEDREMIEERLKTYAHLFDDKVMKQLKRRRYTGWGRLSRKLINGIRDKQSGKTILDFLKSDGFANRNFMQLIHDDSLTFKEDIQKAQVSGQGDSLHEHIANLAGSPAIKKGILQTVKVVDELVKVMGRHKPENIVIEMARENQTTQKGQKNSRERMKRIEEGIKELGSQILKEHPVENTQLQNEKLYLYYLQNGRDMYVDQELDINRLSDYDVDHIVPQSFLKDDSIDNKVLTRSDKARGKSDNVPSEEVVKKMKNYWRQLLNAKLITQRKFDNLTKAERGGLSELDKAGFIKRQLVETRQITKHVAQILDSRMNTKYDENDKLIREVKVITLKSKLVSDFRKDFQFYKVREINNYHHAHDAYLNAVVGTALIKKYPKLESEFVYGDYKVYDVRKMIAKSEQEIGKATAKYFFYSNIMNFFKTEITLANGEIRKRPLIETNGETGEIVWDKGRDFATVRKVLSMPQVNIVKKTEVQTGGFSKESILPKRNSDKLIARKKDWDPKKYGGFDSPTVAYSVLVVAKVEKGKSKKLKSVKELLGITIMERSSFEKNPIDFLEAKGYKEVKKDLIIKLPKYSLFELENGRKRMLASAGELQKGNELALPSKYVNFLYLASHYEKLKGSPEDNEQKQLFVEQHKHYLDEIIEQISEFSKRVILADANLDKVLSAYNKHRDKPIREQAENIIHLFTLTNLGAPAAFKYFDTTIDRKRYTSTKEVLDATLIHQSITGLYETRIDLSQLGGDGGPAPAPAPAPGGTAPLEEEYRLFLEAPIQNVTLLEQWKREIPKVWAEINPPGLASTQAPIHVQLLSTALPVRVRQYPITLEAKRSLRETIRKFRAAGILRPVHSPWNTPLLPVRKSGTSEYRMVQDLREVNKRVETIHPTVPNPYTLLSLLPPDRIWYSVLDLKDAFFCIPLAPESQLIFAFEWADAEEGESGQLTWTRLPQGFKNSPTLFNEALNRDLQGFRLDHPSVSLLQYVDDLLIAADTQAACLSATRDLLMTLAELGYRVSGKKAQLCQEEVTYLGFKIHKGSRSLSNSRTQAILQIPVPKTKRQVREFLGTIGYCRLWIPGFAELAQPLYAATRPGNDPLVWGEKEEEAFQSLKLALTQPPALALPSLDKPFQLFVEETSGAAKGVLTQALGPWKRPVAYLSKRLDPVAAGWPRCLRAIAAAALLTREASKLTFGQDIEITSSHNLESLLRSPPDKWLTNARITQYQVLLLDPPRVRFKQTAALNPATLLPETDDTLPIHHCLDTLDSLTSTRPDLTDQPLAQAEATLFTDGSSYIRDGKRYAGAAVVTLDSVIWAEPLPIGTSAQKAELIALTKALEWSKDKSVNIYTDSRYAFATLHVHGMIYRERGWLTAGGKAIKNAPEILALLTAVWLPKRVAVMHCKGHQKDDAPTSTGNRRADEVAREVAIRPLSTQATISAGKRTADGSEFEKRTADGSEFESPKKKAKVE

SEQ ID NO: 6515 - protein, 2100 aa, synthetic construct
MPAAKRVKLDGGDKKYSIGLDIGTNSVGWAVITDEYKVPSKKFKVLGNTDRHSIKKNLIGALLFDSGETAEATRLKRTARRRYTRRKNRICYLQEIFSNEMAKVDDSFFHRLEESFLVEEDKKHERHPIFGNIVDEVAYHEKYPTIYHLRKKLVDSTDKADLRLIYLALAHMIKFRGHFLIEGDLNPDNSDVDKLFIQLVQTYNQLFEENPINASGVDAKAILSARLSKSRRLENLIAQLPGEKKNGLFGNLIALSLGLTPNFKSNFDLAEDAKLQLSKDTYDDDLDNLLAQIGDQYADLFLAAKNLSDAILLSDILRVNTEITKAPLSASMIKRYDEHHQDLTLLKALVRQQLPEKYKEIFFDQSKNGYAGYIDGGASQEEFYKFIKPILEKMDGTEELLVKLNREDLLRKQRTFDNGSIPHQIHLGELHAILRRQEDFYPFLKDNREKIEKILTFRIPYYVGPLARGNSRFAWMTRKSEETITPWNFEEVVDKGASAQSFIERMTNFDKNLPNEKVLPKHSLLYEYFTVYNELTKVKYVTEGMRKPAFLSGEQKKAIVDLLFKTNRKVTVKQLKEDYFKKIECFDSVEISGVEDRFNASLGTYHDLLKIIKDKDFLDNEENEDILEDIVLTLTLFEDREMIEERLKTYAHLFDDKVMKQLKRRRYTGWGRLSRKLINGIRDKQSGKTILDFLKSDGFANRNFMQLIHDDSLTFKEDIQKAQVSGQGDSLHEHIANLAGSPAIKKGILQTVKVVDELVKVMGRHKPENIVIEMARENQTTQKGQKNSRERMKRIEEGIKELGSQILKEHPVENTQLQNEKLYLYYLQNGRDMYVDQELDINRLSDYDVDHIVPQSFLKDDSIDNKVLTRSDKARGKSDNVPSEEVVKKMKNYWRQLLNAKLITQRKFDNLTKAERGGLSELDKAGFIKRQLVETRQITKHVAQILDSRMNTKYDENDKLIREVKVITLKSKLVSDFRKDFQFYKVREINNYHHAHDAYLNAVVGTALIKKYPKLESEFVYGDYKVYDVRKMIAKSEQEIGKATAKYFFYSNIMNFFKTEITLANGEIRKRPLIETNGETGEIVWDKGRDFATVRKVLSMPQVNIVKKTEVQTGGFSKESILPKRNSDKLIARKKDWDPKKYGGFDSPTVAYSVLVVAKVEKGKSKKLKSVKELLGITIMERSSFEKNPIDFLEAKGYKEVKKDLIIKLPKYSLFELENGRKRMLASAGELQKGNELALPSKYVNFLYLASHYEKLKGSPEDNEQKQLFVEQHKHYLDEIIEQISEFSKRVILADANLDKVLSAYNKHRDKPIREQAENIIHLFTLTNLGAPAAFKYFDTTIDRKRYTSTKEVLDATLIHQSITGLYETRIDLSQLGGDGGPAPAPAPAPGGTVSLQDEHRLFDIPVTTSLPDVWLQDFPQAWAETGGLGRAKCQAPIIIDLKPTAVPVSIKQYPMSLEAHMGIRQHIIKFLELGVLRPCRSPWNTPLLPVKKPGTQDYRPVQDLREINKRTVDIHPTVPNPYNLLSTLKPDYSWYTVLDLKDAFFCLPLAPQSQELFAFEWKDPERGISGQLTWTRLPQGFKNSPTLFNEALHRDLTDFRTQHPEVTLLQYVDDLLLAAPTKKACTQGTRHLLQELGEKGYRASAKKAQICQTKVTYLGYILSEGKRWLTPGRIETVARIPPPRNPREVREFLGTAGFCRLWIPGFAELAAPLYALTKPSTPFTWQTEHQLAFEALKKALLSAPALGLPDTSKPFTLFLDERQGIAKGVLTQKLGPWKRPVAYLSKKLDPVAAGWPPCLRIMAATAMLVKDSAKLTLGQPLTVITPHTLEAIVRQPPDRWITNARLTHYQALLLDTDRVQFGPPVTLNPATLLPVPENQPSPHDCRQVLAETHGTREDLKDQELPDADHTWYTDGSSYLDSGTRRAGAAVVDGHNTIWAQSLPPGTSAQKAELIALTKALELSKGKKANIYTDSRYAFATAHTHGSIYERRGWLTSEGKEIKNKAEIIALLKALFLPQEVAIIHCPGHQKGQDPVAVGNRQADRVARQAAMAEVLTLATEPDNTSHITAGKRTADGSEFEKRTADGSEFESPKKKAKVE

SEQ ID NO: 6516 - protein, 2085 aa, synthetic construct
MPAAKRVKLDGGDKKYSIGLDIGTNSVGWAVITDEYKVPSKKFKVLGNTDRHSIKKNLIGALLFDSGETAEATRLKRTARRRYTRRKNRICYLQEIFSNEMAKVDDSFFHRLEESFLVEEDKKHERHPIFGNIVDEVAYHEKYPTIYHLRKKLVDSTDKADLRLIYLALAHMIKFRGHFLIEGDLNPDNSDVDKLFIQLVQTYNQLFEENPINASGVDAKAILSARLSKSRRLENLIAQLPGEKKNGLFGNLIALSLGLTPNFKSNFDLAEDAKLQLSKDTYDDDLDNLLAQIGDQYADLFLAAKNLSDAILLSDILRVNTEITKAPLSASMIKRYDEHHQDLTLLKALVRQQLPEKYKEIFFDQSKNGYAGYIDGGASQEEFYKFIKPILEKMDGTEELLVKLNREDLLRKQRTFDNGSIPHQIHLGELHAILRRQEDFYPFLKDNREKIEKILTFRIPYYVGPLARGNSRFAWMTRKSEETITPWNFEEVVDKGASAQSFIERMTNFDKNLPNEKVLPKHSLLYEYFTVYNELTKVKYVTEGMRKPAFLSGEQKKAIVDLLFKTNRKVTVKQLKEDYFKKIECFDSVEISGVEDRFNASLGTYHDLLKIIKDKDFLDNEENEDILEDIVLTLTLFEDREMIEERLKTYAHLFDDKVMKQLKRRRYTGWGRLSRKLINGIRDKQSGKTILDFLKSDGFANRNFMQLIHDDSLTFKEDIQKAQVSGQGDSLHEHIANLAGSPAIKKGILQTVKVVDELVKVMGRHKPENIVIEMARENQTTQKGQKNSRERMKRIEEGIKELGSQILKEHPVENTQLQNEKLYLYYLQNGRDMYVDQELDINRLSDYDVDHIVPQSFLKDDSIDNKVLTRSDKARGKSDNVPSEEVVKKMKNYWRQLLNAKLITQRKFDNLTKAERGGLSELDKAGFIKRQLVETRQITKHVAQILDSRMNTKYDENDKLIREVKVITLKSKLVSDFRKDFQFYKVREINNYHHAHDAYLNAVVGTALIKKYPKLESEFVYGDYKVYDVRKMIAKSEQEIGKATAKYFFYSNIMNFFKTEITLANGEIRKRPLIETNGETGEIVWDKGRDFATVRKVLSMPQVNIVKKTEVQTGGFSKESILPKRNSDKLIARKKDWDPKKYGGFDSPTVAYSVLVVAKVEKGKSKKLKSVKELLGITIMERSSFEKNPIDFLEAKGYKEVKKDLIIKLPKYSLFELENGRKRMLASAGELQKGNELALPSKYVNFLYLASHYEKLKGSPEDNEQKQLFVEQHKHYLDEIIEQISEFSKRVILADANLDKVLSAYNKHRDKPIREQAENIIHLFTLTNLGAPAAFKYFDTTIDRKRYTSTKEVLDATLIHQSITGLYETRIDLSQLGGDGGPAPAPAPAPGGVPWILKKPLELTIKLDLEEQQGTLLNNSILSKKGKEELKQLFEKYSALWQSWENQVGHRRIRPHKIATGTVKPTPQKQYHINPKAKPDIQIVINDLLKQGVLIQKESTMNTPVYPVPKPNGRWRMVLDYRAVNKVTPLIAVQNQHSYGILGSLFKGRYKTTIDLSNGFWAHPIVPEDYWITAFTWQGKQYCWTVLPQGFLNSPGLFNGDVVDLLQGIPNVEVYVDDVYISHDSEKEHLEYLDILFNRLKEAGYIISLKKSNIANSIVDFLGFQITNEGRGLTDTFKEKLENITAPTTLKQLQSILGKLNFARNFIPDFTELIAPLYALIPKSPKNYVPWQIEHSTTLETLITKLNGAEYLQGRKGDKTLIMKVNASYTTGYIRYYNEGEKKPISYVSIVFSKTELKFTELEKLLTTVHKGLLKALDLSMGQNIHVYSPIVSMQNIQKTPQTAKKALASRWLSWLSYLEDPRIRFFYDPQMPALKDLPAVDTGKDNKKHPSNFQHIFYTDGSAITSPTKEGHLNAGMGIVYFINKDGNLQKQQEWSISLGNHTAQFAEIAAFEFALKKCLPLGGNILVVTDSNYVAKAYNEELDVWASNGFVNNRKKPLKHISKWKSVADLKRLRPDVVVTHEPGHQKLDSSPHAYGNNLADQLATQASFKVHAGKRTADGSEFEKRTADGSEFESPKKKAKVE

SEQ ID NO: 6517 - protein, 2093 aa, synthetic construct
MPAAKRVKLDGGDKKYSIGLDIGTNSVGWAVITDEYKVPSKKFKVLGNTDRHSIKKNLIGALLFDSGETAEATRLKRTARRRYTRRKNRICYLQEIFSNEMAKVDDSFFHRLEESFLVEEDKKHERHPIFGNIVDEVAYHEKYPTIYHLRKKLVDSTDKADLRLIYLALAHMIKFRGHFLIEGDLNPDNSDVDKLFIQLVQTYNQLFEENPINASGVDAKAILSARLSKSRRLENLIAQLPGEKKNGLFGNLIALSLGLTPNFKSNFDLAEDAKLQLSKDTYDDDLDNLLAQIGDQYADLFLAAKNLSDAILLSDILRVNTEITKAPLSASMIKRYDEHHQDLTLLKALVRQQLPEKYKEIFFDQSKNGYAGYIDGGASQEEFYKFIKPILEKMDGTEELLVKLNREDLLRKQRTFDNGSIPHQIHLGELHAILRRQEDFYPFLKDNREKIEKILTFRIPYYVGPLARGNSRFAWMTRKSEETITPWNFEEVVDKGASAQSFIERMTNFDKNLPNEKVLPKHSLLYEYFTVYNELTKVKYVTEGMRKPAFLSGEQKKAIVDLLFKTNRKVTVKQLKEDYFKKIECFDSVEISGVEDRFNASLGTYHDLLKIIKDKDFLDNEENEDILEDIVLTLTLFEDREMIEERLKTYAHLFDDKVMKQLKRRRYTGWGRLSRKLINGIRDKQSGKTILDFLKSDGFANRNFMQLIHDDSLTFKEDIQKAQVSGQGDSLHEHIANLAGSPAIKKGILQTVKVVDELVKVMGRHKPENIVIEMARENQTTQKGQKNSRERMKRIEEGIKELGSQILKEHPVENTQLQNEKLYLYYLQNGRDMYVDQELDINRLSDYDVDHIVPQSFLKDDSIDNKVLTRSDKARGKSDNVPSEEVVKKMKNYWRQLLNAKLITQRKFDNLTKAERGGLSELDKAGFIKRQLVETRQITKHVAQILDSRMNTKYDENDKLIREVKVITLKSKLVSDFRKDFQFYKVREINNYHHAHDAYLNAVVGTALIKKYPKLESEFVYGDYKVYDVRKMIAKSEQEIGKATAKYFFYSNIMNFFKTEITLANGEIRKRPLIETNGETGEIVWDKGRDFATVRKVLSMPQVNIVKKTEVQTGGFSKESILPKRNSDKLIARKKDWDPKKYGGFDSPTVAYSVLVVAKVEKGKSKKLKSVKELLGITIMERSSFEKNPIDFLEAKGYKEVKKDLIIKLPKYSLFELENGRKRMLASAGELQKGNELALPSKYVNFLYLASHYEKLKGSPEDNEQKQLFVEQHKHYLDEIIEQISEFSKRVILADANLDKVLSAYNKHRDKPIREQAENIIHLFTLTNLGAPAAFKYFDTTIDRKRYTSTKEVLDATLIHQSITGLYETRIDLSQLGGDGGPAPAPAPAPGGTLQLEEEYRLFEPESTQKQEMDIWLKNFPQAWAETGGMGTAHCQAPVLIQLKATATPISIRQYPMPHEAYQGIKPHIRRMLDQGILKPCQSPWNTPLLPVKKPGTEDYRPVQDLREVNKRVEDIHPTVPNPYNLLSTLPPSHPWYTVLDLKDAFFCLRLHSESQLLFAFEWRDPEIGLSGQLTWTRLPQGFKNSPTLFNEALHSDLADFRVRYPALVLLQYVDDLLLAAATRTECLEGTKALLETLGNKGYRASAKKAQICLQEVTYLGYSLKDGQRWLTKARKEAILSIPVPKNSRQVREFLGTAGYCRLWIPGFAELAAPLYPLTRPGTLFQWGTEQQLAFEDIKKALLSSPALGLPDITKPFELFIDENSGFAKGVLVQKLGPWKRPVAYLSKKLDTVASGWPPCLRMVAAIAILVKDAGKLTLGQPLTILTSHPVEALVRQPPNKWLSNARMTHYQAMLLDAERVHFGPTVSLNPATLLPLPSGGNHHDCLQILAETHGTRPDLTDQPLPDADLTWYTDGSSFIRNGEREAGAAVTTESEVIWAAPLPPGTSAQRAELIALTQALKMAEGKKLTVYTDSRYAFATTHVHGEIYRRRGWLTSEGKEIKNKNEILALLEALFLPKRLSIIHCPGHQKGDSPQAKGNRLADDTAKKAATETHSSLTVLPAGKRTADGSEFEKRTADGSEFESPKKKAKVE

SEQ ID NO: 6518 - protein, 2085 aa, synthetic construct
MPAAKRVKLDGGDKKYSIGLDIGTNSVGWAVITDEYKVPSKKFKVLGNTDRHSIKKNLIGALLFDSGETAEATRLKRTARRRYTRRKNRICYLQEIFSNEMAKVDDSFFHRLEESFLVEEDKKHERHPIFGNIVDEVAYHEKYPTIYHLRKKLVDSTDKADLRLIYLALAHMIKFRGHFLIEGDLNPDNSDVDKLFIQLVQTYNQLFEENPINASGVDAKAILSARLSKSRRLENLIAQLPGEKKNGLFGNLIALSLGLTPNFKSNFDLAEDAKLQLSKDTYDDDLDNLLAQIGDQYADLFLAAKNLSDAILLSDILRVNTEITKAPLSASMIKRYDEHHQDLTLLKALVRQQLPEKYKEIFFDQSKNGYAGYIDGGASQEEFYKFIKPILEKMDGTEELLVKLNREDLLRKQRTFDNGSIPHQIHLGELHAILRRQEDFYPFLKDNREKIEKILTFRIPYYVGPLARGNSRFAWMTRKSEETITPWNFEEVVDKGASAQSFIERMTNFDKNLPNEKVLPKHSLLYEYFTVYNELTKVKYVTEGMRKPAFLSGEQKKAIVDLLFKTNRKVTVKQLKEDYFKKIECFDSVEISGVEDRFNASLGTYHDLLKIIKDKDFLDNEENEDILEDIVLTLTLFEDREMIEERLKTYAHLFDDKVMKQLKRRRYTGWGRLSRKLINGIRDKQSGKTILDFLKSDGFANRNFMQLIHDDSLTFKEDIQKAQVSGQGDSLHEHIANLAGSPAIKKGILQTVKVVDELVKVMGRHKPENIVIEMARENQTTQKGQKNSRERMKRIEEGIKELGSQILKEHPVENTQLQNEKLYLYYLQNGRDMYVDQELDINRLSDYDVDHIVPQSFLKDDSIDNKVLTRSDKARGKSDNVPSEEVVKKMKNYWRQLLNAKLITQRKFDNLTKAERGGLSELDKAGFIKRQLVETRQITKHVAQILDSRMNTKYDENDKLIREVKVITLKSKLVSDFRKDFQFYKVREINNYHHAHDAYLNAVVGTALIKKYPKLESEFVYGDYKVYDVRKMIAKSEQEIGKATAKYFFYSNIMNFFKTEITLANGEIRKRPLIETNGETGEIVWDKGRDFATVRKVLSMPQVNIVKKTEVQTGGFSKESILPKRNSDKLIARKKDWDPKKYGGFDSPTVAYSVLVVAKVEKGKSKKLKSVKELLGITIMERSSFEKNPIDFLEAKGYKEVKKDLIIKLPKYSLFELENGRKRMLASAGELQKGNELALPSKYVNFLYLASHYEKLKGSPEDNEQKQLFVEQHKHYLDEIIEQISEFSKRVILADANLDKVLSAYNKHRDKPIREQAENIIHLFTLTNLGAPAAFKYFDTTIDRKRYTSTKEVLDATLIHQSITGLYETRIDLSQLGGDGGPAPAPAPAPGGVPWLTQQPLQLTILVPLQEYQEKILSKTALPEDQKQQLKTLFVKYDNLWQHWENQVGHRKIRPHNIATGDYPPRPQKQYPINPKAKPSIQIVIDDLLKQGVLTPQNSTMNTPVYPVPKPDGRWRMVLDYREVNKTIPLTAAQNQHSAGILATIVRQKYKTTLDLANGFWAHPITPESYWLTAFTWQGKQYCWTRLPQGFLNSPALFNADVVDLLKEIPNVQVYVDDIYLSHDDPKEHVQQLEKVFQILLQAGYVVSLKKSEIGQKTVEFLGFNITKEGRGLTDTFKTKLLNITPPKDLKQLQSILGKLNFARNFIPNFAELVQPLYNLIAPAKGKYIEWSEENTKQLNMVIEALNTASNLEERLPEQRLVIKVNTSPSAGYVRYYNETGKKPIMYLNYVFSKAELKFSMLEKLLTTMHKALIKAMDLAMGQEILVYSPIVSMTKIQKTPLPERKALPIRWITWMTYLEDPRIQFHYDKTLPELKHIPDVYTSSQSPVKHPSQYEGVFYTDGSAIKSPDPTKSNNAGMGIVHATYKPEYQVLNQWSIPLGNHTAQMAEIAAVEFACKKALKIPGPVLVITDSFYVAESANKELPYWKSNGFVNNKKKPLKHISKWKSIAECLSMKPDITIQHEKGISLQIPVFILKGNALADKLATQGSYVVNAGKRTADGSEFEKRTADGSEFESPKKKAKVE

SEQ ID NO: 6519 - protein, 2216 aa, synthetic construct
MPAAKRVKLDGGDKKYSIGLDIGTNSVGWAVITDEYKVPSKKFKVLGNTDRHSIKKNLIGALLFDSGETAEATRLKRTARRRYTRRKNRICYLQEIFSNEMAKVDDSFFHRLEESFLVEEDKKHERHPIFGNIVDEVAYHEKYPTIYHLRKKLVDSTDKADLRLIYLALAHMIKFRGHFLIEGDLNPDNSDVDKLFIQLVQTYNQLFEENPINASGVDAKAILSARLSKSRRLENLIAQLPGEKKNGLFGNLIALSLGLTPNFKSNFDLAEDAKLQLSKDTYDDDLDNLLAQIGDQYADLFLAAKNLSDAILLSDILRVNTEITKAPLSASMIKRYDEHHQDLTLLKALVRQQLPEKYKEIFFDQSKNGYAGYIDGGASQEEFYKFIKPILEKMDGTEELLVKLNREDLLRKQRTFDNGSIPHQIHLGELHAILRRQEDFYPFLKDNREKIEKILTFRIPYYVGPLARGNSRFAWMTRKSEETITPWNFEEVVDKGASAQSFIERMTNFDKNLPNEKVLPKHSLLYEYFTVYNELTKVKYVTEGMRKPAFLSGEQKKAIVDLLFKTNRKVTVKQLKEDYFKKIECFDSVEISGVEDRFNASLGTYHDLLKIIKDKDFLDNEENEDILEDIVLTLTLFEDREMIEERLKTYAHLFDDKVMKQLKRRRYTGWGRLSRKLINGIRDKQSGKTILDFLKSDGFANRNFMQLIHDDSLTFKEDIQKAQVSGQGDSLHEHIANLAGSPAIKKGILQTVKVVDELVKVMGRHKPENIVIEMARENQTTQKGQKNSRERMKRIEEGIKELGSQILKEHPVENTQLQNEKLYLYYLQNGRDMYVDQELDINRLSDYDVDHIVPQSFLKDDSIDNKVLTRSDKARGKSDNVPSEEVVKKMKNYWRQLLNAKLITQRKFDNLTKAERGGLSELDKAGFIKRQLVETRQITKHVAQILDSRMNTKYDENDKLIREVKVITLKSKLVSDFRKDFQFYKVREINNYHHAHDAYLNAVVGTALIKKYPKLESEFVYGDYKVYDVRKMIAKSEQEIGKATAKYFFYSNIMNFFKTEITLANGEIRKRPLIETNGETGEIVWDKGRDFATVRKVLSMPQVNIVKKTEVQTGGFSKESILPKRNSDKLIARKKDWDPKKYGGFDSPTVAYSVLVVAKVEKGKSKKLKSVKELLGITIMERSSFEKNPIDFLEAKGYKEVKKDLIIKLPKYSLFELENGRKRMLASAGELQKGNELALPSKYVNFLYLASHYEKLKGSPEDNEQKQLFVEQHKHYLDEIIEQISEFSKRVILADANLDKVLSAYNKHRDKPIREQAENIIHLFTLTNLGAPAAFKYFDTTIDRKRYTSTKEVLDATLIHQSITGLYETRIDLSQLGGDGGPAPAPAPAPGGTLGDQGSRGSDPLPEPRVTLTVEGIPTEFLVNTGAEHSVLTKPMGKMGSKRTVVAGATGSKVYPWTTKRLLKIGQKQVTHSFLVIPECPAPLLGRDLLTKLKAQIQFSTEGPQVTWEDRPAMCLVLNLEEEYRLHEKPVPPSIDPSWLQLFPMVWAEKAGMGLANQVPPVVVELKSDASPVAVRQYPMSKEAREGIRPHIQRFLDLGILVPCQSPWNTPLLPVKKPGTNDYRPVQDLREVNKRVQDIHPTVPNPYNLLSSLPPSHTWYSVLDLKDAFFCLKLHPNSQPLFAFEWRDPEKGNTGQLTWTRLPQGFKNSPTLFDEALHRDLASFRALNPQVVMLQYVDDLLVAAPTYRDCKEGTRRLLQELSKLGYRVSAKKAQLCREEVTYLGYLLKGGKRWLTPARKATVMKIPTPTTPRQVREFLGTAGFCRLWIPGFASLAAPLYPLTREKVPFTWTEAHQEAFGRIKEALLSAPALALPDLTKPFALYVDEKEGVARGVLTQTLGPWRRPVAYLSKKLDPVASGWPTCLKAIAAVALLLKDADKLTLGQNVLVIAPHNLESIVRQPPDRWMTNARMTHYQSLLLNERVSFAPPAILNPATLLPVESDDTPIHICSEILAEETGTRPDLRDQPLPGVPAWYTDGSSFIMDGRRQAGAAIVDNKRTVWASNLPEGTSAQKAELIALTQALRLAEGKSINIYTDSRYAFATAHVHGAIYKQRGLLTSAGKDIKNKEEILALLEAIHLPKRVAIIHCPGHQRGTDPVATGNRKADEAAKQAAQSTRILTETTKNAGKRTADGSEFEKRTADGSEFESPKKKAKVE

SEQ ID NO: 6520 - protein, 2125 aa, synthetic construct
MPAAKRVKLDGGDKKYSIGLDIGTNSVGWAVITDEYKVPSKKFKVLGNTDRHSIKKNLIGALLFDSGETAEATRLKRTARRRYTRRKNRICYLQEIFSNEMAKVDDSFFHRLEESFLVEEDKKHERHPIFGNIVDEVAYHEKYPTIYHLRKKLVDSTDKADLRLIYLALAHMIKFRGHFLIEGDLNPDNSDVDKLFIQLVQTYNQLFEENPINASGVDAKAILSARLSKSRRLENLIAQLPGEKKNGLFGNLIALSLGLTPNFKSNFDLAEDAKLQLSKDTYDDDLDNLLAQIGDQYADLFLAAKNLSDAILLSDILRVNTEITKAPLSASMIKRYDEHHQDLTLLKALVRQQLPEKYKEIFFDQSKNGYAGYIDGGASQEEFYKFIKPILEKMDGTEELLVKLNREDLLRKQRTFDNGSIPHQIHLGELHAILRRQEDFYPFLKDNREKIEKILTFRIPYYVGPLARGNSRFAWMTRKSEETITPWNFEEVVDKGASAQSFIERMTNFDKNLPNEKVLPKHSLLYEYFTVYNELTKVKYVTEGMRKPAFLSGEQKKAIVDLLFKTNRKVTVKQLKEDYFKKIECFDSVEISGVEDRFNASLGTYHDLLKIIKDKDFLDNEENEDILEDIVLTLTLFEDREMIEERLKTYAHLFDDKVMKQLKRRRYTGWGRLSRKLINGIRDKQSGKTILDFLKSDGFANRNFMQLIHDDSLTFKEDIQKAQVSGQGDSLHEHIANLAGSPAIKKGILQTVKVVDELVKVMGRHKPENIVIEMARENQTTQKGQKNSRERMKRIEEGIKELGSQILKEHPVENTQLQNEKLYLYYLQNGRDMYVDQELDINRLSDYDVDHIVPQSFLKDDSIDNKVLTRSDKARGKSDNVPSEEVVKKMKNYWRQLLNAKLITQRKFDNLTKAERGGLSELDKAGFIKRQLVETRQITKHVAQILDSRMNTKYDENDKLIREVKVITLKSKLVSDFRKDFQFYKVREINNYHHAHDAYLNAVVGTALIKKYPKLESEFVYGDYKVYDVRKMIAKSEQEIGKATAKYFFYSNIMNFFKTEITLANGEIRKRPLIETNGETGEIVWDKGRDFATVRKVLSMPQVNIVKKTEVQTGGFSKESILPKRNSDKLIARKKDWDPKKYGGFDSPTVAYSVLVVAKVEKGKSKKLKSVKELLGITIMERSSFEKNPIDFLEAKGYKEVKKDLIIKLPKYSLFELENGRKRMLASAGELQKGNELALPSKYVNFLYLASHYEKLKGSPEDNEQKQLFVEQHKHYLDEIIEQISEFSKRVILADANLDKVLSAYNKHRDKPIREQAENIIHLFTLTNLGAPAAFKYFDTTIDRKRYTSTKEVLDATLIHQSITGLYETRIDLSQLGGDGGPAPAPAPAPGGLLGRDLLTKLKAQIQFSTEGPQVTWEDRPAMCLVLNLEEEYRLHEKPVPPSIDPSWLQLFPMVWAEKAGMGLANQVPPVVVELKSDASPVAVRQYPMSKEAREGIRPHIQRFLDLGILVPCQSPWNTPLLPVKKPGTNDYRPVQDLREVNKRVQDIHPTVPNPYNLLSSLPPSHTWYSVLDLKDAFFCLKLHPNSQPLFAFEWRDPEKGNTGQLTWTRLPQGFKNSPTLFNEALHRDLASFRALNPQVVMLQYVDDLLVAAPTYRDCKEGTRRLLQELSKLGYRVSAKKAQLCREEVTYLGYLLKGGKRWLTPARKATVMKIPTPTTPRQVREFLGTAGFCRLWIPGFASLAAPLYPLTRPKVPFTWTEAHQEAFGRIKEALLSAPALALPDLTKPFALYVDEKEGVARGVLTQTLGPWRRPVAYLSKKLDPVASGWPTCLKAIAAVALLLKDADKLTLGQNVLVIAPHNLESIVRQPPDRWMTNARMTHYQSLLLNERVSFAPPAILNPATLLPVESDDTPIHICSEILAEETGTRPDLRDQPLPGVPAWYTDGSSFIMDGRRQAGAAIVDNKRTVWASNLPEGTSAQKAELIALTQALRLAEGKSINIYTDSRYAFATAHVHGAIYKQRGWLTSAGKDIKNKEEILALLEAIHLPKRVAIIHCPGHQRGTDPVATGNRKADEAAKQAAQSTRILTETTKNAGKRTADGSEFEKRTADGSEFESPKKKAKVE

SEQ ID NO: 6521 - protein, 2216 aa, synthetic construct
MPAAKRVKLDGGDKKYSIGLDIGTNSVGWAVITDEYKVPSKKFKVLGNTDRHSIKKNLIGALLFDSGETAEATRLKRTARRRYTRRKNRICYLQEIFSNEMAKVDDSFFHRLEESFLVEEDKKHERHPIFGNIVDEVAYHEKYPTIYHLRKKLVDSTDKADLRLIYLALAHMIKFRGHFLIEGDLNPDNSDVDKLFIQLVQTYNQLFEENPINASGVDAKAILSARLSKSRRLENLIAQLPGEKKNGLFGNLIALSLGLTPNFKSNFDLAEDAKLQLSKDTYDDDLDNLLAQIGDQYADLFLAAKNLSDAILLSDILRVNTEITKAPLSASMIKRYDEHHQDLTLLKALVRQQLPEKYKEIFFDQSKNGYAGYIDGGASQEEFYKFIKPILEKMDGTEELLVKLNREDLLRKQRTFDNGSIPHQIHLGELHAILRRQEDFYPFLKDNREKIEKILTFRIPYYVGPLARGNSRFAWMTRKSEETITPWNFEEVVDKGASAQSFIERMTNFDKNLPNEKVLPKHSLLYEYFTVYNELTKVKYVTEGMRKPAFLSGEQKKAIVDLLFKTNRKVTVKQLKEDYFKKIECFDSVEISGVEDRFNASLGTYHDLLKIIKDKDFLDNEENEDILEDIVLTLTLFEDREMIEERLKTYAHLFDDKVMKQLKRRRYTGWGRLSRKLINGIRDKQSGKTILDFLKSDGFANRNFMQLIHDDSLTFKEDIQKAQVSGQGDSLHEHIANLAGSPAIKKGILQTVKVVDELVKVMGRHKPENIVIEMARENQTTQKGQKNSRERMKRIEEGIKELGSQILKEHPVENTQLQNEKLYLYYLQNGRDMYVDQELDINRLSDYDVDHIVPQSFLKDDSIDNKVLTRSDKARGKSDNVPSEEVVKKMKNYWRQLLNAKLITQRKFDNLTKAERGGLSELDKAGFIKRQLVETRQITKHVAQILDSRMNTKYDENDKLIREVKVITLKSKLVSDFRKDFQFYKVREINNYHHAHDAYLNAVVGTALIKKYPKLESEFVYGDYKVYDVRKMIAKSEQEIGKATAKYFFYSNIMNFFKTEITLANGEIRKRPLIETNGETGEIVWDKGRDFATVRKVLSMPQVNIVKKTEVQTGGFSKESILPKRNSDKLIARKKDWDPKKYGGFDSPTVAYSVLVVAKVEKGKSKKLKSVKELLGITIMERSSFEKNPIDFLEAKGYKEVKKDLIIKLPKYSLFELENGRKRMLASAGELQKGNELALPSKYVNFLYLASHYEKLKGSPEDNEQKQLFVEQHKHYLDEIIEQISEFSKRVILADANLDKVLSAYNKHRDKPIREQAENIIHLFTLTNLGAPAAFKYFDTTIDRKRYTSTKEVLDATLIHQSITGLYETRIDLSQLGGDGGPAPAPAPAPGGTLGDQGSRGSDPLPEPRVTLTVEGIPTEFLVNTGAEHSVLTKPMGKMGSKRTVVAGATGSKVYPWTTKRLLKIGQKQVTHSFLVIPECPAPLLGRDLLTKLKAQIQFSTEGPQVTWEDRPAMCLVLNLEEEYRLHEKPVPPSIDPSWLQLFPMVWAEKAGMGLANQVPPVVVELKSDASPVAVRQYPMSKEAREGIRPHIQRFLDLGILVPCQSPWNTPLLPVKKPGTNDYRPVQDLREVNKRVQDIHPTVPNPYNLLSSLPPSHTWYSVLDLKDAFFCLKLHPNSQPLFAFEWRDPEKGNTGQLTWTRLPQGFKNSPTLFNEALHRDLASFRALNPQVVMLQYVDDLLVAAPTYRDCKEGTRRLLQELSKLGYRVSAKKAQLCREEVTYLGYLLKGGKRWLTPARKATVMKIPTPTTPRQVREFLGTAGFCRLWIPGFASLAAPLYPLTRPKVPFTWTEAHQEAFGRIKEALLSAPALALPDLTKPFALYVDEKEGVARGVLTQTLGPWRRPVAYLSKKLDPVASGWPTCLKAIAAVALLLKDADKLTLGQNVLVIAPHNLESIVRQPPDRWMTNARMTHYQSLLLNERVSFAPPAILNPATLLPVESDDTPIHICSEILAEETGTRPDLRDQPLPGVPAWYTDGSSFIMDGRRQAGAAIVDNKRTVWASNLPEGTSAQKAELIALTQALRLAEGKSINIYTDSRYAFATAHVHGAIYKQRGWLTSAGKDIKNKEEILALLEAIHLPKRVAIIHCPGHQRGTDPVATGNRKADEAAKQAAQSTRILTETTKNAGKRTADGSEFEKRTADGSEFESPKKKAKVE

SEQ ID NO: 6522 - protein, 2094 aa, synthetic construct
MPAAKRVKLDGGDKKYSIGLDIGTNSVGWAVITDEYKVPSKKFKVLGNTDRHSIKKNLIGALLFDSGETAEATRLKRTARRRYTRRKNRICYLQEIFSNEMAKVDDSFFHRLEESFLVEEDKKHERHPIFGNIVDEVAYHEKYPTIYHLRKKLVDSTDKADLRLIYLALAHMIKFRGHFLIEGDLNPDNSDVDKLFIQLVQTYNQLFEENPINASGVDAKAILSARLSKSRRLENLIAQLPGEKKNGLFGNLIALSLGLTPNFKSNFDLAEDAKLQLSKDTYDDDLDNLLAQIGDQYADLFLAAKNLSDAILLSDILRVNTEITKAPLSASMIKRYDEHHQDLTLLKALVRQQLPEKYKEIFFDQSKNGYAGYIDGGASQEEFYKFIKPILEKMDGTEELLVKLNREDLLRKQRTFDNGSIPHQIHLGELHAILRRQEDFYPFLKDNREKIEKILTFRIPYYVGPLARGNSRFAWMTRKSEETITPWNFEEVVDKGASAQSFIERMTNFDKNLPNEKVLPKHSLLYEYFTVYNELTKVKYVTEGMRKPAFLSGEQKKAIVDLLFKTNRKVTVKQLKEDYFKKIECFDSVEISGVEDRFNASLGTYHDLLKIIKDKDFLDNEENEDILEDIVLTLTLFEDREMIEERLKTYAHLFDDKVMKQLKRRRYTGWGRLSRKLINGIRDKQSGKTILDFLKSDGFANRNFMQLIHDDSLTFKEDIQKAQVSGQGDSLHEHIANLAGSPAIKKGILQTVKVVDELVKVMGRHKPENIVIEMARENQTTQKGQKNSRERMKRIEEGIKELGSQILKEHPVENTQLQNEKLYLYYLQNGRDMYVDQELDINRLSDYDVDHIVPQSFLKDDSIDNKVLTRSDKARGKSDNVPSEEVVKKMKNYWRQLLNAKLITQRKFDNLTKAERGGLSELDKAGFIKRQLVETRQITKHVAQILDSRMNTKYDENDKLIREVKVITLKSKLVSDFRKDFQFYKVREINNYHHAHDAYLNAVVGTALIKKYPKLESEFVYGDYKVYDVRKMIAKSEQEIGKATAKYFFYSNIMNFFKTEITLANGEIRKRPLIETNGETGEIVWDKGRDFATVRKVLSMPQVNIVKKTEVQTGGFSKESILPKRNSDKLIARKKDWDPKKYGGFDSPTVAYSVLVVAKVEKGKSKKLKSVKELLGITIMERSSFEKNPIDFLEAKGYKEVKKDLIIKLPKYSLFELENGRKRMLASAGELQKGNELALPSKYVNFLYLASHYEKLKGSPEDNEQKQLFVEQHKHYLDEIIEQISEFSKRVILADANLDKVLSAYNKHRDKPIREQAENIIHLFTLTNLGAPAAFKYFDTTIDRKRYTSTKEVLDATLIHQSITGLYETRIDLSQLGGDGGPAPAPAPAPGGLGIEDEYRLHETSTEPDVSLGSTWLSDFPQAWAETGGMGLAVRQAPLIIPLKATSTPVSIQQYPMSHEARLGIKPHIQRLLDQGILVPCQSPWNTPLLPVKKPGTNDYRPVQDLREVNKRVEDIHPTVPNPYNLLSGLPPSHQWYTVLDLKDAFFCLRLHPTSQPLFAFEWRDPGMGISGQLTWTRLPQGFKNSPTLFNEALHRDLADFRIQHPDLILLQYVDDILLAATSELDCQQGTRALLQTLGDLGYRASAKKAQICQKQVKYLGYLLREGQRWLTEARKETVMGQPVPKTPRQLREFLGKAGFCRLFIPGFAEMAAPLYPLTKPGTLFSWGPDQQKAYQEIKQALLTAPALGLPDLTKPFELFVDEKQGYAKGVLTQKLGPWRRPVAYLSKKLDPVAAGWPPCLRMVAAIAVLTKDAGKLTMGQPLVILAPHAVEALVKQPPDRWLSNARMTHYQAMLLDTDRVQFGPVVALNPATLLPLPEEGAPHDCLEILAETHGTRPDLTDQPIPDADHTWYTDGSSFLQEGQRKAGAAVTTETEVIWAGALPAGTSAQRAELIALTQALKMAEGKRLNVYTDSRYAFATAHIHGEIYRRRGWLTSEGREIKNKSEILALLKALFLPKRLSIIHCLGHQKGDSAEARGNRLADQAAREAAIKTPPDTSTLLIAGKRTADGSEFEKRTADGSEFESPKKKAKVE

SEQ ID NO: 6523 - protein, 2094 aa, synthetic construct; identical to SEQ ID NO: 6522

SEQ ID NO: 6524 - protein, 2094 aa, synthetic construct
MPAAKRVKLDGGDKKYSIGLDIGTNSVGWAVITDEYKVPSKKFKVLGNTDRHSIKKNLIGALLFDSGETAEATRLKRTARRRYTRRKNRICYLQEIFSNEMAKVDDSFFHRLEESFLVEEDKKHERHPIFGNIVDEVAYHEKYPTIYHLRKKLVDSTDKADLRLIYLALAHMIKFRGHFLIEGDLNPDNSDVDKLFIQLVQTYNQLFEENPINASGVDAKAILSARLSKSRRLENLIAQLPGEKKNGLFGNLIALSLGLTPNFKSNFDLAEDAKLQLSKDTYDDDLDNLLAQIGDQYADLFLAAKNLSDAILLSDILRVNTEITKAPLSASMIKRYDEHHQDLTLLKALVRQQLPEKYKEIFFDQSKNGYAGYIDGGASQEEFYKFIKPILEKMDGTEELLVKLNREDLLRKQRTFDNGSIPHQIHLGELHAILRRQEDFYPFLKDNREKIEKILTFRIPYYVGPLARGNSRFAWMTRKSEETITPWNFEEVVDKGASAQSFIERMTNFDKNLPNEKVLPKHSLLYEYFTVYNELTKVKYVTEGMRKPAFLSGEQKKAIVDLLFKTNRKVTVKQLKEDYFKKIECFDSVEISGVEDRFNASLGTYHDLLKIIKDKDFLDNEENEDILEDIVLTLTLFEDREMIEERLKTYAHLFDDKVMKQLKRRRYTGWGRLSRKLINGIRDKQSGKTILDFLKSDGFANRNFMQLIHDDSLTFKEDIQKAQVSGQGDSLHEHIANLAGSPAIKKGILQTVKVVDELVKVMGRHKPENIVIEMARENQTTQKGQKNSRERMKRIEEGIKELGSQILKEHPVENTQLQNEKLYLYYLQNGRDMYVDQELDINRLSDYDVDHIVPQSFLKDDSIDNKVLTRSDKARGKSDNVPSEEVVKKMKNYWRQLLNAKLITQRKFDNLTKAERGGLSELDKAGFIKRQLVETRQITKHVAQILDSRMNTKYDENDKLIREVKVITLKSKLVSDFRKDFQFYKVREINNYHHAHDAYLNAVVGTALIKKYPKLESEFVYGDYKVYDVRKMIAKSEQEIGKATAKYFFYSNIMNFFKTEITLANGEIRKRPLIETNGETGEIVWDKGRDFATVRKVLSMPQVNIVKKTEVQTGGFSKESILPKRNSDKLIARKKDWDPKKYGGFDSPTVAYSVLVVAKVEKGKSKKLKSVKELLGITIMERSSFEKNPIDFLEAKGYKEVKKDLIIKLPKYSLFELENGRKRMLASAGELQKGNELALPSKYVNFLYLASHYEKLKGSPEDNEQKQLFVEQHKHYLDEIIEQISEFSKRVILADANLDKVLSAYNKHRDKPIREQAENIIHLFTLTNLGAPAAFKYFDTTIDRKRYTSTKEVLDATLIHQSITGLYETRIDLSQLGGDGGPAPAPAPAPGGTLNIEDEHRLHETSKEPDVSLGSTWLSDFPQAWAETGGMGLAVRQAPLIIPLKATSTPVSIKQYPMSQEARLGIKPHIQRLLDQGILVPCQSPWNTPLLPVKKPGTNDYRPVQDLREVNKRVEDIHPTVPNPYNLLSGLPPSHQWYTVLDLKDAFFCLRLHPTSQPLFAFEWRDPEMGISGQLTWTRLPQGFKNSPTLFDEALHRDLADFRIQHPDLILLQYVDDLLLAATSELDCQQGTRALLQTLGNLGYRASAKKAQICQKQVKYLGYLLKEGQRWLTEARKETVMGQPTPKTPRQLREFLGTAGFCRLWIPGFAEMAAPLYPLTKTGTLFNWGPDQQKAYQEIKQALLTAPALGLPDLTKPFELFVDEKQGYAKGVLTQKLGPWRRPVAYLSKKLDPVAAGWPPCLRMVAAIAVLTKDAGKLTMGQPLVILAPHAVEALVKQPPDRWLSNARMTHYQALLLDTDRVQFGPVVALNPATLLPLPEEGLQHNCLDILAEAHGTRPDLTDQPLPDADHTWYTDGSSLLQEGQRKAGAAVTTETEVIWAKALPAGTSAQRAELIALTQALKMAEGKKLNVYTDSRYAFATAHIHGEIYRRRGLLTSEGKEIKNKDEILALLKALFLPKRLSIIHCPGHQKGHSAEARGNRMADQAARKAAITETPDTSTLLAGKRTADGSEFEKRTADGSEFESPKKKAKVE

SEQ ID NO: 6525 - protein, 2086 aa, synthetic construct
MPAAKRVKLDGGDKKYSIGLDIGTNSVGWAVITDEYKVPSKKFKVLGNTDRHSIKKNLIGALLFDSGETAEATRLKRTARRRYTRRKNRICYLQEIFSNEMAKVDDSFFHRLEESFLVEEDKKHERHPIFGNIVDEVAYHEKYPTIYHLRKKLVDSTDKADLRLIYLALAHMIKFRGHFLIEGDLNPDNSDVDKLFIQLVQTYNQLFEENPINASGVDAKAILSARLSKSRRLENLIAQLPGEKKNGLFGNLIALSLGLTPNFKSNFDLAEDAKLQLSKDTYDDDLDNLLAQIGDQYADLFLAAKNLSDAILLSDILRVNTEITKAPLSASMIKRYDEHHQDLTLLKALVRQQLPEKYKEIFFDQSKNGYAGYIDGGASQEEFYKFIKPILEKMDGTEELLVKLNREDLLRKQRTFDNGSIPHQIHLGELHAILRRQEDFYPFLKDNREKIEKILTFRIPYYVGPLARGNSRFAWMTRKSEETITPWNFEEVVDKGASAQSFIERMTNFDKNLPNEKVLPKHSLLYEYFTVYNELTKVKYVTEGMRKPAFLSGEQKKAIVDLLFKTNRKVTVKQLKEDYFKKIECFDSVEISGVEDRFNASLGTYHDLLKIIKDKDFLDNEENEDILEDIVLTLTLFEDREMIEERLKTYAHLFDDKVMKQLKRRRYTGWGRLSRKLINGIRDKQSGKTILDFLKSDGFANRNFMQLIHDDSLTFKEDIQKAQVSGQGDSLHEHIANLAGSPAIKKGILQTVKVVDELVKVMGRHKPENIVIEMARENQTTQKGQKNSRERMKRIEEGIKELGSQILKEHPVENTQLQNEKLYLYYLQNGRDMYVDQELDINRLSDYDVDHIVPQSFLKDDSIDNKVLTRSDKARGKSDNVPSEEVVKKMKNYWRQLLNAKLITQRKFDNLTKAERGGLSELDKAGFIKRQLVETRQITKHVAQILDSRMNTKYDENDKLIREVKVITLKSKLVSDFRKDFQFYKVREINNYHHAHDAYLNAVVGTALIKKYPKLESEFVYGDYKVYDVRKMIAKSEQEIGKATAKYFFYSNIMNFFKTEITLANGEIRKRPLIETNGETGEIVWDKGRDFATVRKVLSMPQVNIVKKTEVQTGGFSKESILPKRNSDKLIARKKDWDPKKYGGFDSPTVAYSVLVVAKVEKGKSKKLKSVKELLGITIMERSSFEKNPIDFLEAKGYKEVKKDLIIKLPKYSLFELENGRKRMLASAGELQKGNELALPSKYVNFLYLASHYEKLKGSPEDNEQKQLFVEQHKHYLDEIIEQISEFSKRVILADANLDKVLSAYNKHRDKPIREQAENIIHLFTLTNLGAPAAFKYFDTTIDRKRYTSTKEVLDATLIHQSITGLYETRIDLSQLGGDGGPAPAPAPAPGGLDDEYRLYSPLVKPDQNIQFWLEQFPQAWAETAGMGLAKQVPPQVIQLKASATPVSVRQYPLSKEAQEGIRPHVQRLIQQGILVPVQSPWNTPLLPVRKPGTNDYRPVQDLREVNKRVQDIHPTVPNPYNLLCALPPQRSWYTVLDLKDAFFCLRLHPTSQPLFAFEWRDPGTGRTGQLTWTRLPQGFKNSPTIFNEALHRDLANFRIQHPQVTLLQYVDDLLLAGATKQDCLEGTKALLLELSDLGYRASAKKAQICRREVTYLGYSLRDGQRWLTEARKKTVVQIPAPTTAKQVREFLGKAGFCRLFIPGFATLAAPLYPLTKPKGEFSWAPEHQKAFDAIKKALLSAPALALPDVTKPFTLYVDERKGVARGVLTQTLGPWRRPVAYLSKKLDPVASGWPVCLKAIAAVAILVKDADKLTLGQNITVIAPHALENIVRQPPDRWMTNARMTHYQSLLLTERVTFAPPAALNPATLLPEETDEPVTHDCHQLLIEETGVRKDLTDIPLTGEVLTWFTDGSSYVVEGKRMAGAAVVDGTRTIWASSLPEGTSAQKAELMALTQALRLAEGKSINIYTDSRYAFATAHVHGAIYKQRGWLTSAGREIKNKEEILSLLEALHLPKRLAIIHCPGHQKAKDPISRGNQMADRVAKQAAQGVNLLPAGKRTADGSEFEKRTADGSEFESPKKKAKVE

SEQ ID NO: 6526 - protein, 2088 aa, synthetic construct
MPAAKRVKLDGGDKKYSIGLDIGTNSVGWAVITDEYKVPSKKFKVLGNTDRHSIKKNLIGALLFDSGETAEATRLKRTARRRYTRRKNRICYLQEIFSNEMAKVDDSFFHRLEESFLVEEDKKHERHPIFGNIVDEVAYHEKYPTIYHLRKKLVDSTDKADLRLIYLALAHMIKFRGHFLIEGDLNPDNSDVDKLFIQLVQTYNQLFEENPINASGVDAKAILSARLSKSRRLENLIAQLPGEKKNGLFGNLIALSLGLTPNFKSNFDLAEDAKLQLSKDTYDDDLDNLLAQIGDQYADLFLAAKNLSDAILLSDILRVNTEITKAPLSASMIKRYDEHHQDLTLLKALVRQQLPEKYKEIFFDQSKNGYAGYIDGGASQEEFYKFIKPILEKMDGTEELLVKLNREDLLRKQRTFDNGSIPHQIHLGELHAILRRQEDFYPFLKDNREKIEKILTFRIPYYVGPLARGNSRFAWMTRKSEETITPWNFEEVVDKGASAQSFIERMTNFDKNLPNEKVLPKHSLLYEYFTVYNELTKVKYVTEGMRKPAFLSGEQKKAIVDLLFKTNRKVTVKQLKEDYFKKIECFDSVEISGVEDRFNASLGTYHDLLKIIKDKDFLDNEENEDILEDIVLTLTLFEDREMIEERLKTYAHLFDDKVMKQLKRRRYTGWGRLSRKLINGIRDKQSGKTILDFLKSDGFANRNFMQLIHDDSLTFKEDIQKAQVSGQGDSLHEHIANLAGSPAIKKGILQTVKVVDELVKVMGRHKPENIVIEMARENQTTQKGQKNSRERMKRIEEGIKELGSQILKEHPVENTQLQNEKLYLYYLQNGRDMYVDQELDINRLSDYDVDHIVPQSFLKDDSIDNKVLTRSDKARGKSDNVPSEEVVKKMKNYWRQLLNAKLITQRKFDNLTKAERGGLSELDKAGFIKRQLVETRQITKHVAQILDSRMNTKYDENDKLIREVKVITLKSKLVSDFRKDFQFYKVREINNYHHAHDAYLNAVVGTALIKKYPKLESEFVYGDYKVYDVRKMIAKSEQEIGKATAKYFFYSNIMNFFKTEITLANGEIRKRPLIETNGETGEIVWDKGRDFATVRKVLSMPQVNIVKKTEVQTGGFSKESILPKRNSDKLIARKKDWDPKKYGGFDSPTVAYSVLVVAKVEKGKSKKLKSVKELLGITIMERSSFEKNPIDFLEAKGYKEVKKDLIIKLPKYSLFELENGRKRMLASAGELQKGNELALPSKYVNFLYLASHYEKLKGSPEDNEQKQLFVEQHKHYLDEIIEQISEFSKRVILADANLDKVLSAYNKHRDKPIREQAENIIHLFTLTNLGAPAAFKYFDTTIDRKRYTSTKEVLDATLIHQSITGLYETRIDLSQLGGDGGPAPAPAPAPGGTLQLDDEYRLYSPLVKPDQNIQFWLEQFPQAWAETAGMGLAKQVPPQVIQLKASATPVSVRQYPLSKEAQEGIRPHVQRLIQQGILVPVQSPWNTPLLPVRKPGTNDYRPVQDLREVNKRVQDIHPTVPNPYNLLCALPPQRSWYTVLDLKDAFFCLRLHPTSQPLFAFEWRDPGTGRTGQLTWTRLPQGFKNSPTIFDEALHRDLANFRIQHPQVTLLQYVDDLLLAGATKQDCLEGTKALLLELSDLGYRASAKKAQICRREVTYLGYSLRDGQRWLTEARKKTVVQIPAPTTAKQVREFLGTAGFCRLWIPGFATLAAPLYPLTKEKGEFSWAPEHQKAFDAIKKALLSAPALALPDVTKPFTLYVDERKGVARGVLTQTLGPWRRPVAYLSKKLDPVASGWPVCLKAIAAVAILVKDADKLTLGQNITVIAPHALENIVRQPPDRWMTNARMTHYQSLLLTERVTFAPPAALNPATLLPEETDEPVTHDCHQLLIEETGVRKDLTDIPLTGEVLTWFTDGSSYVVEGKRMAGAAVVDGTRTIWASSLPEGTSAQKAELMALTQALRLAEGKSINIYTDSRYAFATAHVHGAIYKQRGLLTSAGREIKNKEEILSLLEALHLPKRLAIIHCPGHQKAKDPISRGNQMADRVAKQAAQGVNLLAGKRTADGSEFEKRTADGSEFESPKKKAKVE

SEQ ID NO: 6527 - protein, 2086 aa, synthetic construct; identical to SEQ ID NO: 6525

SEQ ID NO: 6528 - protein, 2088 aa, synthetic construct; identical to SEQ ID NO: 6526

SEQ ID NO: 6529 - protein, 2085 aa, synthetic construct
MPAAKRVKLDGGDKKYSIGLDIGTNSVGWAVITDEYKVPSKKFKVLGNTDRHSIKKNLIGALLFDSGETAEATRLKRTARRRYTRRKNRICYLQEIFSNEMAKVDDSFFHRLEESFLVEEDKKHERHPIFGNIVDEVAYHEKYPTIYHLRKKLVDSTDKADLRLIYLALAHMIKFRGHFLIEGDLNPDNSDVDKLFIQLVQTYNQLFEENPINASGVDAKAILSARLSKSRRLENLIAQLPGEKKNGLFGNLIALSLGLTPNFKSNFDLAEDAKLQLSKDTYDDDLDNLLAQIGDQYADLFLAAKNLSDAILLSDILRVNTEITKAPLSASMIKRYDEHHQDLTLLKALVRQQLPEKYKEIFFDQSKNGYAGYIDGGASQEEFYKFIKPILEKMDGTEELLVKLNREDLLRKQRTFDNGSIPHQIHLGELHAILRRQEDFYPFLKDNREKIEKILTFRIPYYVGPLARGNSRFAWMTRKSEETITPWNFEEVVDKGASAQSFIERMTNFDKNLPNEKVLPKHSLLYEYFTVYNELTKVKYVTEGMRKPAFLSGEQKKAIVDLLFKTNRKVTVKQLKEDYFKKIECFDSVEISGVEDRFNASLGTYHDLLKIIKDKDFLDNEENEDILEDIVLTLTLFEDREMIEERLKTYAHLFDDKVMKQLKRRRYTGWGRLSRKLINGIRDKQSGKTILDFLKSDGFANRNFMQLIHDDSLTFKEDIQKAQVSGQGDSLHEHIANLAGSPAIKKGILQTVKVVDELVKVMGRHKPENIVIEMARENQTTQKGQKNSRERMKRIEEGIKELGSQILKEHPVENTQLQNEKLYLYYLQNGRDMYVDQELDINRLSDYDVDHIVPQSFLKDDSIDNKVLTRSDKARGKSDNVPSEEVVKKMKNYWRQLLNAKLITQRKFDNLTKAERGGLSELDKAGFIKRQLVETRQITKHVAQILDSRMNTKYDENDKLIREVKVITLKSKLVSDFRKDFQFYKVREINNYHHAHDAYLNAVVGTALIKKYPKLESEFVYGDYKVYDVRKMIAKSEQEIGKATAKYFFYSNIMNFFKTEITLANGEIRKRPLIETNGETGEIVWDKGRDFATVRKVLSMPQVNIVKKTEVQTGGFSKESILPKRNSDKLIARKKDWDPKKYGGFDSPTVAYSVLVVAKVEKGKSKKLKSVKELLGITIMERSSFEKNPIDFLEAKGYKEVKKDLIIKLPKYSLFELENGRKRMLASAGELQKGNELALPSKYVNFLYLASHYEKLKGSPEDNEQKQLFVEQHKHYLDEIIEQISEFSKRVILADANLDKVLSAYNKHRDKPIREQAENIIHLFTLTNLGAPAAFKYFDTTIDRKRYTSTKEVLDATLIHQSITGLYETRIDLSQLGGDGGPAPAPAPAPGGIPWLMKKPLQLTTLVPLQEYEERLLKQTMLTGSYKEKLQSLFLKYDALWQHWENQVGHRRIKPHHIATGTVNPRPQKQYPINPKAKASIQTVINDLLKQGVLIQQNSIMNTPVYPVPKPDGKWRMVLDYREVNKTIPLIAAQNQHSAGILSSIFRGKYKTTLDLSNGFWAHSITPESYWLTAFTWLGQQYCWTRLPQGFLNSPALFNADVVDLLKEVPNVQVYVDDIYISHDDPREHLEQLEKVFSLLLNAGYVVSLKKSEIAQHEVEFLGFNITKEGRGLTETFKQKLLNITPPRDLKQLQSILGKLNFARNFIPNFSELVKPLYNIIATAPGKYITWTTDNSQQLQNIISMLNSAENLEERNPEVRLIMKVNTSPSAGYIRFYNEFAKRPIMYLNYVYTKAEVKFTNTEKLLTTIHKGLIKALDLGMGQEILVYSPIVSMTKIQKTPLPERKALPIRWITWMSYLEDPRIQFHYDKTLPELQQVPTVTDDIIAKIKHPSEFSMVFYTDGSAIKHPNVNKSHNAGMGIAQVQFKPEFTVINTWSIPLGDHTAQLAEVAAVEFACKKALKIDGPVLIVTDSFYVAESVNKELPYWQSNGFFNNKKKPLKHVSKWKSIADCIQLKPDIIIIHEKGHQPTASTFHTEGNNLADKLATQGSYVVNAGKRTADGSEFEKRTADGSEFESPKKKAKVE

SEQ ID NO: 6530 - protein, 2098 aa, synthetic construct
MPAAKRVKLDGGDKKYSIGLDIGTNSVGWAVITDEYKVPSKKFKVLGNTDRHSIKKNLIGALLFDSGETAEATRLKRTARRRYTRRKNRICYLQEIFSNEMAKVDDSFFHRLEESFLVEEDKKHERHPIFGNIVDEVAYHEKYPTIYHLRKKLVDSTDKADLRLIYLALAHMIKFRGHFLIEGDLNPDNSDVDKLFIQLVQTYNQLFEENPINASGVDAKAILSARLSKSRRLENLIAQLPGEKKNGLFGNLIALSLGLTPNFKSNFDLAEDAKLQLSKDTYDDDLDNLLAQIGDQYADLFLAAKNLSDAILLSDILRVNTEITKAPLSASMIKRYDEHHQDLTLLKALVRQQLPEKYKEIFFDQSKNGYAGYIDGGASQEEFYKFIKPILEKMDGTEELLVKLNREDLLRKQRTFDNGSIPHQIHLGELHAILRRQEDFYPFLKDNREKIEKILTFRIPYYVGPLARGNSRFAWMTRKSEETITPWNFEEVVDKGASAQSFIERMTNFDKNLPNEKVLPKHSLLYEYFTVYNELTKVKYVTEGMRKPAFLSGEQKKAIVDLLFKTNRKVTVKQLKEDYFKKIECFDSVEISGVEDRFNASLGTYHDLLKIIKDKDFLDNEENEDILEDIVLTLTLFEDREMIEERLKTYAHLFDDKVMKQLKRRRYTGWGRLSRKLINGIRDKQSGKTILDFLKSDGFANRNFMQLIHDDSLTFKEDIQKAQVSGQGDSLHEHIANLAGSPAIKKGILQTVKVVDELVKVMGRHKPENIVIEMARENQTTQKGQKNSRERMKRIEEGIKELGSQILKEHPVENTQLQNEKLYLYYLQNGRDMYVDQELDINRLSDYDVDHIVPQSFLKDDSIDNKVLTRSDKARGKSDNVPSEEVVKKMKNYWRQLLNAKLITQRKFDNLTKAERGGLSELDKAGFIKRQLVETRQITKHVAQILDSRMNTKYDENDKLIREVKVITLKSKLVSDFRKDFQFYKVREINNYHHAHDAYLNAVVGTALIKKYPKLESEFVYGDYKVYDVRKMIAKSEQEIGKATAKYFFYSNIMNFFKTEITLANGEIRKRPLIETNGETGEIVWDKGRDFATVRKVLSMPQVNIVKKTEVQTGGFSKESILPKRNSDKLIARKKDWDPKKYGGFDSPTVAYSVLVVAKVEKGKSKKLKSVKELLGITIMERSSFEKNPIDFLEAKGYKEVKKDLIIKLPKYSLFELENGRKRMLASAGELQKGNELALPSKYVNFLYLASHYEKLKGSPEDNEQKQLFVEQHKHYLDEIIEQISEFSKRVILADANLDKVLSAYNKHRDKPIREQAENIIHLFTLTNLGAPAAFKYFDTTIDRKRYTSTKEVLDATLIHQSITGLYETRIDLSQLGGDGGPAPAPAPAPAPGGTAPLEEEYRLFLEAPIQNVTLLEQWKREIPKVWAEINPPGLASTQAPIHVQLLSTALPVRVRQYPITLEAKRSLRETIRKFRAAGILRPVHSPWNTPLLPVRKSGTSEYRMVQDLREVNKRVETIHPTVPNPYTLLSLLPPDRIWYSVLDLKDAFFCIPLAPESQLIFAFEWADAEEGESGQLTWTRLPQGFKNSPTLFNEALNRDLQGFRLDHPSVSLLQYVDDLLIAADTQAACLSATRDLLMTLAELGYRVSGKKAQLCQEEVTYLGFKIHKGSRSLSNSRTQAILQIPVPKTKRQVREFLGTIGYCRLWIPGFAELAQPLYAATRPGNDPLVWGEKEEEAFQSLKLALTQPPALALPSLDKPFQLFVEETSGAAKGVLTQALGPWKRPVAYLSKRLDPVAAGWPRCLRAIAAAALLTREASKLTFGQDIEITSSHNLESLLRSPPDKWLTNARITQYQVLLLDPPRVRFKQTAALNPATLLPETDDTLPIHHCLDTLDSLTSTRPDLTDQPLAQAEATLFTDGSSYIRDGKRYAGAAVVTLDSVIWAEPLPIGTSAQKAELIALTKALEWSKDKSVNIYTDSRYAFATLHVHGMIYRERGWLTAGGKAIKNAPEILALLTAVWLPKRVAVMHCKGHQKDDAPTSTGNRRADEVAREVAIRPLSTQATISAGKRTADGSEFEKRTADGSEFESPKKKAKVE

SEQ ID NO: 6531 - protein, 2098 aa, synthetic construct
MPAAKRVKLDGGDKKYSIGLDIGTNSVGWAVITDEYKVPSKKFKVLGNTDRHSIKKNLIGALLFDSGETAEATRLKRTARRRYTRRKNRICYLQEIFSNEMAKVDDSFFHRLEESFLVEEDKKHERHPIFGNIVDEVAYHEKYPTIYHLRKKLVDSTDKADLRLIYLALAHMIKFRGHFLIEGDLNPDNSDVDKLFIQLVQTYNQLFEENPINASGVDAKAILSARLSKSRRLENLIAQLPGEKKNGLFGNLIALSLGLTPNFKSNFDLAEDAKLQLSKDTYDDDLDNLLAQIGDQYADLFLAAKNLSDAILLSDILRVNTEITKAPLSASMIKRYDEHHQDLTLLKALVRQQLPEKYKEIFFDQSKNGYAGYIDGGASQEEFYKFIKPILEKMDGTEELLVKLNREDLLRKQRTFDNGSIPHQIHLGELHAILRRQEDFYPFLKDNREKIEKILTFRIPYYVGPLARGNSRFAWMTRKSEETITPWNFEEVVDKGASAQSFIERMTNFDKNLPNEKVLPKHSLLYEYFTVYNELTKVKYVTEGMRKPAFLSGEQKKAIVDLLFKTNRKVTVKQLKEDYFKKIECFDSVEISGVEDRFNASLGTYHDLLKIIKDKDFLDNEENEDILEDIVLTLTLFEDREMIEERLKTYAHLFDDKVMKQLKRRRYTGWGRLSRKLINGIRDKQSGKTILDFLKSDGFANRNFMQLIHDDSLTFKEDIQKAQVSGQGDSLHEHIANLAGSPAIKKGILQTVKVVDELVKVMGRHKPENIVIEMARENQTTQKGQKNSRERMKRIEEGIKELGSQILKEHPVENTQLQNEKLYLYYLQNGRDMYVDQELDINRLSDYDVDHIVPQSFLKDDSIDNKVLTRSDKARGKSDNVPSEEVVKKMKNYWRQLLNAKLITQRKFDNLTKAERGGLSELDKAGFIKRQLVETRQITKHVAQILDSRMNTKYDENDKLIREVKVITLKSKLVSDFRKDFQFYKVREINNYHHAHDAYLNAVVGTALIKKYPKLESEFVYGDYKVYDVRKMIAKSEQEIGKATAKYFFYSNIMNFFKTEITLANGEIRKRPLIETNGETGEIVWDKGRDFATVRKVLSMPQVNIVKKTEVQTGGFSKESILPKRNSDKLIARKKDWDPKKYGGFDSPTVAYSVLVVAKVEKGKSKKLKSVKELLGITIMERSSFEKNPIDFLEAKGYKEVKKDLIIKLPKYSLFELENGRKRMLASAGELQKGNELALPSKYVNFLYLASHYEKLKGSPEDNEQKQLFVEQHKHYLDEIIEQISEFSKRVILADANLDKVLSAYNKHRDKPIREQAENIIHLFTLTNLGAPAAFKYFDTTIDRKRYTSTKEVLDATLIHQSITGLYETRIDLSQLGGDGGPAPAPAPAPAPGGTAPLEEEYRLFLEAPIQNVTLLEQWKREIPKVWAEINPPGLASTQAPIHVQLLSTALPVRVRQYPITLEAKRSLRETIRKFRAAGILRPVHSPWNTPLLPVRKSGTSEYRMVQDLREVNKRVETIHPTVPNPYTLLSLLPPDRIWYSVLDLKDAFFCIPLAPESQLIFAFEWADAEEGESGQLTWTRLPQGFKNSPTLFNEALNRDLQGFRLDHPSVSLLQYVDDLLIAADTQAACLSATRDLLMTLAELGYRVSGKKAQLCQEEVTYLGFKIHKGSRSLSNSRTQAILQIPVPKTKRQVREFLGKIGYCRLFIPGFAELAQPLYAATRPGNDPLVWGEKEEEAFQSLKLALTQPPALALPSLDKPFQLFVEETSGAAKGVLTQALGPWKRPVAYLSKRLDPVAAGWPRCLRAIAAAALLTREASKLTFGQDIEITSSHNLESLLRSPPDKWLTNARITQYQVLLLDPPRVRFKQTAALNPATLLPETDDTLPIHHCLDTLDSLTSTRPDLTDQPLAQAEATLFTDGSSYIRDGKRYAGAAVVTLDSVIWAEPLPIGTSAQKAELIALTKALEWSKDKSVNIYTDSRYAFATLHVHGMIYRERGWLTAGGKAIKNAPEILALLTAVWLPKRVAVMHCKGHQKDDAPTSTGNRRADEVAREVAIRPLSTQATISAGKRTADGSEFEKRTADGSEFESPKKKAKVE

SEQ ID NO: 6532 - protein, 2102 aa, synthetic construct
MPAAKRVKLDGGDKKYSIGLDIGTNSVGWAVITDEYKVPSKKFKVLGNTDRHSIKKNLIGALLFDSGETAEATRLKRTARRRYTRRKNRICYLQEIFSNEMAKVDDSFFHRLEESFLVEEDKKHERHPIFGNIVDEVAYHEKYPTIYHLRKKLVDSTDKADLRLIYLALAHMIKFRGHFLIEGDLNPDNSDVDKLFIQLVQTYNQLFEENPINASGVDAKAILSARLSKSRRLENLIAQLPGEKKNGLFGNLIALSLGLTPNFKSNFDLAEDAKLQLSKDTYDDDLDNLLAQIGDQYADLFLAAKNLSDAILLSDILRVNTEITKAPLSASMIKRYDEHHQDLTLLKALVRQQLPEKYKEIFFDQSKNGYAGYIDGGASQEEFYKFIKPILEKMDGTEELLVKLNREDLLRKQRTFDNGSIPHQIHLGELHAILRRQEDFYPFLKDNREKIEKILTFRIPYYVGPLARGNSRFAWMTRKSEETITPWNFEEVVDKGASAQSFIERMTNFDKNLPNEKVLPKHSLLYEYFTVYNELTKVKYVTEGMRKPAFLSGEQKKAIVDLLFKTNRKVTVKQLKEDYFKKIECFDSVEISGVEDRFNASLGTYHDLLKIIKDKDFLDNEENEDILEDIVLTLTLFEDREMIEERLKTYAHLFDDKVMKQLKRRRYTGWGRLSRKLINGIRDKQSGKTILDFLKSDGFANRNFMQLIHDDSLTFKEDIQKAQVSGQGDSLHEHIANLAGSPAIKKGILQTVKVVDELVKVMGRHKPENIVIEMARENQTTQKGQKNSRERMKRIEEGIKELGSQILKEHPVENTQLQNEKLYLYYLQNGRDMYVDQELDINRLSDYDVDHIVPQSFLKDDSIDNKVLTRSDKARGKSDNVPSEEVVKKMKNYWRQLLNAKLITQRKFDNLTKAERGGLSELDKAGFIKRQLVETRQITKHVAQILDSRMNTKYDENDKLIREVKVITLKSKLVSDFRKDFQFYKVREINNYHHAHDAYLNAVVGTALIKKYPKLESEFVYGDYKVYDVRKMIAKSEQEIGKATAKYFFYSNIMNFFKTEITLANGEIRKRPLIETNGETGEIVWDKGRDFATVRKVLSMPQVNIVKKTEVQTGGFSKESILPKRNSDKLIARKKDWDPKKYGGFDSPTVAYSVLVVAKVEKGKSKKLKSVKELLGITIMERSSFEKNPIDFLEAKGYKEVKKDLIIKLPKYSLFELENGRKRMLASAGELQKGNELALPSKYVNFLYLASHYEKLKGSPEDNEQKQLFVEQHKHYLDEIIEQISEFSKRVILADANLDKVLSAYNKHRDKPIREQAENIIHLFTLTNLGAPAAFKYFDTTIDRKRYTSTKEVLDATLIHQSITGLYETRIDLSQLGGDGGPAPAPAPAPAPGGTVSLQDEHRLFDIPVTTSLPDVWLQDFPQAWAETGGLGRAKCQAPIIIDLKPTAVPVSIKQYPMSLEAHMGIRQHIIKFLELGVLRPCRSPWNTPLLPVKKPGTQDYRPVQDLREINKRTVDIHPTVPNPYNLLSTLKPDYSWYTVLDLKDAFFCLPLAPQSQELFAFEWKDPERGISGQLTWTRLPQGFKNSPTLFNEALHRDLTDFRTQHPEVTLLQYVDDLLLAAPTKKACTQGTRHLLQELGEKGYRASAKKAQICQTKVTYLGYILSEGKRWLTPGRIETVARIPPPRNPREVREFLGTAGFCRLWIPGFAELAAPLYALTKPSTPFTWQTEHQLAFEALKKALLSAPALGLPDTSKPFTLFLDERQGIAKGVLTQKLGPWKRPVAYLSKKLDPVAAGWPPCLRIMAATAMLVKDSAKLTLGQPLTVITPHTLEAIVRQPPDRWITNARLTHYQALLLDTDRVQFGPPVTLNPATLLPVPENQPSPHDCRQVLAETHGTREDLKDQELPDADHTWYTDGSSYLDSGTRRAGAAVVDGHNTIWAQSLPPGTSAQKAELIALTKALELSKGKKANIYTDSRYAFATAHTHGSIYERRGWLTSEGKEIKNKAEIIALLKALFLPQEVAIIHCPGHQKGQDPVAVGNRQADRVARQAAMAEVLTLATEPDNTSHITAGKRTADGSEFEKRTADGSEFESPKKKAKVE

SEQ ID NO: 6533 - protein, 2173 aa, synthetic construct
MPAAKRVKLDGGDKKYSIGLDIGTNSVGWAVITDEYKVPSKKFKVLGNTDRHSIKKNLIGALLFDSGETAEATRLKRTARRRYTRRKNRICYLQEIFSNEMAKVDDSFFHRLEESFLVEEDKKHERHPIFGNIVDEVAYHEKYPTIYHLRKKLVDSTDKADLRLIYLALAHMIKFRGHFLIEGDLNPDNSDVDKLFIQLVQTYNQLFEENPINASGVDAKAILSARLSKSRRLENLIAQLPGEKKNGLFGNLIALSLGLTPNFKSNFDLAEDAKLQLSKDTYDDDLDNLLAQIGDQYADLFLAAKNLSDAILLSDILRVNTEITKAPLSASMIKRYDEHHQDLTLLKALVRQQLPEKYKEIFFDQSKNGYAGYIDGGASQEEFYKFIKPILEKMDGTEELLVKLNREDLLRKQRTFDNGSIPHQIHLGELHAILRRQEDFYPFLKDNREKIEKILTFRIPYYVGPLARGNSRFAWMTRKSEETITPWNFEEVVDKGASAQSFIERMTNFDKNLPNEKVLPKHSLLYEYFTVYNELTKVKYVTEGMRKPAFLSGEQKKAIVDLLFKTNRKVTVKQLKEDYFKKIECFDSVEISGVEDRFNASLGTYHDLLKIIKDKDFLDNEENEDILEDIVLTLTLFEDREMIEERLKTYAHLFDDKVMKQLKRRRYTGWGRLSRKLINGIRDKQSGKTILDFLKSDGFANRNFMQLIHDDSLTFKEDIQKAQVSGQGDSLHEHIANLAGSPAIKKGILQTVKVVDELVKVMGRHKPENIVIEMARENQTTQKGQKNSRERMKRIEEGIKELGSQILKEHPVENTQLQNEKLYLYYLQNGRDMYVDQELDINRLSDYDVDHIVPQSFLKDDSIDNKVLTRSDKARGKSDNVPSEEVVKKMKNYWRQLLNAKLITQRKFDNLTKAERGGLSELDKAGFIKRQLVETRQITKHVAQILDSRMNTKYDENDKLIREVKVITLKSKLVSDFRKDFQFYKVREINNYHHAHDAYLNAVVGTALIKKYPKLESEFVYGDYKVYDVRKMIAKSEQEIGKATAKYFFYSNIMNFFKTEITLANGEIRKRPLIETNGETGEIVWDKGRDFATVRKVLSMPQVNIVKKTEVQTGGFSKESILPKRNSDKLIARKKDWDPKKYGGFDSPTVAYSVLVVAKVEKGKSKKLKSVKELLGITIMERSSFEKNPIDFLEAKGYKEVKKDLIIKLPKYSLFELENGRKRMLASAGELQKGNELALPSKYVNFLYLASHYEKLKGSPEDNEQKQLFVEQHKHYLDEIIEQISEFSKRVILADANLDKVLSAYNKHRDKPIREQAENIIHLFTLTNLGAPAAFKYFDTTIDRKRYTSTKEVLDATLIHQSITGLYETRIDLSQLGGDGGPAPAPAPAPAPGGMDLLKPLTVERKGVKIKGYWNSQADITCVPKDLLQGEEPVRQQNVTTIHGTQEGDVYYVNLKIDGRRINTEVIGTTLDYAIITPGDVPWILKKPLELTIKLDLEEQQGTLLNNSILSKKGKEELKQLFEKYSALWQSWENQVGHRRIRPHKIATGTVKPTPQKQYHINPKAKPDIQIVINDLLKQGVLIQKESTMNTPVYPVPKPNGRWRMVLDYRAVNKVTPLIAVQNQHSYGILGSLFKGRYKTTIDLSNGFWAHPIVPEDYWITAFTWQGKQYCWTVLPQGFLNSPGLFTGDVVDLLQGIPNVEVYVDDVYISHDSEKEHLEYLDILFNRLKEAGYIISLKKSNIANSIVDFLGFQITNEGRGLTDTFKEKLENITAPTTLKQLQSILGLLNFARNFIPDFTELIAPLYALIPKSTKNYVPWQIEHSTTLETLITKLNGAEYLQGRKGDKTLIMKVNASYTTGYIRYYNEGEKKPISYVSIVFSKTELKFTELEKLLTTVHKGLLKALDLSMGQNIHVYSPIVSMQNIQKTPQTAKKALASRWLSWLSYLEDPRIRFFYDPQMPALKDLPAVDTGKDNKKHPSNFQHIFYTDGSAITSPTKEGHLNAGMGIVYFINKDGNLQKQQEWSISLGNHTAQFAEIAAFEFALKKCLPLGGNILVVTDSNYVAKAYNEELDVWASNGFVNNRKKPLKHISKWKSVADLKRLRPDVVVTHEPGHQKLDSSPHAYGNNLADQLATQASFKVHAGKRTADGSEFEKRTADGSEFESPKKKAKVE

SEQ ID NO: 6534 - protein, 2173 aa, synthetic construct
MPAAKRVKLDGGDKKYSIGLDIGTNSVGWAVITDEYKVPSKKFKVLGNTDRHSIKKNLIGALLFDSGETAEATRLKRTARRRYTRRKNRICYLQEIFSNEMAKVDDSFFHRLEESFLVEEDKKHERHPIFGNIVDEVAYHEKYPTIYHLRKKLVDSTDKADLRLIYLALAHMIKFRGHFLIEGDLNPDNSDVDKLFIQLVQTYNQLFEENPINASGVDAKAILSARLSKSRRLENLIAQLPGEKKNGLFGNLIALSLGLTPNFKSNFDLAEDAKLQLSKDTYDDDLDNLLAQIGDQYADLFLAAKNLSDAILLSDILRVNTEITKAPLSASMIKRYDEHHQDLTLLKALVRQQLPEKYKEIFFDQSKNGYAGYIDGGASQEEFYKFIKPILEKMDGTEELLVKLNREDLLRKQRTFDNGSIPHQIHLGELHAILRRQEDFYPFLKDNREKIEKILTFRIPYYVGPLARGNSRFAWMTRKSEETITPWNFEEVVDKGASAQSFIERMTNFDKNLPNEKVLPKHSLLYEYFTVYNELTKVKYVTEGMRKPAFLSGEQKKAIVDLLFKTNRKVTVKQLKEDYFKKIECFDSVEISGVEDRFNASLGTYHDLLKIIKDKDFLDNEENEDILEDIVLTLTLFEDREMIEERLKTYAHLFDDKVMKQLKRRRYTGWGRLSRKLINGIRDKQSGKTILDFLKSDGFANRNFMQLIHDDSLTFKEDIQKAQVSGQGDSLHEHIANLAGSPAIKKGILQTVKVVDELVKVMGRHKPENIVIEMARENQTTQKGQKNSRERMKRIEEGIKELGSQILKEHPVENTQLQNEKLYLYYLQNGRDMYVDQELDINRLSDYDVDHIVPQSFLKDDSIDNKVLTRSDKARGKSDNVPSEEVVKKMKNYWRQLLNAKLITQRKFDNLTKAERGGLSELDKAGFIKRQLVETRQITKHVAQILDSRMNTKYDENDKLIREVKVITLKSKLVSDFRKDFQFYKVREINNYHHAHDAYLNAVVGTALIKKYPKLESEFVYGDYKVYDVRKMIAKSEQEIGKATAKYFFYSNIMNFFKTEITLANGEIRKRPLIETNGETGEIVWDKGRDFATVRKVLSMPQVNIVKKTEVQTGGFSKESILPKRNSDKLIARKKDWDPKKYGGFDSPTVAYSVLVVAKVEKGKSKKLKSVKELLGITIMERSSFEKNPIDFLEAKGYKEVKKDLIIKLPKYSLFELENGRKRMLASAGELQKGNELALPSKYVNFLYLASHYEKLKGSPEDNEQKQLFVEQHKHYLDEIIEQISEFSKRVILADANLDKVLSAYNKHRDKPIREQAENIIHLFTLTNLGAPAAFKYFDTTIDRKRYTSTKEVLDATLIHQSITGLYETRIDLSQLGGDGGPAPAPAPAPAPGGMDLLKPLTVERKGVKIKGYWNSQADITCVPKDLLQGEEPVRQQNVTTIHGTQEGDVYYVNLKIDGRRINTEVIGTTLDYAIITPGDVPWILKKPLELTIKLDLEEQQGTLLNNSILSKKGKEELKQLFEKYSALWQSWENQVGHRRIRPHKIATGTVKPTPQKQYHINPKAKPDIQIVINDLLKQGVLIQKESTMNTPVYPVPKPNGRWRMVLDYRAVNKVTPLIAVQNQHSYGILGSLFKGRYKTTIDLSNGFWAHPIVPEDYWITAFTWQGKQYCWTVLPQGFLNSPGLFNGDVVDLLQGIPNVEVYVDDVYISHDSEKEHLEYLDILFNRLKEAGYIISLKKSNIANSIVDFLGFQITNEGRGLTDTFKEKLENITAPTTLKQLQSILGLLNFARNFIPDFTELIAPLYALIPKSPKNYVPWQIEHSTTLETLITKLNGAEYLQGRKGDKTLIMKVNASYTTGYIRYYNEGEKKPISYVSIVFSKTELKFTELEKLLTTVHKGLLKALDLSMGQNIHVYSPIVSMQNIQKTPQTAKKALASRWLSWLSYLEDPRIRFFYDPQMPALKDLPAVDTGKDNKKHPSNFQHIFYTDGSAITSPTKEGHLNAGMGIVYFINKDGNLQKQQEWSISLGNHTAQFAEIAAFEFALKKCLPLGGNILVVTDSNYVAKAYNEELDVWASNGFVNNRKKPLKHISKWKSVADLKRLRPDVVVTHEPGHQKLDSSPHAYGNNLADQLATQASFKVHAGKRTADGSEFEKRTADGSEFESPKKKAKVE

SEQ ID NO: 6535 - protein, 2095 aa, synthetic construct
MPAAKRVKLDGGDKKYSIGLDIGTNSVGWAVITDEYKVPSKKFKVLGNTDRHSIKKNLIGALLFDSGETAEATRLKRTARRRYTRRKNRICYLQEIFSNEMAKVDDSFFHRLEESFLVEEDKKHERHPIFGNIVDEVAYHEKYPTIYHLRKKLVDSTDKADLRLIYLALAHMIKFRGHFLIEGDLNPDNSDVDKLFIQLVQTYNQLFEENPINASGVDAKAILSARLSKSRRLENLIAQLPGEKKNGLFGNLIALSLGLTPNFKSNFDLAEDAKLQLSKDTYDDDLDNLLAQIGDQYADLFLAAKNLSDAILLSDILRVNTEITKAPLSASMIKRYDEHHQDLTLLKALVRQQLPEKYKEIFFDQSKNGYAGYIDGGASQEEFYKFIKPILEKMDGTEELLVKLNREDLLRKQRTFDNGSIPHQIHLGELHAILRRQEDFYPFLKDNREKIEKILTFRIPYYVGPLARGNSRFAWMTRKSEETITPWNFEEVVDKGASAQSFIERMTNFDKNLPNEKVLPKHSLLYEYFTVYNELTKVKYVTEGMRKPAFLSGEQKKAIVDLLFKTNRKVTVKQLKEDYFKKIECFDSVEISGVEDRFNASLGTYHDLLKIIKDKDFLDNEENEDILEDIVLTLTLFEDREMIEERLKTYAHLFDDKVMKQLKRRRYTGWGRLSRKLINGIRDKQSGKTILDFLKSDGFANRNFMQLIHDDSLTFKEDIQKAQVSGQGDSLHEHIANLAGSPAIKKGILQTVKVVDELVKVMGRHKPENIVIEMARENQTTQKGQKNSRERMKRIEEGIKELGSQILKEHPVENTQLQNEKLYLYYLQNGRDMYVDQELDINRLSDYDVDHIVPQSFLKDDSIDNKVLTRSDKARGKSDNVPSEEVVKKMKNYWRQLLNAKLITQRKFDNLTKAERGGLSELDKAGFIKRQLVETRQITKHVAQILDSRMNTKYDENDKLIREVKVITLKSKLVSDFRKDFQFYKVREINNYHHAHDAYLNAVVGTALIKKYPKLESEFVYGDYKVYDVRKMIAKSEQEIGKATAKYFFYSNIMNFFKTEITLANGEIRKRPLIETNGETGEIVWDKGRDFATVRKVLSMPQVNIVKKTEVQTGGFSKESILPKRNSDKLIARKKDWDPKKYGGFDSPTVAYSVLVVAKVEKGKSKKLKSVKELLGITIMERSSFEKNPIDFLEAKGYKEVKKDLIIKLPKYSLFELENGRKRMLASAGELQKGNELALPSKYVNFLYLASHYEKLKGSPEDNEQKQLFVEQHKHYLDEIIEQISEFSKRVILADANLDKVLSAYNKHRDKPIREQAENIIHLFTLTNLGAPAAFKYFDTTIDRKRYTSTKEVLDATLIHQSITGLYETRIDLSQLGGDGGPAPAPAPAPAPGGTLQLEEEYRLFEPESTQKQEMDIWLKNFPQAWAETGGMGTAHCQAPVLIQLKATATPISIRQYPMPHEAYQGIKPHIRRMLDQGILKPCQSPWNTPLLPVKKPGTEDYRPVQDLREVNKRVEDIHPTVPNPYNLLSTLPPSHPWYTVLDLKDAFFCLRLHSESQLLFAFEWRDPEIGLSGQLTWTRLPQGFKNSPTLFDEALHSDLADFRVRYPALVLLQYVDDLLLAAATRTECLEGTKALLETLGNKGYRASAKKAQICLQEVTYLGYSLKDGQRWLTKARKEAILSIPVPKNSRQVREFLGTAGYCRLWIPGFAELAAPLYPLTRPGTLFQWGTEQQLAFEDIKKALLSSPALGLPDITKPFELFIDENSGFAKGVLVQKLGPWKRPVAYLSKKLDTVASGWPPCLRMVAAIAILVKDAGKLTLGQPLTILTSHPVEALVRQPPNKWLSNARMTHYQAMLLDAERVHFGPTVSLNPATLLPLPSGGNHHDCLQILAETHGTRPDLTDQPLPDADLTWYTDGSSFIRNGEREAGAAVTTESEVIWAAPLPPGTSAQRAELIALTQALKMAEGKKLTVYTDSRYAFATTHVHGEIYRRRGLLTSEGKEIKNKNEILALLEALFLPKRLSIIHCPGHQKGDSPQAKGNRLADDTAKKAATETHSSLTVLPAGKRTADGSEFEKRTADGSEFESPKKKAKVE

SEQ ID NO: 6536 - protein, 2176 aa, synthetic construct
MPAAKRVKLDGGDKKYSIGLDIGTNSVGWAVITDEYKVPSKKFKVLGNTDRHSIKKNLIGALLFDSGETAEATRLKRTARRRYTRRKNRICYLQEIFSNEMAKVDDSFFHRLEESFLVEEDKKHERHPIFGNIVDEVAYHEKYPTIYHLRKKLVDSTDKADLRLIYLALAHMIKFRGHFLIEGDLNPDNSDVDKLFIQLVQTYNQLFEENPINASGVDAKAILSARLSKSRRLENLIAQLPGEKKNGLFGNLIALSLGLTPNFKSNFDLAEDAKLQLSKDTYDDDLDNLLAQIGDQYADLFLAAKNLSDAILLSDILRVNTEITKAPLSASMIKRYDEHHQDLTLLKALVRQQLPEKYKEIFFDQSKNGYAGYIDGGASQEEFYKFIKPILEKMDGTEELLVKLNREDLLRKQRTFDNGSIPHQIHLGELHAILRRQEDFYPFLKDNREKIEKILTFRIPYYVGPLARGNSRFAWMTRKSEETITPWNFEEVVDKGASAQSFIERMTNFDKNLPNEKVLPKHSLLYEYFTVYNELTKVKYVTEGMRKPAFLSGEQKKAIVDLLFKTNRKVTVKQLKEDYFKKIECFDSVEISGVEDRFNASLGTYHDLLKIIKDKDFLDNEENEDILEDIVLTLTLFEDREMIEERLKTYAHLFDDKVMKQLKRRRYTGWGRLSRKLINGIRDKQSGKTILDFLKSDGFANRNFMQLIHDDSLTFKEDIQKAQVSGQGDSLHEHIANLAGSPAIKKGILQTVKVVDELVKVMGRHKPENIVIEMARENQTTQKGQKNSRERMKRIEEGIKELGSQILKEHPVENTQLQNEKLYLYYLQNGRDMYVDQELDINRLSDYDVDHIVPQSFLKDDSIDNKVLTRSDKARGKSDNVPSEEVVKKMKNYWRQLLNAKLITQRKFDNLTKAERGGLSELDKAGFIKRQLVETRQITKHVAQILDSRMNTKYDENDKLIREVKVITLKSKLVSDFRKDFQFYKVREINNYHHAHDAYLNAVVGTALIKKYPKLESEFVYGDYKVYDVRKMIAKSEQEIGKATAKYFFYSNIMNFFKTEITLANGEIRKRPLIETNGETGEIVWDKGRDFATVRKVLSMPQVNIVKKTEVQTGGFSKESILPKRNSDKLIARKKDWDPKKYGGFDSPTVAYSVLVVAKVEKGKSKKLKSVKELLGITIMERSSFEKNPIDFLEAKGYKEVKKDLIIKLPKYSLFELENGRKRMLASAGELQKGNELALPSKYVNFLYLASHYEKLKGSPEDNEQKQLFVEQHKHYLDEIIEQISEFSKRVILADANLDKVLSAYNKHRDKPIREQAENIIHLFTLTNLGAPAAFKYFDTTIDRKRYTSTKEVLDATLIHQSITGLYETRIDLSQLGGDGGPAPAPAPAPAPGGMNPLQLLQPLPAEIKGTKLLAHWNSGATITCIPESFLEDEQPIKKTLIKTIHGEKQQNVYYVTFKVKGRKVEAEVIASPYEYILLSPTDVPWLTQQPLQLTILVPLQEYQEKILSKTALPEDQKQQLKTLFVKYDNLWQHWENQVGHRKIRPHNIATGDYPPRPQKQYPINPKAKPSIQIVIDDLLKQGVLTPQNSTMNTPVYPVPKPDGRWRMVLDYREVNKTIPLTAAQNQHSAGILATIVRQKYKTTLDLANGFWAHPITPESYWLTAFTWQGKQYCWTRLPQGFLNSPALFNADVVDLLKEIPNVQVYVDDIYLSHDDPKEHVQQLEKVFQILLQAGYVVSLKKSEIGQKTVEFLGFNITKEGRGLTDTFKTKLLNITPPKDLKQLQSILGLLNFARNFIPNFAELVQPLYNLIAPAKGKYIEWSEENTKQLNMVIEALNTASNLEERLPEQRLVIKVNTSPSAGYVRYYNETGKKPIMYLNYVFSKAELKFSMLEKLLTTMHKALIKAMDLAMGQEILVYSPIVSMTKIQKTPLPERKALPIRWITWMTYLEDPRIQFHYDKTLPELKHIPDVYTSSQSPVKHPSQYEGVFYTDGSAIKSPDPTKSNNAGMGIVHATYKPEYQVLNQWSIPLGNHTAQMAEIAAVEFACKKALKIPGPVLVITDSFYVAESANKELPYWKSNGFVNNKKKPLKHISKWKSIAECLSMKPDITIQHEKGISLQIPVFILKGNALADKLATQGSYVVNAGKRTADGSEFEKRTADGSEFESPKKKAKVE

SEQ ID NO: 6537 - protein, 2009 aa, synthetic construct
MPAAKRVKLDGGDKKYSIGLDIGTNSVGWAVITDEYKVPSKKFKVLGNTDRHSIKKNLIGALLFDSGETAEATRLKRTARRRYTRRKNRICYLQEIFSNEMAKVDDSFFHRLEESFLVEEDKKHERHPIFGNIVDEVAYHEKYPTIYHLRKKLVDSTDKADLRLIYLALAHMIKFRGHFLIEGDLNPDNSDVDKLFIQLVQTYNQLFEENPINASGVDAKAILSARLSKSRRLENLIAQLPGEKKNGLFGNLIALSLGLTPNFKSNFDLAEDAKLQLSKDTYDDDLDNLLAQIGDQYADLFLAAKNLSDAILLSDILRVNTEITKAPLSASMIKRYDEHHQDLTLLKALVRQQLPEKYKEIFFDQSKNGYAGYIDGGASQEEFYKFIKPILEKMDGTEELLVKLNREDLLRKQRTFDNGSIPHQIHLGELHAILRRQEDFYPFLKDNREKIEKILTFRIPYYVGPLARGNSRFAWMTRKSEETITPWNFEEVVDKGASAQSFIERMTNFDKNLPNEKVLPKHSLLYEYFTVYNELTKVKYVTEGMRKPAFLSGEQKKAIVDLLFKTNRKVTVKQLKEDYFKKIECFDSVEISGVEDRFNASLGTYHDLLKIIKDKDFLDNEENEDILEDIVLTLTLFEDREMIEERLKTYAHLFDDKVMKQLKRRRYTGWGRLSRKLINGIRDKQSGKTILDFLKSDGFANRNFMQLIHDDSLTFKEDIQKAQVSGQGDSLHEHIANLAGSPAIKKGILQTVKVVDELVKVMGRHKPENIVIEMARENQTTQKGQKNSRERMKRIEEGIKELGSQILKEHPVENTQLQNEKLYLYYLQNGRDMYVDQELDINRLSDYDVDHIVPQSFLKDDSIDNKVLTRSDKARGKSDNVPSEEVVKKMKNYWRQLLNAKLITQRKFDNLTKAERGGLSELDKAGFIKRQLVETRQITKHVAQILDSRMNTKYDENDKLIREVKVITLKSKLVSDFRKDFQFYKVREINNYHHAHDAYLNAVVGTALIKKYPKLESEFVYGDYKVYDVRKMIAKSEQEIGKATAKYFFYSNIMNFFKTEITLANGEIRKRPLIETNGETGEIVWDKGRDFATVRKVLSMPQVNIVKKTEVQTGGFSKESILPKRNSDKLIARKKDWDPKKYGGFDSPTVAYSVLVVAKVEKGKSKKLKSVKELLGITIMERSSFEKNPIDFLEAKGYKEVKKDLIIKLPKYSLFELENGRKRMLASAGELQKGNELALPSKYVNFLYLASHYEKLKGSPEDNEQKQLFVEQHKHYLDEIIEQISEFSKRVILADANLDKVLSAYNKHRDKPIREQAENIIHLFTLTNLGAPAAFKYFDTTIDRKRYTSTKEVLDATLIHQSITGLYETRIDLSQLGGDGGPAPAPAPAPAPGGGLEHLPPPPEVSQFPLNPERLQALTDLVSRALEAKHIEPYQGPGNNPIFPVKKPNGKWRFIHDLRATNSVTRDLASPSPGPPDLTSLPQGLPHLRTIDLTDAFFQIPLPTIFQPYFAFTLPQPNNYGPGTRYSWRVLPQGFKNSPTLFQQQLSHILTPVRKTFPNSLIIQYMDDILLASPAPGELAALTDKVTNALTKEGLPLSPEKTQATPGPIHFLGQVISQDCITYETLPSINVKSTWSLAELQSMLGELQWVSKGTPVLRSSLHQLYLALRGHRDPRDTIKLTSIQVQALRTIQKALTLNCRSRLVNQLPILALIMLRPTGTTAVLFQTKQKWPLVWLHTPHPATSLRPWGQLLANAVIILDKYSLQHYGQVCKSFHHNISNQALTYYLHTSDQSSVAILLQHSHRFHNLGAQPSGPWRSLLQMPQIFQNIDVLRPPFTISPVVINHAPCLFSDGSASKAAFIIWDRQVIHQQVLSLPSTCSAQAGELFGLLAGLQKSQPWVALNIFLDSKFLIGHLRRMAWGAFPGPSTQCELHTQLLPLLQGKTVYVHHVRSHTLLQDPISRLNEATDALMLAPLLPLAGKRTADGSEFEKRTADGSEFESPKKKAKVE

SEQ ID NO: 6538 - protein, 2127 aa, synthetic construct
MPAAKRVKLDGGDKKYSIGLDIGTNSVGWAVITDEYKVPSKKFKVLGNTDRHSIKKNLIGALLFDSGETAEATRLKRTARRRYTRRKNRICYLQEIFSNEMAKVDDSFFHRLEESFLVEEDKKHERHPIFGNIVDEVAYHEKYPTIYHLRKKLVDSTDKADLRLIYLALAHMIKFRGHFLIEGDLNPDNSDVDKLFIQLVQTYNQLFEENPINASGVDAKAILSARLSKSRRLENLIAQLPGEKKNGLFGNLIALSLGLTPNFKSNFDLAEDAKLQLSKDTYDDDLDNLLAQIGDQYADLFLAAKNLSDAILLSDILRVNTEITKAPLSASMIKRYDEHHQDLTLLKALVRQQLPEKYKEIFFDQSKNGYAGYIDGGASQEEFYKFIKPILEKMDGTEELLVKLNREDLLRKQRTFDNGSIPHQIHLGELHAILRRQEDFYPFLKDNREKIEKILTFRIPYYVGPLARGNSRFAWMTRKSEETITPWNFEEVVDKGASAQSFIERMTNFDKNLPNEKVLPKHSLLYEYFTVYNELTKVKYVTEGMRKPAFLSGEQKKAIVDLLFKTNRKVTVKQLKEDYFKKIECFDSVEISGVEDRFNASLGTYHDLLKIIKDKDFLDNEENEDILEDIVLTLTLFEDREMIEERLKTYAHLFDDKVMKQLKRRRYTGWGRLSRKLINGIRDKQSGKTILDFLKSDGFANRNFMQLIHDDSLTFKEDIQKAQVSGQGDSLHEHIANLAGSPAIKKGILQTVKVVDELVKVMGRHKPENIVIEMARENQTTQKGQKNSRERMKRIEEGIKELGSQILKEHPVENTQLQNEKLYLYYLQNGRDMYVDQELDINRLSDYDVDHIVPQSFLKDDSIDNKVLTRSDKARGKSDNVPSEEVVKKMKNYWRQLLNAKLITQRKFDNLTKAERGGLSELDKAGFIKRQLVETRQITKHVAQILDSRMNTKYDENDKLIREVKVITLKSKLVSDFRKDFQFYKVREINNYHHAHDAYLNAVVGTALIKKYPKLESEFVYGDYKVYDVRKMIAKSEQEIGKATAKYFFYSNIMNFFKTEITLANGEIRKRPLIETNGETGEIVWDKGRDFATVRKVLSMPQVNIVKKTEVQTGGFSKESILPKRNSDKLIARKKDWDPKKYGGFDSPTVAYSVLVVAKVEKGKSKKLKSVKELLGITIMERSSFEKNPIDFLEAKGYKEVKKDLIIKLPKYSLFELENGRKRMLASAGELQKGNELALPSKYVNFLYLASHYEKLKGSPEDNEQKQLFVEQHKHYLDEIIEQISEFSKRVILADANLDKVLSAYNKHRDKPIREQAENIIHLFTLTNLGAPAAFKYFDTTIDRKRYTSTKEVLDATLIHQSITGLYETRIDLSQLGGDGGPAPAPAPAPAPGGLLGRDLLTKLKAQIQFSTEGPQVTWEDRPAMCLVLNLEEEYRLHEKPVPPSIDPSWLQLFPMVWAEKAGMGLANQVPPVVVELKSDASPVAVRQYPMSKEAREGIRPHIQRFLDLGILVPCQSPWNTPLLPVKKPGTNDYRPVQDLREVNKRVQDIHPTVPNPYNLLSSLPPSHTWYSVLDLKDAFFCLKLHPNSQPLFAFEWRDPEKGNTGQLTWTRLPQGFKNSPTLFDEALHRDLASFRALNPQVVMLQYVDDLLVAAPTYRDCKEGTRRLLQELSKLGYRVSAKKAQLCREEVTYLGYLLKGGKRWLTPARKATVMKIPTPTTPRQVREFLGTAGFCRLWIPGFASLAAPLYPLTREKVPFTWTEAHQEAFGRIKEALLSAPALALPDLTKPFALYVDEKEGVARGVLTQTLGPWRRPVAYLSKKLDPVASGWPTCLKAIAAVALLLKDADKLTLGQNVLVIAPHNLESIVRQPPDRWMTNARMTHYQSLLLNERVSFAPPAILNPATLLPVESDDTPIHICSEILAEETGTRPDLRDQPLPGVPAWYTDGSSFIMDGRRQAGAAIVDNKRTVWASNLPEGTSAQKAELIALTQALRLAEGKSINIYTDSRYAFATAHVHGAIYKQRGLLTSAGKDIKNKEEILALLEAIHLPKRVAIIHCPGHQRGTDPVATGNRKADEAAKQAAQSTRILTETTKNAGKRTADGSEFEKRTADGSEFESPKKKAKVE

SEQ ID NO: 6539 - protein, 2218 aa, synthetic construct
MPAAKRVKLDGGDKKYSIGLDIGTNSVGWAVITDEYKVPSKKFKVLGNTDRHSIKKNLIGALLFDSGETAEATRLKRTARRRYTRRKNRICYLQEIFSNEMAKVDDSFFHRLEESFLVEEDKKHERHPIFGNIVDEVAYHEKYPTIYHLRKKLVDSTDKADLRLIYLALAHMIKFRGHFLIEGDLNPDNSDVDKLFIQLVQTYNQLFEENPINASGVDAKAILSARLSKSRRLENLIAQLPGEKKNGLFGNLIALSLGLTPNFKSNFDLAEDAKLQLSKDTYDDDLDNLLAQIGDQYADLFLAAKNLSDAILLSDILRVNTEITKAPLSASMIKRYDEHHQDLTLLKALVRQQLPEKYKEIFFDQSKNGYAGYIDGGASQEEFYKFIKPILEKMDGTEELLVKLNREDLLRKQRTFDNGSIPHQIHLGELHAILRRQEDFYPFLKDNREKIEKILTFRIPYYVGPLARGNSRFAWMTRKSEETITPWNFEEVVDKGASAQSFIERMTNFDKNLPNEKVLPKHSLLYEYFTVYNELTKVKYVTEGMRKPAFLSGEQKKAIVDLLFKTNRKVTVKQLKEDYFKKIECFDSVEISGVEDRFNASLGTYHDLLKIIKDKDFLDNEENEDILEDIVLTLTLFEDREMIEERLKTYAHLFDDKVMKQLKRRRYTGWGRLSRKLINGIRDKQSGKTILDFLKSDGFANRNFMQLIHDDSLTFKEDIQKAQVSGQGDSLHEHIANLAGSPAIKKGILQTVKVVDELVKVMGRHKPENIVIEMARENQTTQKGQKNSRERMKRIEEGIKELGSQILKEHPVENTQLQNEKLYLYYLQNGRDMYVDQELDINRLSDYDVDHIVPQSFLKDDSIDNKVLTRSDKARGKSDNVPSEEVVKKMKNYWRQLLNAKLITQRKFDNLTKAERGGLSELDKAGFIKRQLVETRQITKHVAQILDSRMNTKYDENDKLIREVKVITLKSKLVSDFRKDFQFYKVREINNYHHAHDAYLNAVVGTALIKKYPKLESEFVYGDYKVYDVRKMIAKSEQEIGKATAKYFFYSNIMNFFKTEITLANGEIRKRPLIETNGETGEIVWDKGRDFATVRKVLSMPQVNIVKKTEVQTGGFSKESILPKRNSDKLIARKKDWDPKKYGGFDSPTVAYSVLVVAKVEKGKSKKLKSVKELLGITIMERSSFEKNPIDFLEAKGYKEVKKDLIIKLPKYSLFELENGRKRMLASAGELQKGNELALPSKYVNFLYLASHYEKLKGSPEDNEQKQLFVEQHKHYLDEIIEQISEFSKRVILADANLDKVLSAYNKHRDKPIREQAENIIHLFTLTNLGAPAAFKYFDTTIDRKRYTSTKEVLDATLIHQSITGLYETRIDLSQLGGDGGPAPAPAPAPAPGGTLGDQGSRGSDPLPEPRVTLTVEGIPTEFLVNTGAEHSVLTKPMGKMGSKRTVVAGATGSKVYPWTTKRLLKIGQKQVTHSFLVIPECPAPLLGRDLLTKLKAQIQFSTEGPQVTWEDRPAMCLVLNLEEEYRLHEKPVPPSIDPSWLQLFPMVWAEKAGMGLANQVPPVVVELKSDASPVAVRQYPMSKEAREGIRPHIQRFLDLGILVPCQSPWNTPLLPVKKPGTNDYRPVQDLREVNKRVQDIHPTVPNPYNLLSSLPPSHTWYSVLDLKDAFFCLKLHPNSQPLFAFEWRDPEKGNTGQLTWTRLPQGFKNSPTLFNEALHRDLASFRALNPQVVMLQYVDDLLVAAPTYRDCKEGTRRLLQELSKLGYRVSAKKAQLCREEVTYLGYLLKGGKRWLTPARKATVMKIPTPTTPRQVREFLGTAGFCRLWIPGFASLAAPLYPLTRPKVPFTWTEAHQEAFGRIKEALLSAPALALPDLTKPFALYVDEKEGVARGVLTQTLGPWRRPVAYLSKKLDPVASGWPTCLKAIAAVALLLKDADKLTLGQNVLVIAPHNLESIVRQPPDRWMTNARMTHYQSLLLNERVSFAPPAILNPATLLPVESDDTPIHICSEILAEETGTRPDLRDQPLPGVPAWYTDGSSFIMDGRRQAGAAIVDNKRTVWASNLPEGTSAQKAELIALTQALRLAEGKSINIYTDSRYAFATAHVHGAIYKQRGWLTSAGKDIKNKEEILALLEAIHLPKRVAIIHCPGHQRGTDPVATGNRKADEAAKQAAQSTRILTETTKNAGKRTADGSEFEKRTADGSEFESPKKKAKVE

SEQ ID NO: 6540 - protein, 2096 aa, synthetic construct
MPAAKRVKLDGGDKKYSIGLDIGTNSVGWAVITDEYKVPSKKFKVLGNTDRHSIKKNLIGALLFDSGETAEATRLKRTARRRYTRRKNRICYLQEIFSNEMAKVDDSFFHRLEESFLVEEDKKHERHPIFGNIVDEVAYHEKYPTIYHLRKKLVDSTDKADLRLIYLALAHMIKFRGHFLIEGDLNPDNSDVDKLFIQLVQTYNQLFEENPINASGVDAKAILSARLSKSRRLENLIAQLPGEKKNGLFGNLIALSLGLTPNFKSNFDLAEDAKLQLSKDTYDDDLDNLLAQIGDQYADLFLAAKNLSDAILLSDILRVNTEITKAPLSASMIKRYDEHHQDLTLLKALVRQQLPEKYKEIFFDQSKNGYAGYIDGGASQEEFYKFIKPILEKMDGTEELLVKLNREDLLRKQRTFDNGSIPHQIHLGELHAILRRQEDFYPFLKDNREKIEKILTFRIPYYVGPLARGNSRFAWMTRKSEETITPWNFEEVVDKGASAQSFIERMTNFDKNLPNEKVLPKHSLLYEYFTVYNELTKVKYVTEGMRKPAFLSGEQKKAIVDLLFKTNRKVTVKQLKEDYFKKIECFDSVEISGVEDRFNASLGTYHDLLKIIKDKDFLDNEENEDILEDIVLTLTLFEDREMIEERLKTYAHLFDDKVMKQLKRRRYTGWGRLSRKLINGIRDKQSGKTILDFLKSDGFANRNFMQLIHDDSLTFKEDIQKAQVSGQGDSLHEHIANLAGSPAIKKGILQTVKVVDELVKVMGRHKPENIVIEMARENQTTQKGQKNSRERMKRIEEGIKELGSQILKEHPVENTQLQNEKLYLYYLQNGRDMYVDQELDINRLSDYDVDHIVPQSFLKDDSIDNKVLTRSDKARGKSDNVPSEEVVKKMKNYWRQLLNAKLITQRKFDNLTKAERGGLSELDKAGFIKRQLVETRQITKHVAQILDSRMNTKYDENDKLIREVKVITLKSKLVSDFRKDFQFYKVREINNYHHAHDAYLNAVVGTALIKKYPKLESEFVYGDYKVYDVRKMIAKSEQEIGKATAKYFFYSNIMNFFKTEITLANGEIRKRPLIETNGETGEIVWDKGRDFATVRKVLSMPQVNIVKKTEVQTGGFSKESILPKRNSDKLIARKKDWDPKKYGGFDSPTVAYSVLVVAKVEKGKSKKLKSVKELLGITIMERSSFEKNPIDFLEAKGYKEVKKDLIIKLPKYSLFELENGRKRMLASAGELQKGNELALPSKYVNFLYLASHYEKLKGSPEDNEQKQLFVEQHKHYLDEIIEQISEFSKRVILADANLDKVLSAYNKHRDKPIREQAENIIHLFTLTNLGAPAAFKYFDTTIDRKRYTSTKEVLDATLIHQSITGLYETRIDLSQLGGDGGPAPAPAPAPAPGGLGIEDEYRLHETSTEPDVSLGSTWLSDFPQAWAETGGMGLAVRQAPLIIPLKATSTPVSIQQYPMSHEARLGIKPHIQRLLDQGILVPCQSPWNTPLLPVKKPGTNDYRPVQDLREVNKRVEDIHPTVPNPYNLLSGLPPSHQWYTVLDLKDAFFCLRLHPTSQPLFAFEWRDPGMGISGQLTWTRLPQGFKNSPTLFNEALHRDLADFRIQHPDLILLQYVDDILLAATSELDCQQGTRALLQTLGDLGYRASAKKAQICQKQVKYLGYLLREGQRWLTEARKETVMGQPVPKTPRQLREFLGKAGFCRLFIPGFAEMAAPLYPLTKPGTLFSWGPDQQKAYQEIKQALLTAPALGLPDLTKPFELFVDEKQGYAKGVLTQKLGPWRRPVAYLSKKLDPVAAGWPPCLRMVAAIAVLTKDAGKLTMGQPLVILAPHAVEALVKQPPDRWLSNARMTHYQAMLLDTDRVQFGPVVALNPATLLPLPEEGAPHDCLEILAETHGTRPDLTDQPIPDADHTWYTDGSSFLQEGQRKAGAAVTTETEVIWAGALPAGTSAQRAELIALTQALKMAEGKRLNVYTDSRYAFATAHIHGEIYRRRGWLTSEGREIKNKSEILALLKALFLPKRLSIIHCLGHQKGDSAEARGNRLADQAAREAAIKTPPDTSTLLIAGKRTADGSEFEKRTADGSEFESPKKKAKVE

SEQ ID NO: 6541 - protein, 2096 aa, synthetic construct
MPAAKRVKLDGGDKKYSIGLDIGTNSVGWAVITDEYKVPSKKFKVLGNTDRHSIKKNLIGALLFDSGETAEATRLKRTARRRYTRRKNRICYLQEIFSNEMAKVDDSFFHRLEESFLVEEDKKHERHPIFGNIVDEVAYHEKYPTIYHLRKKLVDSTDKADLRLIYLALAHMIKFRGHFLIEGDLNPDNSDVDKLFIQLVQTYNQLFEENPINASGVDAKAILSARLSKSRRLENLIAQLPGEKKNGLFGNLIALSLGLTPNFKSNFDLAEDAKLQLSKDTYDDDLDNLLAQIGDQYADLFLAAKNLSDAILLSDILRVNTEITKAPLSASMIKRYDEHHQDLTLLKALVRQQLPEKYKEIFFDQSKNGYAGYIDGGASQEEFYKFIKPILEKMDGTEELLVKLNREDLLRKQRTFDNGSIPHQIHLGELHAILRRQEDFYPFLKDNREKIEKILTFRIPYYVGPLARGNSRFAWMTRKSEETITPWNFEEVVDKGASAQSFIERMTNFDKNLPNEKVLPKHSLLYEYFTVYNELTKVKYVTEGMRKPAFLSGEQKKAIVDLLFKTNRKVTVKQLKEDYFKKIECFDSVEISGVEDRFNASLGTYHDLLKIIKDKDFLDNEENEDILEDIVLTLTLFEDREMIEERLKTYAHLFDDKVMKQLKRRRYTGWGRLSRKLINGIRDKQSGKTILDFLKSDGFANRNFMQLIHDDSLTFKEDIQKAQVSGQGDSLHEHIANLAGSPAIKKGILQTVKVVDELVKVMGRHKPENIVIEMARENQTTQKGQKNSRERMKRIEEGIKELGSQILKEHPVENTQLQNEKLYLYYLQNGRDMYVDQELDINRLSDYDVDHIVPQSFLKDDSIDNKVLTRSDKARGKSDNVPSEEVVKKMKNYWRQLLNAKLITQRKFDNLTKAERGGLSELDKAGFIKRQLVETRQITKHVAQILDSRMNTKYDENDKLIREVKVITLKSKLVSDFRKDFQFYKVREINNYHHAHDAYLNAVVGTALIKKYPKLESEFVYGDYKVYDVRKMIAKSEQEIGKATAKYFFYSNIMNFFKTEITLANGEIRKRPLIETNGETGEIVWDKGRDFATVRKVLSMPQVNIVKKTEVQTGGFSKESILPKRNSDKLIARKKDWDPKKYGGFDSPTVAYSVLVVAKVEKGKSKKLKSVKELLGITIMERSSFEKNPIDFLEAKGYKEVKKDLIIKLPKYSLFELENGRKRMLASAGELQKGNELALPSKYVNFLYLASHYEKLKGSPEDNEQKQLFVEQHKHYLDEIIEQISEFSKRVILADANLDKVLSAYNKHRDKPIREQAENIIHLFTLTNLGAPAAFKYFDTTIDRKRYTSTKEVLDATLIHQSITGLYETRIDLSQLGGDGGPAPAPAPAPAPGGTLGIEDEYRLHETSTEPDVSLGSTWLSDFPQAWAETGGMGLAVRQAPLIIPLKATSTPVSIQQYPMSHEARLGIKPHIQRLLDQGILVPCQSPWNTPLLPVKKPGTNDYRPVQDLREVNKRVEDIHPTVPNPYNLLSGLPPSHQWYTVLDLKDAFFCLRLHPTSQPLFAFEWRDPGMGISGQLTWTRLPQGFKNSPTLFDEALHRDLADFRIQHPDLILLQYVDDILLAATSELDCQQGTRALLQTLGDLGYRASAKKAQICQKQVKYLGYLLREGQRWLTEARKETVMGQPVPKTPRQLREFLGTAGFCRLWIPGFAEMAAPLYPLTKTGTLFSWGPDQQKAYQEIKQALLTAPALGLPDLTKPFELFVDEKQGYAKGVLTQKLGPWRRPVAYLSKKLDPVAAGWPPCLRMVAAIAVLTKDAGKLTMGQPLVILAPHAVEALVKQPPDRWLSNARMTHYQAMLLDTDRVQFGPVVALNPATLLPLPEEGAPHDCLEILAETHGTRPDLTDQPIPDADHTWYTDGSSFLQEGQRKAGAAVTTETEVIWAGALPAGTSAQRAELIALTQALKMAEGKRLNVYTDSRYAFATAHIHGEIYRRRGLLTSEGREIKNKSEILALLKALFLPKRLSIIHCLGHQKGDSAEARGNRLADQAAREAAIKTPPDTSTLLAGKRTADGSEFEKRTADGSEFESPKKKAKVE

SEQ ID NO: 6542 - protein, 2096 aa, synthetic construct; identical to SEQ ID NO: 6540

SEQ ID NO: 6543 - protein, 2096 aa, synthetic construct
MPAAKRVKLDGGDKKYSIGLDIGTNSVGWAVITDEYKVPSKKFKVLGNTDRHSIKKNLIGALLFDSGETAEATRLKRTARRRYTRRKNRICYLQEIFSNEMAKVDDSFFHRLEESFLVEEDKKHERHPIFGNIVDEVAYHEKYPTIYHLRKKLVDSTDKADLRLIYLALAHMIKFRGHFLIEGDLNPDNSDVDKLFIQLVQTYNQLFEENPINASGVDAKAILSARLSKSRRLENLIAQLPGEKKNGLFGNLIALSLGLTPNFKSNFDLAEDAKLQLSKDTYDDDLDNLLAQIGDQYADLFLAAKNLSDAILLSDILRVNTEITKAPLSASMIKRYDEHHQDLTLLKALVRQQLPEKYKEIFFDQSKNGYAGYIDGGASQEEFYKFIKPILEKMDGTEELLVKLNREDLLRKQRTFDNGSIPHQIHLGELHAILRRQEDFYPFLKDNREKIEKILTFRIPYYVGPLARGNSRFAWMTRKSEETITPWNFEEVVDKGASAQSFIERMTNFDKNLPNEKVLPKHSLLYEYFTVYNELTKVKYVTEGMRKPAFLSGEQKKAIVDLLFKTNRKVTVKQLKEDYFKKIECFDSVEISGVEDRFNASLGTYHDLLKIIKDKDFLDNEENEDILEDIVLTLTLFEDREMIEERLKTYAHLFDDKVMKQLKRRRYTGWGRLSRKLINGIRDKQSGKTILDFLKSDGFANRNFMQLIHDDSLTFKEDIQKAQVSGQGDSLHEHIANLAGSPAIKKGILQTVKVVDELVKVMGRHKPENIVIEMARENQTTQKGQKNSRERMKRIEEGIKELGSQILKEHPVENTQLQNEKLYLYYLQNGRDMYVDQELDINRLSDYDVDHIVPQSFLKDDSIDNKVLTRSDKARGKSDNVPSEEVVKKMKNYWRQLLNAKLITQRKFDNLTKAERGGLSELDKAGFIKRQLVETRQITKHVAQILDSRMNTKYDENDKLIREVKVITLKSKLVSDFRKDFQFYKVREINNYHHAHDAYLNAVVGTALIKKYPKLESEFVYGDYKVYDVRKMIAKSEQEIGKATAKYFFYSNIMNFFKTEITLANGEIRKRPLIETNGETGEIVWDKGRDFATVRKVLSMPQVNIVKKTEVQTGGFSKESILPKRNSDKLIARKKDWDPKKYGGFDSPTVAYSVLVVAKVEKGKSKKLKSVKELLGITIMERSSFEKNPIDFLEAKGYKEVKKDLIIKLPKYSLFELENGRKRMLASAGELQKGNELALPSKYVNFLYLASHYEKLKGSPEDNEQKQLFVEQHKHYLDEIIEQISEFSKRVILADANLDKVLSAYNKHRDKPIREQAENIIHLFTLTNLGAPAAFKYFDTTIDRKRYTSTKEVLDATLIHQSITGLYETRIDLSQLGGDGGPAPAPAPAPAPGGTLNIEDEYRLHETSKGPDVPLGSTWLSDFPQAWAETGGMGLAVRQAPLIIPLKATSTPVSIKQYPMSQEARLGIKPHIQRLLDQGILVPCQSPWNTPLLPVKKPGTNDYRPVQDLREVNKRVEDIHPTVPNPYNLLSGLPPSHQWYTVLDLKDAFFCLRLHPTSQSLFAFEWRDPEMGISGQLTWTRLPQGFKNSPTLFNEALHRDLADFRIQHPDLILLQYVDDLLLAATSELDCQQGTRALLQTLGDLGYRASAKKAQICQKQVKYLGYLLKEGQRWLTEARKETVMGQPTPKTPRQLREFLGTAGFCRLWIPGFAEMAAPLYPLTKPGTLFEWGPDQQKAYQEIKQALLTAPALGLPDLTKPFELFVDEKQGYAKGVLTQKLGPWRRPVAYLSKKLDPVAAGWPPCLRMVAAIAVLTKDAGKLTMGQPLVILAPHAVEALVKQPPDRWLSNARMTHYQALLLDTDRVQFGPIVALNPATLLPLPEEGLQHDCLDILAEAHGTRPDLTDQPLPDADHTWYTDGSSFLQEGQRKAGAAVTTETEVVWAKALPAGTSAQRAELIALTQALKMAEGKKLNVYTDSRYAFATAHIHGEIYRRRGWLTSEGKEIKNKDEILALLKALFLPKRLSIIHCPGHQKGNRAEARGNRMADQAAREVATRETPETSTLLAGKRTADGSEFEKRTADGSEFESPKKKAKVE

SEQ ID NO: 6544 - protein, 2090 aa, synthetic construct
MPAAKRVKLDGGDKKYSIGLDIGTNSVGWAVITDEYKVPSKKFKVLGNTDRHSIKKNLIGALLFDSGETAEATRLKRTARRRYTRRKNRICYLQEIFSNEMAKVDDSFFHRLEESFLVEEDKKHERHPIFGNIVDEVAYHEKYPTIYHLRKKLVDSTDKADLRLIYLALAHMIKFRGHFLIEGDLNPDNSDVDKLFIQLVQTYNQLFEENPINASGVDAKAILSARLSKSRRLENLIAQLPGEKKNGLFGNLIALSLGLTPNFKSNFDLAEDAKLQLSKDTYDDDLDNLLAQIGDQYADLFLAAKNLSDAILLSDILRVNTEITKAPLSASMIKRYDEHHQDLTLLKALVRQQLPEKYKEIFFDQSKNGYAGYIDGGASQEEFYKFIKPILEKMDGTEELLVKLNREDLLRKQRTFDNGSIPHQIHLGELHAILRRQEDFYPFLKDNREKIEKILTFRIPYYVGPLARGNSRFAWMTRKSEETITPWNFEEVVDKGASAQSFIERMTNFDKNLPNEKVLPKHSLLYEYFTVYNELTKVKYVTEGMRKPAFLSGEQKKAIVDLLFKTNRKVTVKQLKEDYFKKIECFDSVEISGVEDRFNASLGTYHDLLKIIKDKDFLDNEENEDILEDIVLTLTLFEDREMIEERLKTYAHLFDDKVMKQLKRRRYTGWGRLSRKLINGIRDKQSGKTILDFLKSDGFANRNFMQLIHDDSLTFKEDIQKAQVSGQGDSLHEHIANLAGSPAIKKGILQTVKVVDELVKVMGRHKPENIVIEMARENQTTQKGQKNSRERMKRIEEGIKELGSQILKEHPVENTQLQNEKLYLYYLQNGRDMYVDQELDINRLSDYDVDHIVPQSFLKDDSIDNKVLTRSDKARGKSDNVPSEEVVKKMKNYWRQLLNAKLITQRKFDNLTKAERGGLSELDKAGFIKRQLVETRQITKHVAQILDSRMNTKYDENDKLIREVKVITLKSKLVSDFRKDFQFYKVREINNYHHAHDAYLNAVVGTALIKKYPKLESEFVYGDYKVYDVRKMIAKSEQEIGKATAKYFFYSNIMNFFKTEITLANGEIRKRPLIETNGETGEIVWDKGRDFATVRKVLSMPQVNIVKKTEVQTGGFSKESILPKRNSDKLIARKKDWDPKKYGGFDSPTVAYSVLVVAKVEKGKSKKLKSVKELLGITIMERSSFEKNPIDFLEAKGYKEVKKDLIIKLPKYSLFELENGRKRMLASAGELQKGNELALPSKYVNFLYLASHYEKLKGSPEDNEQKQLFVEQHKHYLDEIIEQISEFSKRVILADANLDKVLSAYNKHRDKPIREQAENIIHLFTLTNLGAPAAFKYFDTTIDRKRYTSTKEVLDATLIHQSITGLYETRIDLSQLGGDGGPAPAPAPAPAPGGTLQLDDEYRLYSPLVKPDQNIQFWLEQFPQAWAETAGMGLAKQVPPQVIQLKASATPVSVRQYPLSKEAQEGIRPHVQRLIQQGILVPVQSPWNTPLLPVRKPGTNDYRPVQDLREVNKRVQDIHPTVPNPYNLLCALPPQRSWYTVLDLKDAFFCLRLHPTSQPLFAFEWRDPGTGRTGQLTWTRLPQGFKNSPTIFDEALHRDLANFRIQHPQVTLLQYVDDLLLAGATKQDCLEGTKALLLELSDLGYRASAKKAQICRREVTYLGYSLRDGQRWLTEARKKTVVQIPAPTTAKQVREFLGTAGFCRLWIPGFATLAAPLYPLTKEKGEFSWAPEHQKAFDAIKKALLSAPALALPDVTKPFTLYVDERKGVARGVLTQTLGPWRRPVAYLSKKLDPVASGWPVCLKAIAAVAILVKDADKLTLGQNITVIAPHALENIVRQPPDRWMTNARMTHYQSLLLTERVTFAPPAALNPATLLPEETDEPVTHDCHQLLIEETGVRKDLTDIPLTGEVLTWFTDGSSYVVEGKRMAGAAVVDGTRTIWASSLPEGTSAQKAELMALTQALRLAEGKSINIYTDSRYAFATAHVHGAIYKQRGLLTSAGREIKNKEEILSLLEALHLPKRLAIIHCPGHQKAKDPISRGNQMADRVAKQAAQGVNLLAGKRTADGSEFEKRTADGSEFESPKKKAKVE

SEQ ID NO: 6545 - protein, 2090 aa, synthetic construct; identical to SEQ ID NO: 6544

SEQ ID NO: 6546 - protein, 2087 aa, synthetic construct
MPAAKRVKLDGGDKKYSIGLDIGTNSVGWAVITDEYKVPSKKFKVLGNTDRHSIKKNLIGALLFDSGETAEATRLKRTARRRYTRRKNRICYLQEIFSNEMAKVDDSFFHRLEESFLVEEDKKHERHPIFGNIVDEVAYHEKYPTIYHLRKKLVDSTDKADLRLIYLALAHMIKFRGHFLIEGDLNPDNSDVDKLFIQLVQTYNQLFEENPINASGVDAKAILSARLSKSRRLENLIAQLPGEKKNGLFGNLIALSLGLTPNFKSNFDLAEDAKLQLSKDTYDDDLDNLLAQIGDQYADLFLAAKNLSDAILLSDILRVNTEITKAPLSASMIKRYDEHHQDLTLLKALVRQQLPEKYKEIFFDQSKNGYAGYIDGGASQEEFYKFIKPILEKMDGTEELLVKLNREDLLRKQRTFDNGSIPHQIHLGELHAILRRQEDFYPFLKDNREKIEKILTFRIPYYVGPLARGNSRFAWMTRKSEETITPWNFEEVVDKGASAQSFIERMTNFDKNLPNEKVLPKHSLLYEYFTVYNELTKVKYVTEGMRKPAFLSGEQKKAIVDLLFKTNRKVTVKQLKEDYFKKIECFDSVEISGVEDRFNASLGTYHDLLKIIKDKDFLDNEENEDILEDIVLTLTLFEDREMIEERLKTYAHLFDDKVMKQLKRRRYTGWGRLSRKLINGIRDKQSGKTILDFLKSDGFANRNFMQLIHDDSLTFKEDIQKAQVSGQGDSLHEHIANLAGSPAIKKGILQTVKVVDELVKVMGRHKPENIVIEMARENQTTQKGQKNSRERMKRIEEGIKELGSQILKEHPVENTQLQNEKLYLYYLQNGRDMYVDQELDINRLSDYDVDHIVPQSFLKDDSIDNKVLTRSDKARGKSDNVPSEEVVKKMKNYWRQLLNAKLITQRKFDNLTKAERGGLSELDKAGFIKRQLVETRQITKHVAQILDSRMNTKYDENDKLIREVKVITLKSKLVSDFRKDFQFYKVREINNYHHAHDAYLNAVVGTALIKKYPKLESEFVYGDYKVYDVRKMIAKSEQEIGKATAKYFFYSNIMNFFKTEITLANGEIRKRPLIETNGETGEIVWDKGRDFATVRKVLSMPQVNIVKKTEVQTGGFSKESILPKRNSDKLIARKKDWDPKKYGGFDSPTVAYSVLVVAKVEKGKSKKLKSVKELLGITIMERSSFEKNPIDFLEAKGYKEVKKDLIIKLPKYSLFELENGRKRMLASAGELQKGNELALPSKYVNFLYLASHYEKLKGSPEDNEQKQLFVEQHKHYLDEIIEQISEFSKRVILADANLDKVLSAYNKHRDKPIREQAENIIHLFTLTNLGAPAAFKYFDTTIDRKRYTSTKEVLDATLIHQSITGLYETRIDLSQLGGDGGPAPAPAPAPAPGGVPWLMKKPLQLTVLVPLHEYQERLLQQTALPKEQKELLQKLFLKYDALWQHWENQVGHRRIKPHNIATGTLAPRPQKQYPINPKAKPSIQIVIDDLLKQGVLIQQNSTMNTPVYPVPKPDGKWRMVLDYREVNKTIPLIAAQNQHSAGILSSIYRGKYKTTLDLTNGFWAHPITPESYWLTAFTWQGKQYCWTRLPQGFLNSPALFNADVVDLLKEIPNVQAYVDDIYISHDDPQEHLEQLEKIFSILLNAGYVVSLKKSEIAQREVEFLGFNITKEGRGLTDTFKQKLLNITPPKDLKQLQSILGKLNFARNFIPNYSELVKPLYTIVAPANGKFISWTEDNSNQLQHIISVLNQADNLEERNPETRLIIKVNSSPSAGYIRYYNEGSKRPIMYVNYIFSKAEAKFTQTEKLLTTMHKGLIKAMDLAMGQEILVYSPIVSMTKIQRTPLPERKALPVRWITWMTYLEDPRIQFHYDKSLPELQQIPNVTEDVIAKTKHPSEFAMVFYTDGSAIKHPDVNKSHSAGMGIAQVQFIPEYKIVHQWSIPLGDHTAQLAEIAAVEFACKKALKISGPVLIVTDSFYVAESANKELPYWKSNGFLNNKKKPLRHVSKWKSIAECLQLKPDIIIMHEKGHQQPMTTLHTEGNNLADKLATQGSYVVHAGKRTADGSEFEKRTADGSEFESPKKKAKVE

SEQ ID NO: 6547 - protein, 2176 aa, synthetic construct
MPAAKRVKLDGGDKKYSIGLDIGTNSVGWAVITDEYKVPSKKFKVLGNTDRHSIKKNLIGALLFDSGETAEATRLKRTARRRYTRRKNRICYLQEIFSNEMAKVDDSFFHRLEESFLVEEDKKHERHPIFGNIVDEVAYHEKYPTIYHLRKKLVDSTDKADLRLIYLALAHMIKFRGHFLIEGDLNPDNSDVDKLFIQLVQTYNQLFEENPINASGVDAKAILSARLSKSRRLENLIAQLPGEKKNGLFGNLIALSLGLTPNFKSNFDLAEDAKLQLSKDTYDDDLDNLLAQIGDQYADLFLAAKNLSDAILLSDILRVNTEITKAPLSASMIKRYDEHHQDLTLLKALVRQQLPEKYKEIFFDQSKNGYAGYIDGGASQEEFYKFIKPILEKMDGTEELLVKLNREDLLRKQRTFDNGSIPHQIHLGELHAILRRQEDFYPFLKDNREKIEKILTFRIPYYVGPLARGNSRFAWMTRKSEETITPWNFEEVVDKGASAQSFIERMTNFDKNLPNEKVLPKHSLLYEYFTVYNELTKVKYVTEGMRKPAFLSGEQKKAIVDLLFKTNRKVTVKQLKEDYFKKIECFDSVEISGVEDRFNASLGTYHDLLKIIKDKDFLDNEENEDILEDIVLTLTLFEDREMIEERLKTYAHLFDDKVMKQLKRRRYTGWGRLSRKLINGIRDKQSGKTILDFLKSDGFANRNFMQLIHDDSLTFKEDIQKAQVSGQGDSLHEHIANLAGSPAIKKGILQTVKVVDELVKVMGRHKPENIVIEMARENQTTQKGQKNSRERMKRIEEGIKELGSQILKEHPVENTQLQNEKLYLYYLQNGRDMYVDQELDINRLSDYDVDHIVPQSFLKDDSIDNKVLTRSDKARGKSDNVPSEEVVKKMKNYWRQLLNAKLITQRKFDNLTKAERGGLSELDKAGFIKRQLVETRQITKHVAQILDSRMNTKYDENDKLIREVKVITLKSKLVSDFRKDFQFYKVREINNYHHAHDAYLNAVVGTALIKKYPKLESEFVYGDYKVYDVRKMIAKSEQEIGKATAKYFFYSNIMNFFKTEITLANGEIRKRPLIETNGETGEIVWDKGRDFATVRKVLSMPQVNIVKKTEVQTGGFSKESILPKRNSDKLIARKKDWDPKKYGGFDSPTVAYSVLVVAKVEKGKSKKLKSVKELLGITIMERSSFEKNPIDFLEAKGYKEVKKDLIIKLPKYSLFELENGRKRMLASAGELQKGNELALPSKYVNFLYLASHYEKLKGSPEDNEQKQLFVEQHKHYLDEIIEQISEFSKRVILADANLDKVLSAYNKHRDKPIREQAENIIHLFTLTNLGAPAAFKYFDTTIDRKRYTSTKEVLDATLIHQSITGLYETRIDLSQLGGDGGPAPAPAPAPAPGGMDPLQLLQPLEAEIKGTKLKAHWNSGATITCVPEAFLEDERPIQTMLIKTIHGEKQQDVYYLTFKVQGRKVEAEVLASPYDYILLNPSDVPWLMKKPLQLTVLVPLHEYQERLLQQTALPKEQKELLQKLFLKYDALWQHWENQVGHRRIKPHNIATGTLAPRPQKQYPINPKAKPSIQIVIDDLLKQGVLIQQNSTMNTPVYPVPKPDGKWRMVLDYREVNKTIPLIAAQNQHSAGILSSIYRGKYKTTLDLTNGFWAHPITPESYWLTAFTWQGKQYCWTRLPQGFLNSPALFNADVVDLLKEIPNVQAYVDDIYISHDDPQEHLEQLEKIFSILLNAGYVVSLKKSEIAQREVEFLGFNITKEGRGLTDTFKQKLLNITPPKDLKQLQSILGLLNFARNFIPNYSELVKPLYTIVAPANGKFISWTEDNSNQLQHIISVLNQADNLEERNPETRLIIKVNSSPSAGYIRYYNEGSKRPIMYVNYIFSKAEAKFTQTEKLLTTMHKGLIKAMDLAMGQEILVYSPIVSMTKIQRTPLPERKALPVRWITWMTYLEDPRIQFHYDKSLPELQQIPNVTEDVIAKTKHPSEFAMVFYTDGSAIKHPDVNKSHSAGMGIAQVQFIPEYKIVHQWSIPLGDHTAQLAEIAAVEFACKKALKISGPVLIVTDSFYVAESANKELPYWKSNGFLNNKKKPLRHVSKWKSIAECLQLKPDIIIMHEKGHQQPMTTLHTEGNNLADKLATQGSYVVHAGKRTADGSEFEKRTADGSEFESPKKKAKVE

SEQ ID NO: 6548 - protein, 2176 aa, synthetic construct
MPAAKRVKLDGGDKKYSIGLDIGTNSVGWAVITDEYKVPSKKFKVLGNTDRHSIKKNLIGALLFDSGETAEATRLKRTARRRYTRRKNRICYLQEIFSNEMAKVDDSFFHRLEESFLVEEDKKHERHPIFGNIVDEVAYHEKYPTIYHLRKKLVDSTDKADLRLIYLALAHMIKFRGHFLIEGDLNPDNSDVDKLFIQLVQTYNQLFEENPINASGVDAKAILSARLSKSRRLENLIAQLPGEKKNGLFGNLIALSLGLTPNFKSNFDLAEDAKLQLSKDTYDDDLDNLLAQIGDQYADLFLAAKNLSDAILLSDILRVNTEITKAPLSASMIKRYDEHHQDLTLLKALVRQQLPEKYKEIFFDQSKNGYAGYIDGGASQEEFYKFIKPILEKMDGTEELLVKLNREDLLRKQRTFDNGSIPHQIHLGELHAILRRQEDFYPFLKDNREKIEKILTFRIPYYVGPLARGNSRFAWMTRKSEETITPWNFEEVVDKGASAQSFIERMTNFDKNLPNEKVLPKHSLLYEYFTVYNELTKVKYVTEGMRKPAFLSGEQKKAIVDLLFKTNRKVTVKQLKEDYFKKIECFDSVEISGVEDRFNASLGTYHDLLKIIKDKDFLDNEENEDILEDIVLTLTLFEDREMIEERLKTYAHLFDDKVMKQLKRRRYTGWGRLSRKLINGIRDKQSGKTILDFLKSDGFANRNFMQLIHDDSLTFKEDIQKAQVSGQGDSLHEHIANLAGSPAIKKGILQTVKVVDELVKVMGRHKPENIVIEMARENQTTQKGQKNSRERMKRIEEGIKELGSQILKEHPVENTQLQNEKLYLYYLQNGRDMYVDQELDINRLSDYDVDHIVPQSFLKDDSIDNKVLTRSDKARGKSDNVPSEEVVKKMKNYWRQLLNAKLITQRKFDNLTKAERGGLSELDKAGFIKRQLVETRQITKHVAQILDSRMNTKYDENDKLIREVKVITLKSKLVSDFRKDFQFYKVREINNYHHAHDAYLNAVVGTALIKKYPKLESEFVYGDYKVYDVRKMIAKSEQEIGKATAKYFFYSNIMNFFKTEITLANGEIRKRPLIETNGETGEIVWDKGRDFATVRKVLSMPQVNIVKKTEVQTGGFSKESILPKRNSDKLIARKKDWDPKKYGGFDSPTVAYSVLVVAKVEKGKSKKLKSVKELLGITIMERSSFEKNPIDFLEAKGYKEVKKDLIIKLPKYSLFELENGRKRMLASAGELQKGNELALPSKYVNFLYLASHYEKLKGSPEDNEQKQLFVEQHKHYLDEIIEQISEFSKRVILADANLDKVLSAYNKHRDKPIREQAENIIHLFTLTNLGAPAAFKYFDTTIDRKRYTSTKEVLDATLIHQSITGLYETRIDLSQLGGDGGPAPAPAPAPAPGGMDPLQLLQPLEAEIKGTKLKAHWNSGATITCVPQAFLEEEVPIKNIWIKTIHGEKEQPVYYLTFKIQGRKVEAEVISSPYDYILVSPSDIPWLMKKPLQLTTLVPLQEYEERLLKQTMLTGSYKEKLQSLFLKYDALWQHWENQVGHRRIKPHHIATGTVNPRPQKQYPINPKAKASIQTVINDLLKQGVLIQQNSIMNTPVYPVPKPDGKWRMVLDYREVNKTIPLIAAQNQHSAGILSSIFRGKYKTTLDLSNGFWAHSITPESYWLTAFTWLGQQYCWTRLPQGFLNSPALFNADVVDLLKEVPNVQVYVDDIYISHDDPREHLEQLEKVFSLLLNAGYVVSLKKSEIAQHEVEFLGFNITKEGRGLTETFKQKLLNITPPRDLKQLQSILGLLNFARNFIPNFSELVKPLYNIIATAPGKYITWTTDNSQQLQNIISMLNSAENLEERNPEVRLIMKVNTSPSAGYIRFYNEFAKRPIMYLNYVYTKAEVKFTNTEKLLTTIHKGLIKALDLGMGQEILVYSPIVSMTKIQKTPLPERKALPIRWITWMSYLEDPRIQFHYDKTLPELQQVPTVTDDIIAKIKHPSEFSMVFYTDGSAIKHPNVNKSHNAGMGIAQVQFKPEFTVINTWSIPLGDHTAQLAEVAAVEFACKKALKIDGPVLIVTDSFYVAESVNKELPYWQSNGFFNNKKKPLKHVSKWKSIADCIQLKPDIIIIHEKGHQPTASTFHTEGNNLADKLATQGSYVVNAGKRTADGSEFEKRTADGSEFESPKKKAKVE

SEQ ID NO: 6549 - protein, 2094 aa, synthetic construct
MPAAKRVKLDGGDKKYSIGLDIGTNSVGWAVITDEYKVPSKKFKVLGNTDRHSIKKNLIGALLFDSGETAEATRLKRTARRRYTRRKNRICYLQEIFSNEMAKVDDSFFHRLEESFLVEEDKKHERHPIFGNIVDEVAYHEKYPTIYHLRKKLVDSTDKADLRLIYLALAHMIKFRGHFLIEGDLNPDNSDVDKLFIQLVQTYNQLFEENPINASGVDAKAILSARLSKSRRLENLIAQLPGEKKNGLFGNLIALSLGLTPNFKSNFDLAEDAKLQLSKDTYDDDLDNLLAQIGDQYADLFLAAKNLSDAILLSDILRVNTEITKAPLSASMIKRYDEHHQDLTLLKALVRQQLPEKYKEIFFDQSKNGYAGYIDGGASQEEFYKFIKPILEKMDGTEELLVKLNREDLLRKQRTFDNGSIPHQIHLGELHAILRRQEDFYPFLKDNREKIEKILTFRIPYYVGPLARGNSRFAWMTRKSEETITPWNFEEVVDKGASAQSFIERMTNFDKNLPNEKVLPKHSLLYEYFTVYNELTKVKYVTEGMRKPAFLSGEQKKAIVDLLFKTNRKVTVKQLKEDYFKKIECFDSVEISGVEDRFNASLGTYHDLLKIIKDKDFLDNEENEDILEDIVLTLTLFEDREMIEERLKTYAHLFDDKVMKQLKRRRYTGWGRLSRKLINGIRDKQSGKTILDFLKSDGFANRNFMQLIHDDSLTFKEDIQKAQVSGQGDSLHEHIANLAGSPAIKKGILQTVKVVDELVKVMGRHKPENIVIEMARENQTTQKGQKNSRERMKRIEEGIKELGSQILKEHPVENTQLQNEKLYLYYLQNGRDMYVDQELDINRLSDYDVDHIVPQSFLKDDSIDNKVLTRSDKARGKSDNVPSEEVVKKMKNYWRQLLNAKLITQRKFDNLTKAERGGLSELDKAGFIKRQLVETRQITKHVAQILDSRMNTKYDENDKLIREVKVITLKSKLVSDFRKDFQFYKVREINNYHHAHDAYLNAVVGTALIKKYPKLESEFVYGDYKVYDVRKMIAKSEQEIGKATAKYFFYSNIMNFFKTEITLANGEIRKRPLIETNGETGEIVWDKGRDFATVRKVLSMPQVNIVKKTEVQTGGFSKESILPKRNSDKLIARKKDWDPKKYGGFDSPTVAYSVLVVAKVEKGKSKKLKSVKELLGITIMERSSFEKNPIDFLEAKGYKEVKKDLIIKLPKYSLFELENGRKRMLASAGELQKGNELALPSKYVNFLYLASHYEKLKGSPEDNEQKQLFVEQHKHYLDEIIEQISEFSKRVILADANLDKVLSAYNKHRDKPIREQAENIIHLFTLTNLGAPAAFKYFDTTIDRKRYTSTKEVLDATLIHQSITGLYETRIDLSQLGGDGGPAPAPAPAPAPGGVLNLEEEYRLHEKPVPSSIDPSWLQLFPTVWAERAGMGLANQVPPVVVELRSGASPVAVRQYPMSKEAREGIRPHIQRFLDLGVLVPCQSPWNTPLLPVKKPGTNDYRPVQDLREINKRVQDIHPTVPNPYNLLSSLPPSHTWYSVLDLKDAFFCLKLHPNSQPLFAFEWRDPEKGNTGQLTWTRLPQGFKNSPTLFNEALHRDLAPFRALNPQVVLLQYVDDLLVAAPTYRDCKEGTQKLLQELSKLGYRVSAKKAQLCQKEVTYLGYLLKEGKRWLTPARKATVMKIPPPTTPRQVREFLGKAGFCRLFIPGFASLAAPLYPLTKPSIPFIWTEEHQKAFDRIKEALLSAPALALPDLTKPFTLYVDERAGVARGVLTQTLGPWRRPVAYLSKKLDPVASGWPTCLKAVAAVALLLKDADKLTLGQNVTVIASHSLESIVRQPPDRWMTNARMTHYQSLLLNERVSFAPPAVLNPATLLPVESEATPVHRCSEILAEETGTRRDLKDQPLPGVPAWYTDGSSFIAEGKRRAGAAIVDGKRTVWASSLPEGTSAQKAELVALTQALRLAEGKDINIYTDSRYAFATAHIHGAIYKQRGWLTSAGKDIKNKEEILALLEAIHLPKRVAIIHCPGHQKGNDPVATGNRRADEAAKQAALSTRVLAETTKPAGKRTADGSEFEKRTADGSEFESPKKKAKVE

SEQ ID NO: 6550 - protein, 2096 aa, synthetic construct
MPAAKRVKLDGGDKKYSIGLDIGTNSVGWAVITDEYKVPSKKFKVLGNTDRHSIKKNLIGALLFDSGETAEATRLKRTARRRYTRRKNRICYLQEIFSNEMAKVDDSFFHRLEESFLVEEDKKHERHPIFGNIVDEVAYHEKYPTIYHLRKKLVDSTDKADLRLIYLALAHMIKFRGHFLIEGDLNPDNSDVDKLFIQLVQTYNQLFEENPINASGVDAKAILSARLSKSRRLENLIAQLPGEKKNGLFGNLIALSLGLTPNFKSNFDLAEDAKLQLSKDTYDDDLDNLLAQIGDQYADLFLAAKNLSDAILLSDILRVNTEITKAPLSASMIKRYDEHHQDLTLLKALVRQQLPEKYKEIFFDQSKNGYAGYIDGGASQEEFYKFIKPILEKMDGTEELLVKLNREDLLRKQRTFDNGSIPHQIHLGELHAILRRQEDFYPFLKDNREKIEKILTFRIPYYVGPLARGNSRFAWMTRKSEETITPWNFEEVVDKGASAQSFIERMTNFDKNLPNEKVLPKHSLLYEYFTVYNELTKVKYVTEGMRKPAFLSGEQKKAIVDLLFKTNRKVTVKQLKEDYFKKIECFDSVEISGVEDRFNASLGTYHDLLKIIKDKDFLDNEENEDILEDIVLTLTLFEDREMIEERLKTYAHLFDDKVMKQLKRRRYTGWGRLSRKLINGIRDKQSGKTILDFLKSDGFANRNFMQLIHDDSLTFKEDIQKAQVSGQGDSLHEHIANLAGSPAIKKGILQTVKVVDELVKVMGRHKPENIVIEMARENQTTQKGQKNSRERMKRIEEGIKELGSQILKEHPVENTQLQNEKLYLYYLQNGRDMYVDQELDINRLSDYDVDHIVPQSFLKDDSIDNKVLTRSDKARGKSDNVPSEEVVKKMKNYWRQLLNAKLITQRKFDNLTKAERGGLSELDKAGFIKRQLVETRQITKHVAQILDSRMNTKYDENDKLIREVKVITLKSKLVSDFRKDFQFYKVREINNYHHAHDAYLNAVVGTALIKKYPKLESEFVYGDYKVYDVRKMIAKSEQEIGKATAKYFFYSNIMNFFKTEITLANGEIRKRPLIETNGETGEIVWDKGRDFATVRKVLSMPQVNIVKKTEVQTGGFSKESILPKRNSDKLIARKKDWDPKKYGGFDSPTVAYSVLVVAKVEKGKSKKLKSVKELLGITIMERSSFEKNPIDFLEAKGYKEVKKDLIIKLPKYSLFELENGRKRMLASAGELQKGNELALPSKYVNFLYLASHYEKLKGSPEDNEQKQLFVEQHKHYLDEIIEQISEFSKRVILADANLDKVLSAYNKHRDKPIREQAENIIHLFTLTNLGAPAAFKYFDTTIDRKRYTSTKEVLDATLIHQSITGLYETRIDLSQLGGDGGPAPAPAPAPAPGGTLNIEDEYRLHETSKEPDVPLGSTWLSDFPQAWAETGGMGLAVRQAPLIIPLKATSTPVSIKQYPMSQEARLGIKPHIQRLLDQGILVPCQSPWNTPLLPVKKPGTNDYRPVQDLREVNKRVEDIHPTVPNPYNLLSGLPPSHQWYTVLDLKDAFFCLRLHPTSQPLFAFEWRDPEMGISGQLTWTRLPQGFKNSPTLFDEALHRDLADFRIQHPDLILLQYVDDLLLAATSEQDCQRGTRALLQTLGNLGYRASAKKAQICQKQVKYLGYLLKEGQRWLTEARKETVMGQPTPKTPRQLREFLGTAGFCRLWIPGFAEMAAPLYPLTKTGTLFNWGPDQQKAYQEIKQALLTAPALGLPDLTKPFELFVDEKQGYAKGVLTQKLGPWRRPVAYLSKKLDPVAAGWPPCLRMVAAIAVLTKDAGKLTMGQPLVILAPHAVEALVKQPPDRWLSNARMTHYQAMLLDTDRVQFGPVVALNPATLLPLPEKEAPHDCLEILAETHGTRPDLTDQPIPDADYTWYTDGSSFLQEGQRRAGAAVTTETEVIWARALPAGTSAQRAELIALTQALKMAEGKKLNVYTDSRYAFATAHVHGEIYRRRGLLTSEGREIKNKNEILALLKALFLPKRLSIIHCPGHQKGNSAEARGNRMADQAAREAAMKAVLETSTLLAGKRTADGSEFEKRTADGSEFESPKKKAKVE

SEQ ID NO: 6551 - protein, 2096 aa, synthetic construct
MPAAKRVKLDGGDKKYSIGLDIGTNSVGWAVITDEYKVPSKKFKVLGNTDRHSIKKNLIGALLFDSGETAEATRLKRTARRRYTRRKNRICYLQEIFSNEMAKVDDSFFHRLEESFLVEEDKKHERHPIFGNIVDEVAYHEKYPTIYHLRKKLVDSTDKADLRLIYLALAHMIKFRGHFLIEGDLNPDNSDVDKLFIQLVQTYNQLFEENPINASGVDAKAILSARLSKSRRLENLIAQLPGEKKNGLFGNLIALSLGLTPNFKSNFDLAEDAKLQLSKDTYDDDLDNLLAQIGDQYADLFLAAKNLSDAILLSDILRVNTEITKAPLSASMIKRYDEHHQDLTLLKALVRQQLPEKYKEIFFDQSKNGYAGYIDGGASQEEFYKFIKPILEKMDGTEELLVKLNREDLLRKQRTFDNGSIPHQIHLGELHAILRRQEDFYPFLKDNREKIEKILTFRIPYYVGPLARGNSRFAWMTRKSEETITPWNFEEVVDKGASAQSFIERMTNFDKNLPNEKVLPKHSLLYEYFTVYNELTKVKYVTEGMRKPAFLSGEQKKAIVDLLFKTNRKVTVKQLKEDYFKKIECFDSVEISGVEDRFNASLGTYHDLLKIIKDKDFLDNEENEDILEDIVLTLTLFEDREMIEERLKTYAHLFDDKVMKQLKRRRYTGWGRLSRKLINGIRDKQSGKTILDFLKSDGFANRNFMQLIHDDSLTFKEDIQKAQVSGQGDSLHEHIANLAGSPAIKKGILQTVKVVDELVKVMGRHKPENIVIEMARENQTTQKGQKNSRERMKRIEEGIKELGSQILKEHPVENTQLQNEKLYLYYLQNGRDMYVDQELDINRLSDYDVDHIVPQSFLKDDSIDNKVLTRSDKARGKSDNVPSEEVVKKMKNYWRQLLNAKLITQRKFDNLTKAERGGLSELDKAGFIKRQLVETRQITKHVAQILDSRMNTKYDENDKLIREVKVITLKSKLVSDFRKDFQFYKVREINNYHHAHDAYLNAVVGTALIKKYPKLESEFVYGDYKVYDVRKMIAKSEQEIGKATAKYFFYSNIMNFFKTEITLANGEIRKRPLIETNGETGEIVWDKGRDFATVRKVLSMPQVNIVKKTEVQTGGFSKESILPKRNSDKLIARKKDWDPKKYGGFDSPTVAYSVLVVAKVEKGKSKKLKSVKELLGITIMERSSFEKNPIDFLEAKGYKEVKKDLIIKLPKYSLFELENGRKRMLASAGELQKGNELALPSKYVNFLYLASHYEKLKGSPEDNEQKQLFVEQHKHYLDEIIEQISEFSKRVILADANLDKVLSAYNKHRDKPIREQAENIIHLFTLTNLGAPAAFKYFDTTIDRKRYTSTKEVLDATLIHQSITGLYETRIDLSQLGGDGGPAPAPAPAPAPGGTLNIEDEYRLHETSKEPDVPLGSTWLSDFPQAWAETGGMGLAVRQAPLIIPLKATSTPVSIKQYPMSQEARLGIKPHIQRLLDQGILVPCQSPWNTPLLPVKKPGTNDYRPVQDLREVNKRVEDIHPTVPNPYNLLSGLPPSHQWYTVLDLKDAFFCLRLHPTSQPLFAFEWRDPEMGISGQLTWTRLPQGFKNSPTLFNEALHRDLADFRIQHPDLILLQYVDDLLLAATSEQDCQRGTRALLQTLGNLGYRASAKKAQICQKQVKYLGYLLKEGQRWLTEARKETVMGQPTPKTPRQLREFLGTAGFCRLWIPGFAEMAAPLYPLTKPGTLFNWGPDQQKAYQEIKQALLTAPALGLPDLTKPFELFVDEKQGYAKGVLTQKLGPWRRPVAYLSKKLDPVAAGWPPCLRMVAAIAVLTKDAGKLTMGQPLVILAPHAVEALVKQPPDRWLSNARMTHYQAMLLDTDRVQFGPVVALNPATLLPLPEKEAPHDCLEILAETHGTRPDLTDQPIPDADYTWYTDGSSFLQEGQRRAGAAVTTETEVIWARALPAGTSAQRAELIALTQALKMAEGKKLNVYTDSRYAFATAHVHGEIYRRRGWLTSEGREIKNKNEILALLKALFLPKRLSIIHCPGHQKGNSAEARGNRMADQAAREAAMKAVLETSTLLAGKRTADGSEFEKRTADGSEFESPKKKAKVE

SEQ ID NO: 6552 - protein, 2100 aa, synthetic construct
MPAAKRVKLDGGDKKYSIGLDIGTNSVGWAVITDEYKVPSKKFKVLGNTDRHSIKKNLIGALLFDSGETAEATRLKRTARRRYTRRKNRICYLQEIFSNEMAKVDDSFFHRLEESFLVEEDKKHERHPIFGNIVDEVAYHEKYPTIYHLRKKLVDSTDKADLRLIYLALAHMIKFRGHFLIEGDLNPDNSDVDKLFIQLVQTYNQLFEENPINASGVDAKAILSARLSKSRRLENLIAQLPGEKKNGLFGNLIALSLGLTPNFKSNFDLAEDAKLQLSKDTYDDDLDNLLAQIGDQYADLFLAAKNLSDAILLSDILRVNTEITKAPLSASMIKRYDEHHQDLTLLKALVRQQLPEKYKEIFFDQSKNGYAGYIDGGASQEEFYKFIKPILEKMDGTEELLVKLNREDLLRKQRTFDNGSIPHQIHLGELHAILRRQEDFYPFLKDNREKIEKILTFRIPYYVGPLARGNSRFAWMTRKSEETITPWNFEEVVDKGASAQSFIERMTNFDKNLPNEKVLPKHSLLYEYFTVYNELTKVKYVTEGMRKPAFLSGEQKKAIVDLLFKTNRKVTVKQLKEDYFKKIECFDSVEISGVEDRFNASLGTYHDLLKIIKDKDFLDNEENEDILEDIVLTLTLFEDREMIEERLKTYAHLFDDKVMKQLKRRRYTGWGRLSRKLINGIRDKQSGKTILDFLKSDGFANRNFMQLIHDDSLTFKEDIQKAQVSGQGDSLHEHIANLAGSPAIKKGILQTVKVVDELVKVMGRHKPENIVIEMARENQTTQKGQKNSRERMKRIEEGIKELGSQILKEHPVENTQLQNEKLYLYYLQNGRDMYVDQELDINRLSDYDVDHIVPQSFLKDDSIDNKVLTRSDKARGKSDNVPSEEVVKKMKNYWRQLLNAKLITQRKFDNLTKAERGGLSELDKAGFIKRQLVETRQITKHVAQILDSRMNTKYDENDKLIREVKVITLKSKLVSDFRKDFQFYKVREINNYHHAHDAYLNAVVGTALIKKYPKLESEFVYGDYKVYDVRKMIAKSEQEIGKATAKYFFYSNIMNFFKTEITLANGEIRKRPLIETNGETGEIVWDKGRDFATVRKVLSMPQVNIVKKTEVQTGGFSKESILPKRNSDKLIARKKDWDPKKYGGFDSPTVAYSVLVVAKVEKGKSKKLKSVKELLGITIMERSSFEKNPIDFLEAKGYKEVKKDLIIKLPKYSLFELENGRKRMLASAGELQKGNELALPSKYVNFLYLASHYEKLKGSPEDNEQKQLFVEQHKHYLDEIIEQISEFSKRVILADANLDKVLSAYNKHRDKPIREQAENIIHLFTLTNLGAPAAFKYFDTTIDRKRYTSTKEVLDATLIHQSITGLYETRIDLSQLGGDGGPAPAPAPAPAPAPGGTAPLEEEYRLFLEAPIQNVTLLEQWKREIPKVWAEINPPGLASTQAPIHVQLLSTALPVRVRQYPITLEAKRSLRETIRKFRAAGILRPVHSPWNTPLLPVRKSGTSEYRMVQDLREVNKRVETIHPTVPNPYTLLSLLPPDRIWYSVLDLKDAFFCIPLAPESQLIFAFEWADAEEGESGQLTWTRLPQGFKNSPTLFDEALNRDLQGFRLDHPSVSLLQYVDDLLIAADTQAACLSATRDLLMTLAELGYRVSGKKAQLCQEEVTYLGFKIHKGSRSLSNSRTQAILQIPVPKTKRQVREFLGTIGYCRLWIPGFAELAQPLYAATRGGNDPLVWGEKEEEAFQSLKLALTQPPALALPSLDKPFQLFVEETSGAAKGVLTQALGPWKRPVAYLSKRLDPVAAGWPRCLRAIAAAALLTREASKLTFGQDIEITSSHNLESLLRSPPDKWLTNARITQYQVLLLDPPRVRFKQTAALNPATLLPETDDTLPIHHCLDTLDSLTSTRPDLTDQPLAQAEATLFTDGSSYIRDGKRYAGAAVVTLDSVIWAEPLPIGTSAQKAELIALTKALEWSKDKSVNIYTDSRYAFATLHVHGMIYRERGLLTAGGKAIKNAPEILALLTAVWLPKRVAVMHCKGHQKDDAPTSTGNRRADEVAREVAIRPLSTQATISAGKRTADGSEFEKRTADGSEFESPKKKAKVE

SEQ ID NO: 6553 - protein, 2175 aa, synthetic construct
MPAAKRVKLDGGDKKYSIGLDIGTNSVGWAVITDEYKVPSKKFKVLGNTDRHSIKKNLIGALLFDSGETAEATRLKRTARRRYTRRKNRICYLQEIFSNEMAKVDDSFFHRLEESFLVEEDKKHERHPIFGNIVDEVAYHEKYPTIYHLRKKLVDSTDKADLRLIYLALAHMIKFRGHFLIEGDLNPDNSDVDKLFIQLVQTYNQLFEENPINASGVDAKAILSARLSKSRRLENLIAQLPGEKKNGLFGNLIALSLGLTPNFKSNFDLAEDAKLQLSKDTYDDDLDNLLAQIGDQYADLFLAAKNLSDAILLSDILRVNTEITKAPLSASMIKRYDEHHQDLTLLKALVRQQLPEKYKEIFFDQSKNGYAGYIDGGASQEEFYKFIKPILEKMDGTEELLVKLNREDLLRKQRTFDNGSIPHQIHLGELHAILRRQEDFYPFLKDNREKIEKILTFRIPYYVGPLARGNSRFAWMTRKSEETITPWNFEEVVDKGASAQSFIERMTNFDKNLPNEKVLPKHSLLYEYFTVYNELTKVKYVTEGMRKPAFLSGEQKKAIVDLLFKTNRKVTVKQLKEDYFKKIECFDSVEISGVEDRFNASLGTYHDLLKIIKDKDFLDNEENEDILEDIVLTLTLFEDREMIEERLKTYAHLFDDKVMKQLKRRRYTGWGRLSRKLINGIRDKQSGKTILDFLKSDGFANRNFMQLIHDDSLTFKEDIQKAQVSGQGDSLHEHIANLAGSPAIKKGILQTVKVVDELVKVMGRHKPENIVIEMARENQTTQKGQKNSRERMKRIEEGIKELGSQILKEHPVENTQLQNEKLYLYYLQNGRDMYVDQELDINRLSDYDVDHIVPQSFLKDDSIDNKVLTRSDKARGKSDNVPSEEVVKKMKNYWRQLLNAKLITQRKFDNLTKAERGGLSELDKAGFIKRQLVETRQITKHVAQILDSRMNTKYDENDKLIREVKVITLKSKLVSDFRKDFQFYKVREINNYHHAHDAYLNAVVGTALIKKYPKLESEFVYGDYKVYDVRKMIAKSEQEIGKATAKYFFYSNIMNFFKTEITLANGEIRKRPLIETNGETGEIVWDKGRDFATVRKVLSMPQVNIVKKTEVQTGGFSKESILPKRNSDKLIARKKDWDPKKYGGFDSPTVAYSVLVVAKVEKGKSKKLKSVKELLGITIMERSSFEKNPIDFLEAKGYKEVKKDLIIKLPKYSLFELENGRKRMLASAGELQKGNELALPSKYVNFLYLASHYEKLKGSPEDNEQKQLFVEQHKHYLDEIIEQISEFSKRVILADANLDKVLSAYNKHRDKPIREQAENIIHLFTLTNLGAPAAFKYFDTTIDRKRYTSTKEVLDATLIHQSITGLYETRIDLSQLGGDGGPAPAPAPAPAPAPGGMDLLKPLTVERKGVKIKGYWNSQADITCVPKDLLQGEEPVRQQNVTTIHGTQEGDVYYVNLKIDGRRINTEVIGTTLDYAIITPGDVPWILKKPLELTIKLDLEEQQGTLLNNSILSKKGKEELKQLFEKYSALWQSWENQVGHRRIRPHKIATGTVKPTPQKQYHINPKAKPDIQIVINDLLKQGVLIQKESTMNTPVYPVPKPNGRWRMVLDYRAVNKVTPLIAVQNQHSYGILGSLFKGRYKTTIDLSNGFWAHPIVPEDYWITAFTWQGKQYCWTVLPQGFLNSPGLFNGDVVDLLQGIPNVEVYVDDVYISHDSEKEHLEYLDILFNRLKEAGYIISLKKSNIANSIVDFLGFQITNEGRGLTDTFKEKLENITAPTTLKQLQSILGLLNFARNFIPDFTELIAPLYALIPKSPKNYVPWQIEHSTTLETLITKLNGAEYLQGRKGDKTLIMKVNASYTTGYIRYYNEGEKKPISYVSIVFSKTELKFTELEKLLTTVHKGLLKALDLSMGQNIHVYSPIVSMQNIQKTPQTAKKALASRWLSWLSYLEDPRIRFFYDPQMPALKDLPAVDTGKDNKKHPSNFQHIFYTDGSAITSPTKEGHLNAGMGIVYFINKDGNLQKQQEWSISLGNHTAQFAEIAAFEFALKKCLPLGGNILVVTDSNYVAKAYNEELDVWASNGFVNNRKKPLKHISKWKSVADLKRLRPDVVVTHEPGHQKLDSSPHAYGNNLADQLATQASFKVHAGKRTADGSEFEKRTADGSEFESPKKKAKVE

SEQ ID NO: 6554 - protein, 2175 aa, synthetic construct
MPAAKRVKLDGGDKKYSIGLDIGTNSVGWAVITDEYKVPSKKFKVLGNTDRHSIKKNLIGALLFDSGETAEATRLKRTARRRYTRRKNRICYLQEIFSNEMAKVDDSFFHRLEESFLVEEDKKHERHPIFGNIVDEVAYHEKYPTIYHLRKKLVDSTDKADLRLIYLALAHMIKFRGHFLIEGDLNPDNSDVDKLFIQLVQTYNQLFEENPINASGVDAKAILSARLSKSRRLENLIAQLPGEKKNGLFGNLIALSLGLTPNFKSNFDLAEDAKLQLSKDTYDDDLDNLLAQIGDQYADLFLAAKNLSDAILLSDILRVNTEITKAPLSASMIKRYDEHHQDLTLLKALVRQQLPEKYKEIFFDQSKNGYAGYIDGGASQEEFYKFIKPILEKMDGTEELLVKLNREDLLRKQRTFDNGSIPHQIHLGELHAILRRQEDFYPFLKDNREKIEKILTFRIPYYVGPLARGNSRFAWMTRKSEETITPWNFEEVVDKGASAQSFIERMTNFDKNLPNEKVLPKHSLLYEYFTVYNELTKVKYVTEGMRKPAFLSGEQKKAIVDLLFKTNRKVTVKQLKEDYFKKIECFDSVEISGVEDRFNASLGTYHDLLKIIKDKDFLDNEENEDILEDIVLTLTLFEDREMIEERLKTYAHLFDDKVMKQLKRRRYTGWGRLSRKLINGIRDKQSGKTILDFLKSDGFANRNFMQLIHDDSLTFKEDIQKAQVSGQGDSLHEHIANLAGSPAIKKGILQTVKVVDELVKVMGRHKPENIVIEMARENQTTQKGQKNSRERMKRIEEGIKELGSQILKEHPVENTQLQNEKLYLYYLQNGRDMYVDQELDINRLSDYDVDHIVPQSFLKDDSIDNKVLTRSDKARGKSDNVPSEEVVKKMKNYWRQLLNAKLITQRKFDNLTKAERGGLSELDKAGFIKRQLVETRQITKHVAQILDSRMNTKYDENDKLIREVKVITLKSKLVSDFRKDFQFYKVREINNYHHAHDAYLNAVVGTALIKKYPKLESEFVYGDYKVYDVRKMIAKSEQEIGKATAKYFFYSNIMNFFKTEITLANGEIRKRPLIETNGETGEIVWDKGRDFATVRKVLSMPQVNIVKKTEVQTGGFSKESILPKRNSDKLIARKKDWDPKKYGGFDSPTVAYSVLVVAKVEKGKSKKLKSVKELLGITIMERSSFEKNPIDFLEAKGYKEVKKDLIIKLPKYSLFELENGRKRMLASAGELQKGNELALPSKYVNFLYLASHYEKLKGSPEDNEQKQLFVEQHKHYLDEIIEQISEFSKRVILADANLDKVLSAYNKHRDKPIREQAENIIHLFTLTNLGAPAAFKYFDTTIDRKRYTSTKEVLDATLIHQSITGLYETRIDLSQLGGDGGPAPAPAPAPAPAPGGMDLLKPLTVERKGVKIKGYWNSQADITCVPKDLLQGEEPVRQQNVTTIHGTQEGDVYYVNLKIDGRRINTEVIGTTLDYAIITPGDVPWILKKPLELTIKLDLEEQQGTLLNNSILSKKGKEELKQLFEKYSALWQSWENQVGHRRIRPHKIATGTVKPTPQKQYHINPKAKPDIQIVINDLLKQGVLIQKESTMNTPVYPVPKPNGRWRMVLDYRAVNKVTPLIAVQNQHSYGILGSLFKGRYKTTIDLSNGFWAHPIVPEDYWITAFTWQGKQYCWTVLPQGFLNSPGLFNGDVVDLLQGIPNVEVYVDDVYISHDSEKEHLEYLDILFNRLKEAGYIISLKKSNIANSIVDFLGFQITNEGRGLTDTFKEKLENITAPTTLKQLQSILGKLNFARNFIPDFTELIAPLYALIPKSPKNYVPWQIEHSTTLETLITKLNGAEYLQGRKGDKTLIMKVNASYTTGYIRYYNEGEKKPISYVSIVFSKTELKFTELEKLLTTVHKGLLKALDLSMGQNIHVYSPIVSMQNIQKTPQTAKKALASRWLSWLSYLEDPRIRFFYDPQMPALKDLPAVDTGKDNKKHPSNFQHIFYTDGSAITSPTKEGHLNAGMGIVYFINKDGNLQKQQEWSISLGNHTAQFAEIAAFEFALKKCLPLGGNILVVTDSNYVAKAYNEELDVWASNGFVNNRKKPLKHISKWKSVADLKRLRPDVVVTHEPGHQKLDSSPHAYGNNLADQLATQASFKVHAGKRTADGSEFEKRTADGSEFESPKKKAKVE

SEQ ID NO: 6555 - protein, 2097 aa, synthetic construct
MPAAKRVKLDGGDKKYSIGLDIGTNSVGWAVITDEYKVPSKKFKVLGNTDRHSIKKNLIGALLFDSGETAEATRLKRTARRRYTRRKNRICYLQEIFSNEMAKVDDSFFHRLEESFLVEEDKKHERHPIFGNIVDEVAYHEKYPTIYHLRKKLVDSTDKADLRLIYLALAHMIKFRGHFLIEGDLNPDNSDVDKLFIQLVQTYNQLFEENPINASGVDAKAILSARLSKSRRLENLIAQLPGEKKNGLFGNLIALSLGLTPNFKSNFDLAEDAKLQLSKDTYDDDLDNLLAQIGDQYADLFLAAKNLSDAILLSDILRVNTEITKAPLSASMIKRYDEHHQDLTLLKALVRQQLPEKYKEIFFDQSKNGYAGYIDGGASQEEFYKFIKPILEKMDGTEELLVKLNREDLLRKQRTFDNGSIPHQIHLGELHAILRRQEDFYPFLKDNREKIEKILTFRIPYYVGPLARGNSRFAWMTRKSEETITPWNFEEVVDKGASAQSFIERMTNFDKNLPNEKVLPKHSLLYEYFTVYNELTKVKYVTEGMRKPAFLSGEQKKAIVDLLFKTNRKVTVKQLKEDYFKKIECFDSVEISGVEDRFNASLGTYHDLLKIIKDKDFLDNEENEDILEDIVLTLTLFEDREMIEERLKTYAHLFDDKVMKQLKRRRYTGWGRLSRKLINGIRDKQSGKTILDFLKSDGFANRNFMQLIHDDSLTFKEDIQKAQVSGQGDSLHEHIANLAGSPAIKKGILQTVKVVDELVKVMGRHKPENIVIEMARENQTTQKGQKNSRERMKRIEEGIKELGSQILKEHPVENTQLQNEKLYLYYLQNGRDMYVDQELDINRLSDYDVDHIVPQSFLKDDSIDNKVLTRSDKARGKSDNVPSEEVVKKMKNYWRQLLNAKLITQRKFDNLTKAERGGLSELDKAGFIKRQLVETRQITKHVAQILDSRMNTKYDENDKLIREVKVITLKSKLVSDFRKDFQFYKVREINNYHHAHDAYLNAVVGTALIKKYPKLESEFVYGDYKVYDVRKMIAKSEQEIGKATAKYFFYSNIMNFFKTEITLANGEIRKRPLIETNGETGEIVWDKGRDFATVRKVLSMPQVNIVKKTEVQTGGFSKESILPKRNSDKLIARKKDWDPKKYGGFDSPTVAYSVLVVAKVEKGKSKKLKSVKELLGITIMERSSFEKNPIDFLEAKGYKEVKKDLIIKLPKYSLFELENGRKRMLASAGELQKGNELALPSKYVNFLYLASHYEKLKGSPEDNEQKQLFVEQHKHYLDEIIEQISEFSKRVILADANLDKVLSAYNKHRDKPIREQAENIIHLFTLTNLGAPAAFKYFDTTIDRKRYTSTKEVLDATLIHQSITGLYETRIDLSQLGGDGGPAPAPAPAPAPAPGGTLQLEEEYRLFEPESTQKQEMDIWLKNFPQAWAETGGMGTAHCQAPVLIQLKATATPISIRQYPMPHEAYQGIKPHIRRMLDQGILKPCQSPWNTPLLPVKKPGTEDYRPVQDLREVNKRVEDIHPTVPNPYNLLSTLPPSHPWYTVLDLKDAFFCLRLHSESQLLFAFEWRDPEIGLSGQLTWTRLPQGFKNSPTLFNEALHSDLADFRVRYPALVLLQYVDDLLLAAATRTECLEGTKALLETLGNKGYRASAKKAQICLQEVTYLGYSLKDGQRWLTKARKEAILSIPVPKNSRQVREFLGTAGYCRLWIPGFAELAAPLYPLTRPGTLFQWGTEQQLAFEDIKKALLSSPALGLPDITKPFELFIDENSGFAKGVLVQKLGPWKRPVAYLSKKLDTVASGWPPCLRMVAAIAILVKDAGKLTLGQPLTILTSHPVEALVRQPPNKWLSNARMTHYQAMLLDAERVHFGPTVSLNPATLLPLPSGGNHHDCLQILAETHGTRPDLTDQPLPDADLTWYTDGSSFIRNGEREAGAAVTTESEVIWAAPLPPGTSAQRAELIALTQALKMAEGKKLTVYTDSRYAFATTHVHGEIYRRRGWLTSEGKEIKNKNEILALLEALFLPKRLSIIHCPGHQKGDSPQAKGNRLADDTAKKAATETHSSLTVLPAGKRTADGSEFEKRTADGSEFESPKKKAKVE

SEQ ID NO: 6556 - protein, 2089 aa, synthetic construct
MPAAKRVKLDGGDKKYSIGLDIGTNSVGWAVITDEYKVPSKKFKVLGNTDRHSIKKNLIGALLFDSGETAEATRLKRTARRRYTRRKNRICYLQEIFSNEMAKVDDSFFHRLEESFLVEEDKKHERHPIFGNIVDEVAYHEKYPTIYHLRKKLVDSTDKADLRLIYLALAHMIKFRGHFLIEGDLNPDNSDVDKLFIQLVQTYNQLFEENPINASGVDAKAILSARLSKSRRLENLIAQLPGEKKNGLFGNLIALSLGLTPNFKSNFDLAEDAKLQLSKDTYDDDLDNLLAQIGDQYADLFLAAKNLSDAILLSDILRVNTEITKAPLSASMIKRYDEHHQDLTLLKALVRQQLPEKYKEIFFDQSKNGYAGYIDGGASQEEFYKFIKPILEKMDGTEELLVKLNREDLLRKQRTFDNGSIPHQIHLGELHAILRRQEDFYPFLKDNREKIEKILTFRIPYYVGPLARGNSRFAWMTRKSEETITPWNFEEVVDKGASAQSFIERMTNFDKNLPNEKVLPKHSLLYEYFTVYNELTKVKYVTEGMRKPAFLSGEQKKAIVDLLFKTNRKVTVKQLKEDYFKKIECFDSVEISGVEDRFNASLGTYHDLLKIIKDKDFLDNEENEDILEDIVLTLTLFEDREMIEERLKTYAHLFDDKVMKQLKRRRYTGWGRLSRKLINGIRDKQSGKTILDFLKSDGFANRNFMQLIHDDSLTFKEDIQKAQVSGQGDSLHEHIANLAGSPAIKKGILQTVKVVDELVKVMGRHKPENIVIEMARENQTTQKGQKNSRERMKRIEEGIKELGSQILKEHPVENTQLQNEKLYLYYLQNGRDMYVDQELDINRLSDYDVDHIVPQSFLKDDSIDNKVLTRSDKARGKSDNVPSEEVVKKMKNYWRQLLNAKLITQRKFDNLTKAERGGLSELDKAGFIKRQLVETRQITKHVAQILDSRMNTKYDENDKLIREVKVITLKSKLVSDFRKDFQFYKVREINNYHHAHDAYLNAVVGTALIKKYPKLESEFVYGDYKVYDVRKMIAKSEQEIGKATAKYFFYSNIMNFFKTEITLANGEIRKRPLIETNGETGEIVWDKGRDFATVRKVLSMPQVNIVKKTEVQTGGFSKESILPKRNSDKLIARKKDWDPKKYGGFDSPTVAYSVLVVAKVEKGKSKKLKSVKELLGITIMERSSFEKNPIDFLEAKGYKEVKKDLIIKLPKYSLFELENGRKRMLASAGELQKGNELALPSKYVNFLYLASHYEKLKGSPEDNEQKQLFVEQHKHYLDEIIEQISEFSKRVILADANLDKVLSAYNKHRDKPIREQAENIIHLFTLTNLGAPAAFKYFDTTIDRKRYTSTKEVLDATLIHQSITGLYETRIDLSQLGGDGGPAPAPAPAPAPAPGGVPWLTQQPLQLTILVPLQEYQEKILSKTALPEDQKQQLKTLFVKYDNLWQHWENQVGHRKIRPHNIATGDYPPRPQKQYPINPKAKPSIQIVIDDLLKQGVLTPQNSTMNTPVYPVPKPDGRWRMVLDYREVNKTIPLTAAQNQHSAGILATIVRQKYKTTLDLANGFWAHPITPESYWLTAFTWQGKQYCWTRLPQGFLNSPALFNADVVDLLKEIPNVQVYVDDIYLSHDDPKEHVQQLEKVFQILLQAGYVVSLKKSEIGQKTVEFLGFNITKEGRGLTDTFKTKLLNITPPKDLKQLQSILGKLNFARNFIPNFAELVQPLYNLIAPAKGKYIEWSEENTKQLNMVIEALNTASNLEERLPEQRLVIKVNTSPSAGYVRYYNETGKKPIMYLNYVFSKAELKFSMLEKLLTTMHKALIKAMDLAMGQEILVYSPIVSMTKIQKTPLPERKALPIRWITWMTYLEDPRIQFHYDKTLPELKHIPDVYTSSQSPVKHPSQYEGVFYTDGSAIKSPDPTKSNNAGMGIVHATYKPEYQVLNQWSIPLGNHTAQMAEIAAVEFACKKALKIPGPVLVITDSFYVAESANKELPYWKSNGFVNNKKKPLKHISKWKSIAECLSMKPDITIQHEKGISLQIPVFILKGNALADKLATQGSYVVNAGKRTADGSEFEKRTADGSEFESPKKKAKVE

SEQ ID NO: 6557 - protein, 2096 aa, synthetic construct
MPAAKRVKLDGGDKKYSIGLDIGTNSVGWAVITDEYKVPSKKFKVLGNTDRHSIKKNLIGALLFDSGETAEATRLKRTARRRYTRRKNRICYLQEIFSNEMAKVDDSFFHRLEESFLVEEDKKHERHPIFGNIVDEVAYHEKYPTIYHLRKKLVDSTDKADLRLIYLALAHMIKFRGHFLIEGDLNPDNSDVDKLFIQLVQTYNQLFEENPINASGVDAKAILSARLSKSRRLENLIAQLPGEKKNGLFGNLIALSLGLTPNFKSNFDLAEDAKLQLSKDTYDDDLDNLLAQIGDQYADLFLAAKNLSDAILLSDILRVNTEITKAPLSASMIKRYDEHHQDLTLLKALVRQQLPEKYKEIFFDQSKNGYAGYIDGGASQEEFYKFIKPILEKMDGTEELLVKLNREDLLRKQRTFDNGSIPHQIHLGELHAILRRQEDFYPFLKDNREKIEKILTFRIPYYVGPLARGNSRFAWMTRKSEETITPWNFEEVVDKGASAQSFIERMTNFDKNLPNEKVLPKHSLLYEYFTVYNELTKVKYVTEGMRKPAFLSGEQKKAIVDLLFKTNRKVTVKQLKEDYFKKIECFDSVEISGVEDRFNASLGTYHDLLKIIKDKDFLDNEENEDILEDIVLTLTLFEDREMIEERLKTYAHLFDDKVMKQLKRRRYTGWGRLSRKLINGIRDKQSGKTILDFLKSDGFANRNFMQLIHDDSLTFKEDIQKAQVSGQGDSLHEHIANLAGSPAIKKGILQTVKVVDELVKVMGRHKPENIVIEMARENQTTQKGQKNSRERMKRIEEGIKELGSQILKEHPVENTQLQNEKLYLYYLQNGRDMYVDQELDINRLSDYDVDHIVPQSFLKDDSIDNKVLTRSDKARGKSDNVPSEEVVKKMKNYWRQLLNAKLITQRKFDNLTKAERGGLSELDKAGFIKRQLVETRQITKHVAQILDSRMNTKYDENDKLIREVKVITLKSKLVSDFRKDFQFYKVREINNYHHAHDAYLNAVVGTALIKKYPKLESEFVYGDYKVYDVRKMIAKSEQEIGKATAKYFFYSNIMNFFKTEITLANGEIRKRPLIETNGETGEIVWDKGRDFATVRKVLSMPQVNIVKKTEVQTGGFSKESILPKRNSDKLIARKKDWDPKKYGGFDSPTVAYSVLVVAKVEKGKSKKLKSVKELLGITIMERSSFEKNPIDFLEAKGYKEVKKDLIIKLPKYSLFELENGRKRMLASAGELQKGNELALPSKYVNFLYLASHYEKLKGSPEDNEQKQLFVEQHKHYLDEIIEQISEFSKRVILADANLDKVLSAYNKHRDKPIREQAENIIHLFTLTNLGAPAAFKYFDTTIDRKRYTSTKEVLDATLIHQSITGLYETRIDLSQLGGDGGPAPAPAPAPAPAPGGVLNLEEEYRLHEKPVPSSIDPSWLQLFPTVWAERAGMGLANQVPPVVVELRSGASPVAVRQYPMSKEAREGIRPHIQKFLDLGVLVPCRSPWNTPLLPVKKPGTNDYRPVQDLREINKRVQDIHPTVPNPYNLLSSLPPSYTWYSVLDLKDAFFCLRLHPNSQPLFAFEWKDPEKGNTGQLTWTRLPQGFKNSPTLFNEALHRDLAPFRALNPQVVLLQYVDDLLVAAPTYEDCKKGTQKLLQELSKLGYRVSAKKAQLCQREVTYLGYLLKEGKRWLTPARKATVMKIPVPTTPRQVREFLGTAGFCRLWIPGFASLAAPLYPLTKPSIPFIWTEEHQQAFDHIKKALLSAPALALPDLTKPFTLYIDERAGVARGVLTQTLGPWRRPVAYLSKKLDPVASGWPTCLKAVAAVALLLKDADKLTLGQNVTVIASHSLESIVRQPPDRWMTNARMTHYQSLLLNERVSFAPPAVLNPATLLPVESEATPVHRCSEILAEETGTRRDLEDQPLPGVPTWYTDGSSFITEGKRRAGAPIVDGKRTVWASSLPEGTSAQKAELVALTQALRLAEGKNINIYTDSRYAFATAHIHGAIYKQRGWLTSAGKDIKNKEEILALLEAIHLPRRVAIIHCPGHQRGSNPVATGNRRADEAAKQAALSTRVLAGTTKPAGKRTADGSEFEKRTADGSEFESPKKKAKVE

SEQ ID NO: 6558 - protein, 2096 aa, synthetic construct
MPAAKRVKLDGGDKKYSIGLDIGTNSVGWAVITDEYKVPSKKFKVLGNTDRHSIKKNLIGALLFDSGETAEATRLKRTARRRYTRRKNRICYLQEIFSNEMAKVDDSFFHRLEESFLVEEDKKHERHPIFGNIVDEVAYHEKYPTIYHLRKKLVDSTDKADLRLIYLALAHMIKFRGHFLIEGDLNPDNSDVDKLFIQLVQTYNQLFEENPINASGVDAKAILSARLSKSRRLENLIAQLPGEKKNGLFGNLIALSLGLTPNFKSNFDLAEDAKLQLSKDTYDDDLDNLLAQIGDQYADLFLAAKNLSDAILLSDILRVNTEITKAPLSASMIKRYDEHHQDLTLLKALVRQQLPEKYKEIFFDQSKNGYAGYIDGGASQEEFYKFIKPILEKMDGTEELLVKLNREDLLRKQRTFDNGSIPHQIHLGELHAILRRQEDFYPFLKDNREKIEKILTFRIPYYVGPLARGNSRFAWMTRKSEETITPWNFEEVVDKGASAQSFIERMTNFDKNLPNEKVLPKHSLLYEYFTVYNELTKVKYVTEGMRKPAFLSGEQKKAIVDLLFKTNRKVTVKQLKEDYFKKIECFDSVEISGVEDRFNASLGTYHDLLKIIKDKDFLDNEENEDILEDIVLTLTLFEDREMIEERLKTYAHLFDDKVMKQLKRRRYTGWGRLSRKLINGIRDKQSGKTILDFLKSDGFANRNFMQLIHDDSLTFKEDIQKAQVSGQGDSLHEHIANLAGSPAIKKGILQTVKVVDELVKVMGRHKPENIVIEMARENQTTQKGQKNSRERMKRIEEGIKELGSQILKEHPVENTQLQNEKLYLYYLQNGRDMYVDQELDINRLSDYDVDHIVPQSFLKDDSIDNKVLTRSDKARGKSDNVPSEEVVKKMKNYWRQLLNAKLITQRKFDNLTKAERGGLSELDKAGFIKRQLVETRQITKHVAQILDSRMNTKYDENDKLIREVKVITLKSKLVSDFRKDFQFYKVREINNYHHAHDAYLNAVVGTALIKKYPKLESEFVYGDYKVYDVRKMIAKSEQEIGKATAKYFFYSNIMNFFKTEITLANGEIRKRPLIETNGETGEIVWDKGRDFATVRKVLSMPQVNIVKKTEVQTGGFSKESILPKRNSDKLIARKKDWDPKKYGGFDSPTVAYSVLVVAKVEKGKSKKLKSVKELLGITIMERSSFEKNPIDFLEAKGYKEVKKDLIIKLPKYSLFELENGRKRMLASAGELQKGNELALPSKYVNFLYLASHYEKLKGSPEDNEQKQLFVEQHKHYLDEIIEQISEFSKRVILADANLDKVLSAYNKHRDKPIREQAENIIHLFTLTNLGAPAAFKYFDTTIDRKRYTSTKEVLDATLIHQSITGLYETRIDLSQLGGDGGPAPAPAPAPAPAPGGVLNLEEEYRLHEKPVPSSIDPSWLQLFPTVWAERAGMGLANQVPPVVVELRSGASPVAVRQYPMSKEAREGIRPHIQKFLDLGVLVPCRSPWNTPLLPVKKPGTNDYRPVQDLREINKRVQDIHPTVPNPYNLLSSLPPSYTWYSVLDLKDAFFCLRLHPNSQPLFAFEWKDPEKGNTGQLTWTRLPQGFKNSPTLFNEALHRDLAPFRALNPQVVLLQYVDDLLVAAPTYEDCKKGTQKLLQELSKLGYRVSAKKAQLCQREVTYLGYLLKEGKRWLTPARKATVMKIPVPTTPRQVREFLGKAGFCRLFIPGFASLAAPLYPLTKPSIPFIWTEEHQQAFDHIKKALLSAPALALPDLTKPFTLYIDERAGVARGVLTQTLGPWRRPVAYLSKKLDPVASGWPTCLKAVAAVALLLKDADKLTLGQNVTVIASHSLESIVRQPPDRWMTNARMTHYQSLLLNERVSFAPPAVLNPATLLPVESEATPVHRCSEILAEETGTRRDLEDQPLPGVPTWYTDGSSFITEGKRRAGAPIVDGKRTVWASSLPEGTSAQKAELVALTQALRLAEGKNINIYTDSRYAFATAHIHGAIYKQRGWLTSAGKDIKNKEEILALLEAIHLPRRVAIIHCPGHQRGSNPVATGNRRADEAAKQAALSTRVLAGTTKPAGKRTADGSEFEKRTADGSEFESPKKKAKVE

SEQ ID NO: 6559 - protein, 2129 aa, synthetic construct
MPAAKRVKLDGGDKKYSIGLDIGTNSVGWAVITDEYKVPSKKFKVLGNTDRHSIKKNLIGALLFDSGETAEATRLKRTARRRYTRRKNRICYLQEIFSNEMAKVDDSFFHRLEESFLVEEDKKHERHPIFGNIVDEVAYHEKYPTIYHLRKKLVDSTDKADLRLIYLALAHMIKFRGHFLIEGDLNPDNSDVDKLFIQLVQTYNQLFEENPINASGVDAKAILSARLSKSRRLENLIAQLPGEKKNGLFGNLIALSLGLTPNFKSNFDLAEDAKLQLSKDTYDDDLDNLLAQIGDQYADLFLAAKNLSDAILLSDILRVNTEITKAPLSASMIKRYDEHHQDLTLLKALVRQQLPEKYKEIFFDQSKNGYAGYIDGGASQEEFYKFIKPILEKMDGTEELLVKLNREDLLRKQRTFDNGSIPHQIHLGELHAILRRQEDFYPFLKDNREKIEKILTFRIPYYVGPLARGNSRFAWMTRKSEETITPWNFEEVVDKGASAQSFIERMTNFDKNLPNEKVLPKHSLLYEYFTVYNELTKVKYVTEGMRKPAFLSGEQKKAIVDLLFKTNRKVTVKQLKEDYFKKIECFDSVEISGVEDRFNASLGTYHDLLKIIKDKDFLDNEENEDILEDIVLTLTLFEDREMIEERLKTYAHLFDDKVMKQLKRRRYTGWGRLSRKLINGIRDKQSGKTILDFLKSDGFANRNFMQLIHDDSLTFKEDIQKAQVSGQGDSLHEHIANLAGSPAIKKGILQTVKVVDELVKVMGRHKPENIVIEMARENQTTQKGQKNSRERMKRIEEGIKELGSQILKEHPVENTQLQNEKLYLYYLQNGRDMYVDQELDINRLSDYDVDHIVPQSFLKDDSIDNKVLTRSDKARGKSDNVPSEEVVKKMKNYWRQLLNAKLITQRKFDNLTKAERGGLSELDKAGFIKRQLVETRQITKHVAQILDSRMNTKYDENDKLIREVKVITLKSKLVSDFRKDFQFYKVREINNYHHAHDAYLNAVVGTALIKKYPKLESEFVYGDYKVYDVRKMIAKSEQEIGKATAKYFFYSNIMNFFKTEITLANGEIRKRPLIETNGETGEIVWDKGRDFATVRKVLSMPQVNIVKKTEVQTGGFSKESILPKRNSDKLIARKKDWDPKKYGGFDSPTVAYSVLVVAKVEKGKSKKLKSVKELLGITIMERSSFEKNPIDFLEAKGYKEVKKDLIIKLPKYSLFELENGRKRMLASAGELQKGNELALPSKYVNFLYLASHYEKLKGSPEDNEQKQLFVEQHKHYLDEIIEQISEFSKRVILADANLDKVLSAYNKHRDKPIREQAENIIHLFTLTNLGAPAAFKYFDTTIDRKRYTSTKEVLDATLIHQSITGLYETRIDLSQLGGDGGPAPAPAPAPAPAPGGLLGRDLLTKLKAQIQFSTEGPQVTWEDRPAMCLVLNLEEEYRLHEKPVPPSIDPSWLQLFPMVWAEKAGMGLANQVPPVVVELKSDASPVAVRQYPMSKEAREGIRPHIQRFLDLGILVPCQSPWNTPLLPVKKPGTNDYRPVQDLREVNKRVQDIHPTVPNPYNLLSSLPPSHTWYSVLDLKDAFFCLKLHPNSQPLFAFEWRDPEKGNTGQLTWTRLPQGFKNSPTLFNEALHRDLASFRALNPQVVMLQYVDDLLVAAPTYRDCKEGTRRLLQELSKLGYRVSAKKAQLCREEVTYLGYLLKGGKRWLTPARKATVMKIPTPTTPRQVREFLGTAGFCRLWIPGFASLAAPLYPLTRPKVPFTWTEAHQEAFGRIKEALLSAPALALPDLTKPFALYVDEKEGVARGVLTQTLGPWRRPVAYLSKKLDPVASGWPTCLKAIAAVALLLKDADKLTLGQNVLVIAPHNLESIVRQPPDRWMTNARMTHYQSLLLNERVSFAPPAILNPATLLPVESDDTPIHICSEILAEETGTRPDLRDQPLPGVPAWYTDGSSFIMDGRRQAGAAIVDNKRTVWASNLPEGTSAQKAELIALTQALRLAEGKSINIYTDSRYAFATAHVHGAIYKQRGWLTSAGKDIKNKEEILALLEAIHLPKRVAIIHCPGHQRGTDPVATGNRKADEAAKQAAQSTRILTETTKNAGKRTADGSEFEKRTADGSEFESPKKKAKVE

SEQ ID NO: 6560 - protein, 2220 aa, synthetic construct
MPAAKRVKLDGGDKKYSIGLDIGTNSVGWAVITDEYKVPSKKFKVLGNTDRHSIKKNLIGALLFDSGETAEATRLKRTARRRYTRRKNRICYLQEIFSNEMAKVDDSFFHRLEESFLVEEDKKHERHPIFGNIVDEVAYHEKYPTIYHLRKKLVDSTDKADLRLIYLALAHMIKFRGHFLIEGDLNPDNSDVDKLFIQLVQTYNQLFEENPINASGVDAKAILSARLSKSRRLENLIAQLPGEKKNGLFGNLIALSLGLTPNFKSNFDLAEDAKLQLSKDTYDDDLDNLLAQIGDQYADLFLAAKNLSDAILLSDILRVNTEITKAPLSASMIKRYDEHHQDLTLLKALVRQQLPEKYKEIFFDQSKNGYAGYIDGGASQEEFYKFIKPILEKMDGTEELLVKLNREDLLRKQRTFDNGSIPHQIHLGELHAILRRQEDFYPFLKDNREKIEKILTFRIPYYVGPLARGNSRFAWMTRKSEETITPWNFEEVVDKGASAQSFIERMTNFDKNLPNEKVLPKHSLLYEYFTVYNELTKVKYVTEGMRKPAFLSGEQKKAIVDLLFKTNRKVTVKQLKEDYFKKIECFDSVEISGVEDRFNASLGTYHDLLKIIKDKDFLDNEENEDILEDIVLTLTLFEDREMIEERLKTYAHLFDDKVMKQLKRRRYTGWGRLSRKLINGIRDKQSGKTILDFLKSDGFANRNFMQLIHDDSLTFKEDIQKAQVSGQGDSLHEHIANLAGSPAIKKGILQTVKVVDELVKVMGRHKPENIVIEMARENQTTQKGQKNSRERMKRIEEGIKELGSQILKEHPVENTQLQNEKLYLYYLQNGRDMYVDQELDINRLSDYDVDHIVPQSFLKDDSIDNKVLTRSDKARGKSDNVPSEEVVKKMKNYWRQLLNAKLITQRKFDNLTKAERGGLSELDKAGFIKRQLVETRQITKHVAQILDSRMNTKYDENDKLIREVKVITLKSKLVSDFRKDFQFYKVREINNYHHAHDAYLNAVVGTALIKKYPKLESEFVYGDYKVYDVRKMIAKSEQEIGKATAKYFFYSNIMNFFKTEITLANGEIRKRPLIETNGETGEIVWDKGRDFATVRKVLSMPQVNIVKKTEVQTGGFSKESILPKRNSDKLIARKKDWDPKKYGGFDSPTVAYSVLVVAKVEKGKSKKLKSVKELLGITIMERSSFEKNPIDFLEAKGYKEVKKDLIIKLPKYSLFELENGRKRMLASAGELQKGNELALPSKYVNFLYLASHYEKLKGSPEDNEQKQLFVEQHKHYLDEIIEQISEFSKRVILADANLDKVLSAYNKHRDKPIREQAENIIHLFTLTNLGAPAAFKYFDTTIDRKRYTSTKEVLDATLIHQSITGLYETRIDLSQLGGDGGPAPAPAPAPAPAPGGTLGDQGSRGSDPLPEPRVTLTVEGIPTEFLVNTGAEHSVLTKPMGKMGSKRTVVAGATGSKVYPWTTKRLLKIGQKQVTHSFLVIPECPAPLLGRDLLTKLKAQIQFSTEGPQVTWEDRPAMCLVLNLEEEYRLHEKPVPPSIDPSWLQLFPMVWAEKAGMGLANQVPPVVVELKSDASPVAVRQYPMSKEAREGIRPHIQRFLDLGILVPCQSPWNTPLLPVKKPGTNDYRPVQDLREVNKRVQDIHPTVPNPYNLLSSLPPSHTWYSVLDLKDAFFCLKLHPNSQPLFAFEWRDPEKGNTGQLTWTRLPQGFKNSPTLFNEALHRDLASFRALNPQVVMLQYVDDLLVAAPTYRDCKEGTRRLLQELSKLGYRVSAKKAQLCREEVTYLGYLLKGGKRWLTPARKATVMKIPTPTTPRQVREFLGTAGFCRLWIPGFASLAAPLYPLTRPKVPFTWTEAHQEAFGRIKEALLSAPALALPDLTKPFALYVDEKEGVARGVLTQTLGPWRRPVAYLSKKLDPVASGWPTCLKAIAAVALLLKDADKLTLGQNVLVIAPHNLESIVRQPPDRWMTNARMTHYQSLLLNERVSFAPPAILNPATLLPVESDDTPIHICSEILAEETGTRPDLRDQPLPGVPAWYTDGSSFIMDGRRQAGAAIVDNKRTVWASNLPEGTSAQKAELIALTQALRLAEGKSINIYTDSRYAFATAHVHGAIYKQRGWLTSAGKDIKNKEEILALLEAIHLPKRVAIIHCPGHQRGTDPVATGNRKADEAAKQAAQSTRILTETTKNAGKRTADGSEFEKRTADGSEFESPKKKAKVE

SEQ ID NO: 6561 - protein, 2098 aa, synthetic construct
MPAAKRVKLDGGDKKYSIGLDIGTNSVGWAVITDEYKVPSKKFKVLGNTDRHSIKKNLIGALLFDSGETAEATRLKRTARRRYTRRKNRICYLQEIFSNEMAKVDDSFFHRLEESFLVEEDKKHERHPIFGNIVDEVAYHEKYPTIYHLRKKLVDSTDKADLRLIYLALAHMIKFRGHFLIEGDLNPDNSDVDKLFIQLVQTYNQLFEENPINASGVDAKAILSARLSKSRRLENLIAQLPGEKKNGLFGNLIALSLGLTPNFKSNFDLAEDAKLQLSKDTYDDDLDNLLAQIGDQYADLFLAAKNLSDAILLSDILRVNTEITKAPLSASMIKRYDEHHQDLTLLKALVRQQLPEKYKEIFFDQSKNGYAGYIDGGASQEEFYKFIKPILEKMDGTEELLVKLNREDLLRKQRTFDNGSIPHQIHLGELHAILRRQEDFYPFLKDNREKIEKILTFRIPYYVGPLARGNSRFAWMTRKSEETITPWNFEEVVDKGASAQSFIERMTNFDKNLPNEKVLPKHSLLYEYFTVYNELTKVKYVTEGMRKPAFLSGEQKKAIVDLLFKTNRKVTVKQLKEDYFKKIECFDSVEISGVEDRFNASLGTYHDLLKIIKDKDFLDNEENEDILEDIVLTLTLFEDREMIEERLKTYAHLFDDKVMKQLKRRRYTGWGRLSRKLINGIRDKQSGKTILDFLKSDGFANRNFMQLIHDDSLTFKEDIQKAQVSGQGDSLHEHIANLAGSPAIKKGILQTVKVVDELVKVMGRHKPENIVIEMARENQTTQKGQKNSRERMKRIEEGIKELGSQILKEHPVENTQLQNEKLYLYYLQNGRDMYVDQELDINRLSDYDVDHIVPQSFLKDDSIDNKVLTRSDKARGKSDNVPSEEVVKKMKNYWRQLLNAKLITQRKFDNLTKAERGGLSELDKAGFIKRQLVETRQITKHVAQILDSRMNTKYDENDKLIREVKVITLKSKLVSDFRKDFQFYKVREINNYHHAHDAYLNAVVGTALIKKYPKLESEFVYGDYKVYDVRKMIAKSEQEIGKATAKYFFYSNIMNFFKTEITLANGEIRKRPLIETNGETGEIVWDKGRDFATVRKVLSMPQVNIVKKTEVQTGGFSKESILPKRNSDKLIARKKDWDPKKYGGFDSPTVAYSVLVVAKVEKGKSKKLKSVKELLGITIMERSSFEKNPIDFLEAKGYKEVKKDLIIKLPKYSLFELENGRKRMLASAGELQKGNELALPSKYVNFLYLASHYEKLKGSPEDNEQKQLFVEQHKHYLDEIIEQISEFSKRVILADANLDKVLSAYNKHRDKPIREQAENIIHLFTLTNLGAPAAFKYFDTTIDRKRYTSTKEVLDATLIHQSITGLYETRIDLSQLGGDGGPAPAPAPAPAPAPGGTLNIEDEYRLHETSKEPDVSLGSTWLSDFPQAWAETGGMGLAVRQAPLIIPLKATSTPVSIKQYPMSQEARLGIKPHIQRLLDQGILVPCQSPWNTPLLPVKKPGTNDYRPVQDLREVNKRVEDIHPTVPNPYNLLSGLPPSHQWYTVLDLKDAFFCLRLHPTSQPLFAFEWRDPEMGISGQLTWTRLPQGFKNSPTLFNEALHRDLAGFRIQHPDLILLQYVDDLLLAATSELDCQQGTRALLQTLGDLGYRASAKKAQICQKQVKYLGYLLKEGQRWLTEARKETVMGQPIPKTPRQLREFLGTAGFCRLWIPGFAEMAAPLYPLTKPGTLFNWGPDQQKAFQEIKQALLTAPALGLPDLTKPFELFVDEKQGYAKGVLTQKLGPWRRPVAYLSKKLDPVAAGWPPCLRMVAAIAVLTKDAGKLTMGQPLVILAPHAVEALVKQPPDRWLSNARMTHYQALLLDTDRVQFGPVVALNPATLLPLPEEGLQHDCLDILAEAHGTRSDLMDQPLPDADHTWYTDGSSFLQEGQRKAGAAVTTETEVIWARALPAGTSAQRAELIALTQALKMAEGKKLNVYTDSRYAFATAHIHGEIYRRRGWLTSEGKEIKNKDEILALLKALFLPKRLSIIHCPGHQKGNSAEARGNRMADQAAREVATRETPETSTLLAGKRTADGSEFEKRTADGSEFESPKKKAKVE

SEQ ID NO: 6562 - protein, 2098 aa, synthetic construct
MPAAKRVKLDGGDKKYSIGLDIGTNSVGWAVITDEYKVPSKKFKVLGNTDRHSIKKNLIGALLFDSGETAEATRLKRTARRRYTRRKNRICYLQEIFSNEMAKVDDSFFHRLEESFLVEEDKKHERHPIFGNIVDEVAYHEKYPTIYHLRKKLVDSTDKADLRLIYLALAHMIKFRGHFLIEGDLNPDNSDVDKLFIQLVQTYNQLFEENPINASGVDAKAILSARLSKSRRLENLIAQLPGEKKNGLFGNLIALSLGLTPNFKSNFDLAEDAKLQLSKDTYDDDLDNLLAQIGDQYADLFLAAKNLSDAILLSDILRVNTEITKAPLSASMIKRYDEHHQDLTLLKALVRQQLPEKYKEIFFDQSKNGYAGYIDGGASQEEFYKFIKPILEKMDGTEELLVKLNREDLLRKQRTFDNGSIPHQIHLGELHAILRRQEDFYPFLKDNREKIEKILTFRIPYYVGPLARGNSRFAWMTRKSEETITPWNFEEVVDKGASAQSFIERMTNFDKNLPNEKVLPKHSLLYEYFTVYNELTKVKYVTEGMRKPAFLSGEQKKAIVDLLFKTNRKVTVKQLKEDYFKKIECFDSVEISGVEDRFNASLGTYHDLLKIIKDKDFLDNEENEDILEDIVLTLTLFEDREMIEERLKTYAHLFDDKVMKQLKRRRYTGWGRLSRKLINGIRDKQSGKTILDFLKSDGFANRNFMQLIHDDSLTFKEDIQKAQVSGQGDSLHEHIANLAGSPAIKKGILQTVKVVDELVKVMGRHKPENIVIEMARENQTTQKGQKNSRERMKRIEEGIKELGSQILKEHPVENTQLQNEKLYLYYLQNGRDMYVDQELDINRLSDYDVDHIVPQSFLKDDSIDNKVLTRSDKARGKSDNVPSEEVVKKMKNYWRQLLNAKLITQRKFDNLTKAERGGLSELDKAGFIKRQLVETRQITKHVAQILDSRMNTKYDENDKLIREVKVITLKSKLVSDFRKDFQFYKVREINNYHHAHDAYLNAVVGTALIKKYPKLESEFVYGDYKVYDVRKMIAKSEQEIGKATAKYFFYSNIMNFFKTEITLANGEIRKRPLIETNGETGEIVWDKGRDFATVRKVLSMPQVNIVKKTEVQTGGFSKESILPKRNSDKLIARKKDWDPKKYGGFDSPTVAYSVLVVAKVEKGKSKKLKSVKELLGITIMERSSFEKNPIDFLEAKGYKEVKKDLIIKLPKYSLFELENGRKRMLASAGELQKGNELALPSKYVNFLYLASHYEKLKGSPEDNEQKQLFVEQHKHYLDEIIEQISEFSKRVILADANLDKVLSAYNKHRDKPIREQAENIIHLFTLTNLGAPAAFKYFDTTIDRKRYTSTKEVLDATLIHQSITGLYETRIDLSQLGGDGGPAPAPAPAPAPAPGGTLNIEDEHRLHETSKEPDVSLGSTWLSDFPQAWAETGGMGLAVRQAPLIIPLKATSTPVSIKQYPMSQEARLGIKPHIQRLLDQGILVPCQSPWNTPLLPVKKPGTNDYRPVQDLREVNKRVEDIHPTVPNPYNLLSGLPPSHQWYTVLDLKDAFFCLRLHPTSQPLFAFEWRDPEMGISGQLTWTRLPQGFKNSPTLFDEALHRDLADFRIQHPDLILLQYVDDLLLAATSELDCQQGTRALLQTLGNLGYRASAKKAQICQKQVKYLGYLLKEGQRWLTEARKETVMGQPTPKTPRQLREFLGTAGFCRLWIPGFAEMAAPLYPLTKTGTLFNWGPDQQKAYQEIKQALLTAPALGLPDLTKPFELFVDEKQGYAKGVLTQKLGPWRRPVAYLSKKLDPVAAGWPPCLRMVAAIAVLTKDAGKLTMGQPLVILAPHAVEALVKQPPDRWLSNARMTHYQALLLDTDRVQFGPVVALNPATLLPLPEEGLQHNCLDILAEAHGTRPDLTDQPLPDADHTWYTDGSSLLQEGQRKAGAAVTTETEVIWAKALPAGTSAQRAELIALTQALKMAEGKKLNVYTDSRYAFATAHIHGEIYRRRGLLTSEGKEIKNKDEILALLKALFLPKRLSIIHCPGHQKGHSAEARGNRMADQAARKAAITETPDTSTLLAGKRTADGSEFEKRTADGSEFESPKKKAKVE

SEQ ID NO: 6563 - protein, 2098 aa, synthetic construct; identical to SEQ ID NO: 6562

SEQ ID NO: 6564 - protein, 2092 aa, synthetic construct
MPAAKRVKLDGGDKKYSIGLDIGTNSVGWAVITDEYKVPSKKFKVLGNTDRHSIKKNLIGALLFDSGETAEATRLKRTARRRYTRRKNRICYLQEIFSNEMAKVDDSFFHRLEESFLVEEDKKHERHPIFGNIVDEVAYHEKYPTIYHLRKKLVDSTDKADLRLIYLALAHMIKFRGHFLIEGDLNPDNSDVDKLFIQLVQTYNQLFEENPINASGVDAKAILSARLSKSRRLENLIAQLPGEKKNGLFGNLIALSLGLTPNFKSNFDLAEDAKLQLSKDTYDDDLDNLLAQIGDQYADLFLAAKNLSDAILLSDILRVNTEITKAPLSASMIKRYDEHHQDLTLLKALVRQQLPEKYKEIFFDQSKNGYAGYIDGGASQEEFYKFIKPILEKMDGTEELLVKLNREDLLRKQRTFDNGSIPHQIHLGELHAILRRQEDFYPFLKDNREKIEKILTFRIPYYVGPLARGNSRFAWMTRKSEETITPWNFEEVVDKGASAQSFIERMTNFDKNLPNEKVLPKHSLLYEYFTVYNELTKVKYVTEGMRKPAFLSGEQKKAIVDLLFKTNRKVTVKQLKEDYFKKIECFDSVEISGVEDRFNASLGTYHDLLKIIKDKDFLDNEENEDILEDIVLTLTLFEDREMIEERLKTYAHLFDDKVMKQLKRRRYTGWGRLSRKLINGIRDKQSGKTILDFLKSDGFANRNFMQLIHDDSLTFKEDIQKAQVSGQGDSLHEHIANLAGSPAIKKGILQTVKVVDELVKVMGRHKPENIVIEMARENQTTQKGQKNSRERMKRIEEGIKELGSQILKEHPVENTQLQNEKLYLYYLQNGRDMYVDQELDINRLSDYDVDHIVPQSFLKDDSIDNKVLTRSDKARGKSDNVPSEEVVKKMKNYWRQLLNAKLITQRKFDNLTKAERGGLSELDKAGFIKRQLVETRQITKHVAQILDSRMNTKYDENDKLIREVKVITLKSKLVSDFRKDFQFYKVREINNYHHAHDAYLNAVVGTALIKKYPKLESEFVYGDYKVYDVRKMIAKSEQEIGKATAKYFFYSNIMNFFKTEITLANGEIRKRPLIETNGETGEIVWDKGRDFATVRKVLSMPQVNIVKKTEVQTGGFSKESILPKRNSDKLIARKKDWDPKKYGGFDSPTVAYSVLVVAKVEKGKSKKLKSVKELLGITIMERSSFEKNPIDFLEAKGYKEVKKDLIIKLPKYSLFELENGRKRMLASAGELQKGNELALPSKYVNFLYLASHYEKLKGSPEDNEQKQLFVEQHKHYLDEIIEQISEFSKRVILADANLDKVLSAYNKHRDKPIREQAENIIHLFTLTNLGAPAAFKYFDTTIDRKRYTSTKEVLDATLIHQSITGLYETRIDLSQLGGDGGPAPAPAPAPAPAPGGTLQLDDEYRLYSPLVKPDQNIQFWLEQFPQAWAETAGMGLAKQVPPQVIQLKASATPVSVRQYPLSKEAQEGIRPHVQRLIQQGILVPVQSPWNTPLLPVRKPGTNDYRPVQDLREVNKRVQDIHPTVPNPYNLLCALPPQRSWYTVLDLKDAFFCLRLHPTSQPLFAFEWRDPGTGRTGQLTWTRLPQGFKNSPTIFDEALHRDLANFRIQHPQVTLLQYVDDLLLAGATKQDCLEGTKALLLELSDLGYRASAKKAQICRREVTYLGYSLRDGQRWLTEARKKTVVQIPAPTTAKQVREFLGTAGFCRLWIPGFATLAAPLYPLTKEKGEFSWAPEHQKAFDAIKKALLSAPALALPDVTKPFTLYVDERKGVARGVLTQTLGPWRRPVAYLSKKLDPVASGWPVCLKAIAAVAILVKDADKLTLGQNITVIAPHALENIVRQPPDRWMTNARMTHYQSLLLTERVTFAPPAALNPATLLPEETDEPVTHDCHQLLIEETGVRKDLTDIPLTGEVLTWFTDGSSYVVEGKRMAGAAVVDGTRTIWASSLPEGTSAQKAELMALTQALRLAEGKSINIYTDSRYAFATAHVHGAIYKQRGLLTSAGREIKNKEEILSLLEALHLPKRLAIIHCPGHQKAKDPISRGNQMADRVAKQAAQGVNLLAGKRTADGSEFEKRTADGSEFESPKKKAKVE

SEQ ID NO: 6565 - protein, 2092 aa, synthetic construct; identical to SEQ ID NO: 6564

SEQ ID NO: 6566 - protein, 2178 aa, synthetic construct
MPAAKRVKLDGGDKKYSIGLDIGTNSVGWAVITDEYKVPSKKFKVLGNTDRHSIKKNLIGALLFDSGETAEATRLKRTARRRYTRRKNRICYLQEIFSNEMAKVDDSFFHRLEESFLVEEDKKHERHPIFGNIVDEVAYHEKYPTIYHLRKKLVDSTDKADLRLIYLALAHMIKFRGHFLIEGDLNPDNSDVDKLFIQLVQTYNQLFEENPINASGVDAKAILSARLSKSRRLENLIAQLPGEKKNGLFGNLIALSLGLTPNFKSNFDLAEDAKLQLSKDTYDDDLDNLLAQIGDQYADLFLAAKNLSDAILLSDILRVNTEITKAPLSASMIKRYDEHHQDLTLLKALVRQQLPEKYKEIFFDQSKNGYAGYIDGGASQEEFYKFIKPILEKMDGTEELLVKLNREDLLRKQRTFDNGSIPHQIHLGELHAILRRQEDFYPFLKDNREKIEKILTFRIPYYVGPLARGNSRFAWMTRKSEETITPWNFEEVVDKGASAQSFIERMTNFDKNLPNEKVLPKHSLLYEYFTVYNELTKVKYVTEGMRKPAFLSGEQKKAIVDLLFKTNRKVTVKQLKEDYFKKIECFDSVEISGVEDRFNASLGTYHDLLKIIKDKDFLDNEENEDILEDIVLTLTLFEDREMIEERLKTYAHLFDDKVMKQLKRRRYTGWGRLSRKLINGIRDKQSGKTILDFLKSDGFANRNFMQLIHDDSLTFKEDIQKAQVSGQGDSLHEHIANLAGSPAIKKGILQTVKVVDELVKVMGRHKPENIVIEMARENQTTQKGQKNSRERMKRIEEGIKELGSQILKEHPVENTQLQNEKLYLYYLQNGRDMYVDQELDINRLSDYDVDHIVPQSFLKDDSIDNKVLTRSDKARGKSDNVPSEEVVKKMKNYWRQLLNAKLITQRKFDNLTKAERGGLSELDKAGFIKRQLVETRQITKHVAQILDSRMNTKYDENDKLIREVKVITLKSKLVSDFRKDFQFYKVREINNYHHAHDAYLNAVVGTALIKKYPKLESEFVYGDYKVYDVRKMIAKSEQEIGKATAKYFFYSNIMNFFKTEITLANGEIRKRPLIETNGETGEIVWDKGRDFATVRKVLSMPQVNIVKKTEVQTGGFSKESILPKRNSDKLIARKKDWDPKKYGGFDSPTVAYSVLVVAKVEKGKSKKLKSVKELLGITIMERSSFEKNPIDFLEAKGYKEVKKDLIIKLPKYSLFELENGRKRMLASAGELQKGNELALPSKYVNFLYLASHYEKLKGSPEDNEQKQLFVEQHKHYLDEIIEQISEFSKRVILADANLDKVLSAYNKHRDKPIREQAENIIHLFTLTNLGAPAAFKYFDTTIDRKRYTSTKEVLDATLIHQSITGLYETRIDLSQLGGDGGPAPAPAPAPAPAPGGMDPLQLLQPLEAEIKGTKLKAHWNSGATITCVPQAFLEEEVPIKNIWIKTIHGEKEQPVYYLTFKIQGRKVEAEVISSPYDYILVSPSDIPWLMKKPLQLTTLVPLQEYEERLLKQTMLTGSYKEKLQSLFLKYDALWQHWENQVGHRRIKPHHIATGTVNPRPQKQYPINPKAKASIQTVINDLLKQGVLIQQNSIMNTPVYPVPKPDGKWRMVLDYREVNKTIPLIAAQNQHSAGILSSIFRGKYKTTLDLSNGFWAHSITPESYWLTAFTWLGQQYCWTRLPQGFLNSPALFNADVVDLLKEVPNVQVYVDDIYISHDDPREHLEQLEKVFSLLLNAGYVVSLKKSEIAQHEVEFLGFNITKEGRGLTETFKQKLLNITPPRDLKQLQSILGLLNFARNFIPNFSELVKPLYNIIATAPGKYITWTTDNSQQLQNIISMLNSAENLEERNPEVRLIMKVNTSPSAGYIRFYNEFAKRPIMYLNYVYTKAEVKFTNTEKLLTTIHKGLIKALDLGMGQEILVYSPIVSMTKIQKTPLPERKALPIRWITWMSYLEDPRIQFHYDKTLPELQQVPTVTDDIIAKIKHPSEFSMVFYTDGSAIKHPNVNKSHNAGMGIAQVQFKPEFTVINTWSIPLGDHTAQLAEVAAVEFACKKALKIDGPVLIVTDSFYVAESVNKELPYWQSNGFFNNKKKPLKHVSKWKSIADCIQLKPDIIIIHEKGHQPTASTFHTEGNNLADKLATQGSYVVNAGKRTADGSEFEKRTADGSEFESPKKKAKVE

SEQ ID NO: 6567 - protein, 2096 aa, synthetic construct; identical to SEQ ID NO: 4509

SEQ ID NO: 6568 - protein, 2098 aa, synthetic construct; identical to SEQ ID NO: 4510

SEQ ID NO: 6569 - protein, 2093 aa, synthetic construct
MPAAKRVKLDGGDKKYSIGLDIGTNSVGWAVITDEYKVPSKKFKVLGNTDRHSIKKNLIGALLFDSGETAEATRLKRTARRRYTRRKNRICYLQEIFSNEMAKVDDSFFHRLEESFLVEEDKKHERHPIFGNIVDEVAYHEKYPTIYHLRKKLVDSTDKADLRLIYLALAHMIKFRGHFLIEGDLNPDNSDVDKLFIQLVQTYNQLFEENPINASGVDAKAILSARLSKSRRLENLIAQLPGEKKNGLFGNLIALSLGLTPNFKSNFDLAEDAKLQLSKDTYDDDLDNLLAQIGDQYADLFLAAKNLSDAILLSDILRVNTEITKAPLSASMIKRYDEHHQDLTLLKALVRQQLPEKYKEIFFDQSKNGYAGYIDGGASQEEFYKFIKPILEKMDGTEELLVKLNREDLLRKQRTFDNGSIPHQIHLGELHAILRRQEDFYPFLKDNREKIEKILTFRIPYYVGPLARGNSRFAWMTRKSEETITPWNFEEVVDKGASAQSFIERMTNFDKNLPNEKVLPKHSLLYEYFTVYNELTKVKYVTEGMRKPAFLSGEQKKAIVDLLFKTNRKVTVKQLKEDYFKKIECFDSVEISGVEDRFNASLGTYHDLLKIIKDKDFLDNEENEDILEDIVLTLTLFEDREMIEERLKTYAHLFDDKVMKQLKRRRYTGWGRLSRKLINGIRDKQSGKTILDFLKSDGFANRNFMQLIHDDSLTFKEDIQKAQVSGQGDSLHEHIANLAGSPAIKKGILQTVKVVDELVKVMGRHKPENIVIEMARENQTTQKGQKNSRERMKRIEEGIKELGSQILKEHPVENTQLQNEKLYLYYLQNGRDMYVDQELDINRLSDYDVDHIVPQSFLKDDSIDNKVLTRSDKARGKSDNVPSEEVVKKMKNYWRQLLNAKLITQRKFDNLTKAERGGLSELDKAGFIKRQLVETRQITKHVAQILDSRMNTKYDENDKLIREVKVITLKSKLVSDFRKDFQFYKVREINNYHHAHDAYLNAVVGTALIKKYPKLESEFVYGDYKVYDVRKMIAKSEQEIGKATAKYFFYSNIMNFFKTEITLANGEIRKRPLIETNGETGEIVWDKGRDFATVRKVLSMPQVNIVKKTEVQTGGFSKESILPKRNSDKLIARKKDWDPKKYGGFDSPTVAYSVLVVAKVEKGKSKKLKSVKELLGITIMERSSFEKNPIDFLEAKGYKEVKKDLIIKLPKYSLFELENGRKRMLASAGELQKGNELALPSKYVNFLYLASHYEKLKGSPEDNEQKQLFVEQHKHYLDEIIEQISEFSKRVILADANLDKVLSAYNKHRDKPIREQAENIIHLFTLTNLGAPAAFKYFDTTIDRKRYTSTKEVLDATLIHQSITGLYETRIDLSQLGGDGGGGSGGGGGTAPLEEEYRLFLEAPIQNVTLLEQWKREIPKVWAEINPPGLASTQAPIHVQLLSTALPVRVRQYPITLEAKRSLRETIRKFRAAGILRPVHSPWNTPLLPVRKSGTSEYRMVQDLREVNKRVETIHPTVPNPYTLLSLLPPDRIWYSVLDLKDAFFCIPLAPESQLIFAFEWADAEEGESGQLTWTRLPQGFKNSPTLFNEALNRDLQGFRLDHPSVSLLQYVDDLLIAADTQAACLSATRDLLMTLAELGYRVSGKKAQLCQEEVTYLGFKIHKGSRSLSNSRTQAILQIPVPKTKRQVREFLGTIGYCRLWIPGFAELAQPLYAATRPGNDPLVWGEKEEEAFQSLKLALTQPPALALPSLDKPFQLFVEETSGAAKGVLTQALGPWKRPVAYLSKRLDPVAAGWPRCLRAIAAAALLTREASKLTFGQDIEITSSHNLESLLRSPPDKWLTNARITQYQVLLLDPPRVRFKQTAALNPATLLPETDDTLPIHHCLDTLDSLTSTRPDLTDQPLAQAEATLFTDGSSYIRDGKRYAGAAVVTLDSVIWAEPLPIGTSAQKAELIALTKALEWSKDKSVNIYTDSRYAFATLHVHGMIYRERGWLTAGGKAIKNAPEILALLTAVWLPKRVAVMHCKGHQKDDAPTSTGNRRADEVAREVAIRPLSTQATISAGKRTADGSEFEKRTADGSEFESPKKKAKVE

SEQ ID NO: 6570 - protein, 2082 aa, synthetic construct
MPAAKRVKLDGGDKKYSIGLDIGTNSVGWAVITDEYKVPSKKFKVLGNTDRHSIKKNLIGALLFDSGETAEATRLKRTARRRYTRRKNRICYLQEIFSNEMAKVDDSFFHRLEESFLVEEDKKHERHPIFGNIVDEVAYHEKYPTIYHLRKKLVDSTDKADLRLIYLALAHMIKFRGHFLIEGDLNPDNSDVDKLFIQLVQTYNQLFEENPINASGVDAKAILSARLSKSRRLENLIAQLPGEKKNGLFGNLIALSLGLTPNFKSNFDLAEDAKLQLSKDTYDDDLDNLLAQIGDQYADLFLAAKNLSDAILLSDILRVNTEITKAPLSASMIKRYDEHHQDLTLLKALVRQQLPEKYKEIFFDQSKNGYAGYIDGGASQEEFYKFIKPILEKMDGTEELLVKLNREDLLRKQRTFDNGSIPHQIHLGELHAILRRQEDFYPFLKDNREKIEKILTFRIPYYVGPLARGNSRFAWMTRKSEETITPWNFEEVVDKGASAQSFIERMTNFDKNLPNEKVLPKHSLLYEYFTVYNELTKVKYVTEGMRKPAFLSGEQKKAIVDLLFKTNRKVTVKQLKEDYFKKIECFDSVEISGVEDRFNASLGTYHDLLKIIKDKDFLDNEENEDILEDIVLTLTLFEDREMIEERLKTYAHLFDDKVMKQLKRRRYTGWGRLSRKLINGIRDKQSGKTILDFLKSDGFANRNFMQLIHDDSLTFKEDIQKAQVSGQGDSLHEHIANLAGSPAIKKGILQTVKVVDELVKVMGRHKPENIVIEMARENQTTQKGQKNSRERMKRIEEGIKELGSQILKEHPVENTQLQNEKLYLYYLQNGRDMYVDQELDINRLSDYDVDHIVPQSFLKDDSIDNKVLTRSDKARGKSDNVPSEEVVKKMKNYWRQLLNAKLITQRKFDNLTKAERGGLSELDKAGFIKRQLVETRQITKHVAQILDSRMNTKYDENDKLIREVKVITLKSKLVSDFRKDFQFYKVREINNYHHAHDAYLNAVVGTALIKKYPKLESEFVYGDYKVYDVRKMIAKSEQEIGKATAKYFFYSNIMNFFKTEITLANGEIRKRPLIETNGETGEIVWDKGRDFATVRKVLSMPQVNIVKKTEVQTGGFSKESILPKRNSDKLIARKKDWDPKKYGGFDSPTVAYSVLVVAKVEKGKSKKLKSVKELLGITIMERSSFEKNPIDFLEAKGYKEVKKDLIIKLPKYSLFELENGRKRMLASAGELQKGNELALPSKYVNFLYLASHYEKLKGSPEDNEQKQLFVEQHKHYLDEIIEQISEFSKRVILADANLDKVLSAYNKHRDKPIREQAENIIHLFTLTNLGAPAAFKYFDTTIDRKRYTSTKEVLDATLIHQSITGLYETRIDLSQLGGDGGGGSGGGGGVPWILKKPLELTIKLDLEEQQGTLLNNSILSKKGKEELKQLFEKYSALWQSWENQVGHRRIRPHKIATGTVKPTPQKQYHINPKAKPDIQIVINDLLKQGVLIQKESTMNTPVYPVPKPNGRWRMVLDYRAVNKVTPLIAVQNQHSYGILGSLFKGRYKTTIDLSNGFWAHPIVPEDYWITAFTWQGKQYCWTVLPQGFLNSPGLFTGDVVDLLQGIPNVEVYVDDVYISHDSEKEHLEYLDILFNRLKEAGYIISLKKSNIANSIVDFLGFQITNEGRGLTDTFKEKLENITAPTTLKQLQSILGLLNFARNFIPDFTELIAPLYALIPKSTKNYVPWQIEHSTTLETLITKLNGAEYLQGRKGDKTLIMKVNASYTTGYIRYYNEGEKKPISYVSIVFSKTELKFTELEKLLTTVHKGLLKALDLSMGQNIHVYSPIVSMQNIQKTPQTAKKALASRWLSWLSYLEDPRIRFFYDPQMPALKDLPAVDTGKDNKKHPSNFQHIFYTDGSAITSPTKEGHLNAGMGIVYFINKDGNLQKQQEWSISLGNHTAQFAEIAAFEFALKKCLPLGGNILVVTDSNYVAKAYNEELDVWASNGFVNNRKKPLKHISKWKSVADLKRLRPDVVVTHEPGHQKLDSSPHAYGNNLADQLATQASFKVHAGKRTADGSEFEKRTADGSEFESPKKKAKVE

SEQ ID NO: 6571 - protein, 2082 aa, synthetic construct
MPAAKRVKLDGGDKKYSIGLDIGTNSVGWAVITDEYKVPSKKFKVLGNTDRHSIKKNLIGALLFDSGETAEATRLKRTARRRYTRRKNRICYLQEIFSNEMAKVDDSFFHRLEESFLVEEDKKHERHPIFGNIVDEVAYHEKYPTIYHLRKKLVDSTDKADLRLIYLALAHMIKFRGHFLIEGDLNPDNSDVDKLFIQLVQTYNQLFEENPINASGVDAKAILSARLSKSRRLENLIAQLPGEKKNGLFGNLIALSLGLTPNFKSNFDLAEDAKLQLSKDTYDDDLDNLLAQIGDQYADLFLAAKNLSDAILLSDILRVNTEITKAPLSASMIKRYDEHHQDLTLLKALVRQQLPEKYKEIFFDQSKNGYAGYIDGGASQEEFYKFIKPILEKMDGTEELLVKLNREDLLRKQRTFDNGSIPHQIHLGELHAILRRQEDFYPFLKDNREKIEKILTFRIPYYVGPLARGNSRFAWMTRKSEETITPWNFEEVVDKGASAQSFIERMTNFDKNLPNEKVLPKHSLLYEYFTVYNELTKVKYVTEGMRKPAFLSGEQKKAIVDLLFKTNRKVTVKQLKEDYFKKIECFDSVEISGVEDRFNASLGTYHDLLKIIKDKDFLDNEENEDILEDIVLTLTLFEDREMIEERLKTYAHLFDDKVMKQLKRRRYTGWGRLSRKLINGIRDKQSGKTILDFLKSDGFANRNFMQLIHDDSLTFKEDIQKAQVSGQGDSLHEHIANLAGSPAIKKGILQTVKVVDELVKVMGRHKPENIVIEMARENQTTQKGQKNSRERMKRIEEGIKELGSQILKEHPVENTQLQNEKLYLYYLQNGRDMYVDQELDINRLSDYDVDHIVPQSFLKDDSIDNKVLTRSDKARGKSDNVPSEEVVKKMKNYWRQLLNAKLITQRKFDNLTKAERGGLSELDKAGFIKRQLVETRQITKHVAQILDSRMNTKYDENDKLIREVKVITLKSKLVSDFRKDFQFYKVREINNYHHAHDAYLNAVVGTALIKKYPKLESEFVYGDYKVYDVRKMIAKSEQEIGKATAKYFFYSNIMNFFKTEITLANGEIRKRPLIETNGETGEIVWDKGRDFATVRKVLSMPQVNIVKKTEVQTGGFSKESILPKRNSDKLIARKKDWDPKKYGGFDSPTVAYSVLVVAKVEKGKSKKLKSVKELLGITIMERSSFEKNPIDFLEAKGYKEVKKDLIIKLPKYSLFELENGRKRMLASAGELQKGNELALPSKYVNFLYLASHYEKLKGSPEDNEQKQLFVEQHKHYLDEIIEQISEFSKRVILADANLDKVLSAYNKHRDKPIREQAENIIHLFTLTNLGAPAAFKYFDTTIDRKRYTSTKEVLDATLIHQSITGLYETRIDLSQLGGDGGGGSGGGGGVPWILKKPLELTIKLDLEEQQGTLLNNSILSKKGKEELKQLFEKYSALWQSWENQVGHRRIRPHKIATGTVKPTPQKQYHINPKAKPDIQIVINDLLKQGVLIQKESTMNTPVYPVPKPNGRWRMVLDYRAVNKVTPLIAVQNQHSYGILGSLFKGRYKTTIDLSNGFWAHPIVPEDYWITAFTWQGKQYCWTVLPQGFLNSPGLFNGDVVDLLQGIPNVEVYVDDVYISHDSEKEHLEYLDILFNRLKEAGYIISLKKSNIANSIVDFLGFQITNEGRGLTDTFKEKLENITAPTTLKQLQSILGLLNFARNFIPDFTELIAPLYALIPKSPKNYVPWQIEHSTTLETLITKLNGAEYLQGRKGDKTLIMKVNASYTTGYIRYYNEGEKKPISYVSIVFSKTELKFTELEKLLTTVHKGLLKALDLSMGQNIHVYSPIVSMQNIQKTPQTAKKALASRWLSWLSYLEDPRIRFFYDPQMPALKDLPAVDTGKDNKKHPSNFQHIFYTDGSAITSPTKEGHLNAGMGIVYFINKDGNLQKQQEWSISLGNHTAQFAEIAAFEFALKKCLPLGGNILVVTDSNYVAKAYNEELDVWASNGFVNNRKKPLKHISKWKSVADLKRLRPDVVVTHEPGHQKLDSSPHAYGNNLADQLATQASFKVHAGKRTADGSEFEKRTADGSEFESPKKKAKVE

SEQ ID NO: 6572 - protein, 2090 aa, synthetic construct
MPAAKRVKLDGGDKKYSIGLDIGTNSVGWAVITDEYKVPSKKFKVLGNTDRHSIKKNLIGALLFDSGETAEATRLKRTARRRYTRRKNRICYLQEIFSNEMAKVDDSFFHRLEESFLVEEDKKHERHPIFGNIVDEVAYHEKYPTIYHLRKKLVDSTDKADLRLIYLALAHMIKFRGHFLIEGDLNPDNSDVDKLFIQLVQTYNQLFEENPINASGVDAKAILSARLSKSRRLENLIAQLPGEKKNGLFGNLIALSLGLTPNFKSNFDLAEDAKLQLSKDTYDDDLDNLLAQIGDQYADLFLAAKNLSDAILLSDILRVNTEITKAPLSASMIKRYDEHHQDLTLLKALVRQQLPEKYKEIFFDQSKNGYAGYIDGGASQEEFYKFIKPILEKMDGTEELLVKLNREDLLRKQRTFDNGSIPHQIHLGELHAILRRQEDFYPFLKDNREKIEKILTFRIPYYVGPLARGNSRFAWMTRKSEETITPWNFEEVVDKGASAQSFIERMTNFDKNLPNEKVLPKHSLLYEYFTVYNELTKVKYVTEGMRKPAFLSGEQKKAIVDLLFKTNRKVTVKQLKEDYFKKIECFDSVEISGVEDRFNASLGTYHDLLKIIKDKDFLDNEENEDILEDIVLTLTLFEDREMIEERLKTYAHLFDDKVMKQLKRRRYTGWGRLSRKLINGIRDKQSGKTILDFLKSDGFANRNFMQLIHDDSLTFKEDIQKAQVSGQGDSLHEHIANLAGSPAIKKGILQTVKVVDELVKVMGRHKPENIVIEMARENQTTQKGQKNSRERMKRIEEGIKELGSQILKEHPVENTQLQNEKLYLYYLQNGRDMYVDQELDINRLSDYDVDHIVPQSFLKDDSIDNKVLTRSDKARGKSDNVPSEEVVKKMKNYWRQLLNAKLITQRKFDNLTKAERGGLSELDKAGFIKRQLVETRQITKHVAQILDSRMNTKYDENDKLIREVKVITLKSKLVSDFRKDFQFYKVREINNYHHAHDAYLNAVVGTALIKKYPKLESEFVYGDYKVYDVRKMIAKSEQEIGKATAKYFFYSNIMNFFKTEITLANGEIRKRPLIETNGETGEIVWDKGRDFATVRKVLSMPQVNIVKKTEVQTGGFSKESILPKRNSDKLIARKKDWDPKKYGGFDSPTVAYSVLVVAKVEKGKSKKLKSVKELLGITIMERSSFEKNPIDFLEAKGYKEVKKDLIIKLPKYSLFELENGRKRMLASAGELQKGNELALPSKYVNFLYLASHYEKLKGSPEDNEQKQLFVEQHKHYLDEIIEQISEFSKRVILADANLDKVLSAYNKHRDKPIREQAENIIHLFTLTNLGAPAAFKYFDTTIDRKRYTSTKEVLDATLIHQSITGLYETRIDLSQLGGDGGGGSGGGGGTLQLEEEYRLFEPESTQKQEMDIWLKNFPQAWAETGGMGTAHCQAPVLIQLKATATPISIRQYPMPHEAYQGIKPHIRRMLDQGILKPCQSPWNTPLLPVKKPGTEDYRPVQDLREVNKRVEDIHPTVPNPYNLLSTLPPSHPWYTVLDLKDAFFCLRLHSESQLLFAFEWRDPEIGLSGQLTWTRLPQGFKNSPTLFNEALHSDLADFRVRYPALVLLQYVDDLLLAAATRTECLEGTKALLETLGNKGYRASAKKAQICLQEVTYLGYSLKDGQRWLTKARKEAILSIPVPKNSRQVREFLGKAGYCRLFIPGFAELAAPLYPLTRPGTLFQWGTEQQLAFEDIKKALLSSPALGLPDITKPFELFIDENSGFAKGVLVQKLGPWKRPVAYLSKKLDTVASGWPPCLRMVAAIAILVKDAGKLTLGQPLTILTSHPVEALVRQPPNKWLSNARMTHYQAMLLDAERVHFGPTVSLNPATLLPLPSGGNHHDCLQILAETHGTRPDLTDQPLPDADLTWYTDGSSFIRNGEREAGAAVTTESEVIWAAPLPPGTSAQRAELIALTQALKMAEGKKLTVYTDSRYAFATTHVHGEIYRRRGWLTSEGKEIKNKNEILALLEALFLPKRLSIIHCPGHQKGDSPQAKGNRLADDTAKKAATETHSSLTVLPAGKRTADGSEFEKRTADGSEFESPKKKAKVE

SEQ ID NO: 6573 - protein, 2082 aa, synthetic construct
MPAAKRVKLDGGDKKYSIGLDIGTNSVGWAVITDEYKVPSKKFKVLGNTDRHSIKKNLIGALLFDSGETAEATRLKRTARRRYTRRKNRICYLQEIFSNEMAKVDDSFFHRLEESFLVEEDKKHERHPIFGNIVDEVAYHEKYPTIYHLRKKLVDSTDKADLRLIYLALAHMIKFRGHFLIEGDLNPDNSDVDKLFIQLVQTYNQLFEENPINASGVDAKAILSARLSKSRRLENLIAQLPGEKKNGLFGNLIALSLGLTPNFKSNFDLAEDAKLQLSKDTYDDDLDNLLAQIGDQYADLFLAAKNLSDAILLSDILRVNTEITKAPLSASMIKRYDEHHQDLTLLKALVRQQLPEKYKEIFFDQSKNGYAGYIDGGASQEEFYKFIKPILEKMDGTEELLVKLNREDLLRKQRTFDNGSIPHQIHLGELHAILRRQEDFYPFLKDNREKIEKILTFRIPYYVGPLARGNSRFAWMTRKSEETITPWNFEEVVDKGASAQSFIERMTNFDKNLPNEKVLPKHSLLYEYFTVYNELTKVKYVTEGMRKPAFLSGEQKKAIVDLLFKTNRKVTVKQLKEDYFKKIECFDSVEISGVEDRFNASLGTYHDLLKIIKDKDFLDNEENEDILEDIVLTLTLFEDREMIEERLKTYAHLFDDKVMKQLKRRRYTGWGRLSRKLINGIRDKQSGKTILDFLKSDGFANRNFMQLIHDDSLTFKEDIQKAQVSGQGDSLHEHIANLAGSPAIKKGILQTVKVVDELVKVMGRHKPENIVIEMARENQTTQKGQKNSRERMKRIEEGIKELGSQILKEHPVENTQLQNEKLYLYYLQNGRDMYVDQELDINRLSDYDVDHIVPQSFLKDDSIDNKVLTRSDKARGKSDNVPSEEVVKKMKNYWRQLLNAKLITQRKFDNLTKAERGGLSELDKAGFIKRQLVETRQITKHVAQILDSRMNTKYDENDKLIREVKVITLKSKLVSDFRKDFQFYKVREINNYHHAHDAYLNAVVGTALIKKYPKLESEFVYGDYKVYDVRKMIAKSEQEIGKATAKYFFYSNIMNFFKTEITLANGEIRKRPLIETNGETGEIVWDKGRDFATVRKVLSMPQVNIVKKTEVQTGGFSKESILPKRNSDKLIARKKDWDPKKYGGFDSPTVAYSVLVVAKVEKGKSKKLKSVKELLGITIMERSSFEKNPIDFLEAKGYKEVKKDLIIKLPKYSLFELENGRKRMLASAGELQKGNELALPSKYVNFLYLASHYEKLKGSPEDNEQKQLFVEQHKHYLDEIIEQISEFSKRVILADANLDKVLSAYNKHRDKPIREQAENIIHLFTLTNLGAPAAFKYFDTTIDRKRYTSTKEVLDATLIHQSITGLYETRIDLSQLGGDGGGGSGGGGGVPWLTQQPLQLTILVPLQEYQEKILSKTALPEDQKQQLKTLFVKYDNLWQHWENQVGHRKIRPHNIATGDYPPRPQKQYPINPKAKPSIQIVIDDLLKQGVLTPQNSTMNTPVYPVPKPDGRWRMVLDYREVNKTIPLTAAQNQHSAGILATIVRQKYKTTLDLANGFWAHPITPESYWLTAFTWQGKQYCWTRLPQGFLNSPALFNADVVDLLKEIPNVQVYVDDIYLSHDDPKEHVQQLEKVFQILLQAGYVVSLKKSEIGQKTVEFLGFNITKEGRGLTDTFKTKLLNITPPKDLKQLQSILGLLNFARNFIPNFAELVQPLYNLIAPAKGKYIEWSEENTKQLNMVIEALNTASNLEERLPEQRLVIKVNTSPSAGYVRYYNETGKKPIMYLNYVFSKAELKFSMLEKLLTTMHKALIKAMDLAMGQEILVYSPIVSMTKIQKTPLPERKALPIRWITWMTYLEDPRIQFHYDKTLPELKHIPDVYTSSQSPVKHPSQYEGVFYTDGSAIKSPDPTKSNNAGMGIVHATYKPEYQVLNQWSIPLGNHTAQMAEIAAVEFACKKALKIPGPVLVITDSFYVAESANKELPYWKSNGFVNNKKKPLKHISKWKSIAECLSMKPDITIQHEKGISLQIPVFILKGNALADKLATQGSYVVNAGKRTADGSEFEKRTADGSEFESPKKKAKVE

SEQ ID NO: 6574 - protein, 2171 aa, synthetic construct
MPAAKRVKLDGGDKKYSIGLDIGTNSVGWAVITDEYKVPSKKFKVLGNTDRHSIKKNLIGALLFDSGETAEATRLKRTARRRYTRRKNRICYLQEIFSNEMAKVDDSFFHRLEESFLVEEDKKHERHPIFGNIVDEVAYHEKYPTIYHLRKKLVDSTDKADLRLIYLALAHMIKFRGHFLIEGDLNPDNSDVDKLFIQLVQTYNQLFEENPINASGVDAKAILSARLSKSRRLENLIAQLPGEKKNGLFGNLIALSLGLTPNFKSNFDLAEDAKLQLSKDTYDDDLDNLLAQIGDQYADLFLAAKNLSDAILLSDILRVNTEITKAPLSASMIKRYDEHHQDLTLLKALVRQQLPEKYKEIFFDQSKNGYAGYIDGGASQEEFYKFIKPILEKMDGTEELLVKLNREDLLRKQRTFDNGSIPHQIHLGELHAILRRQEDFYPFLKDNREKIEKILTFRIPYYVGPLARGNSRFAWMTRKSEETITPWNFEEVVDKGASAQSFIERMTNFDKNLPNEKVLPKHSLLYEYFTVYNELTKVKYVTEGMRKPAFLSGEQKKAIVDLLFKTNRKVTVKQLKEDYFKKIECFDSVEISGVEDRFNASLGTYHDLLKIIKDKDFLDNEENEDILEDIVLTLTLFEDREMIEERLKTYAHLFDDKVMKQLKRRRYTGWGRLSRKLINGIRDKQSGKTILDFLKSDGFANRNFMQLIHDDSLTFKEDIQKAQVSGQGDSLHEHIANLAGSPAIKKGILQTVKVVDELVKVMGRHKPENIVIEMARENQTTQKGQKNSRERMKRIEEGIKELGSQILKEHPVENTQLQNEKLYLYYLQNGRDMYVDQELDINRLSDYDVDHIVPQSFLKDDSIDNKVLTRSDKARGKSDNVPSEEVVKKMKNYWRQLLNAKLITQRKFDNLTKAERGGLSELDKAGFIKRQLVETRQITKHVAQILDSRMNTKYDENDKLIREVKVITLKSKLVSDFRKDFQFYKVREINNYHHAHDAYLNAVVGTALIKKYPKLESEFVYGDYKVYDVRKMIAKSEQEIGKATAKYFFYSNIMNFFKTEITLANGEIRKRPLIETNGETGEIVWDKGRDFATVRKVLSMPQVNIVKKTEVQTGGFSKESILPKRNSDKLIARKKDWDPKKYGGFDSPTVAYSVLVVAKVEKGKSKKLKSVKELLGITIMERSSFEKNPIDFLEAKGYKEVKKDLIIKLPKYSLFELENGRKRMLASAGELQKGNELALPSKYVNFLYLASHYEKLKGSPEDNEQKQLFVEQHKHYLDEIIEQISEFSKRVILADANLDKVLSAYNKHRDKPIREQAENIIHLFTLTNLGAPAAFKYFDTTIDRKRYTSTKEVLDATLIHQSITGLYETRIDLSQLGGDGGGGSGGGGGMNPLQLLQPLPAEIKGTKLLAHWNSGATITCIPESFLEDEQPIKKTLIKTIHGEKQQNVYYVTFKVKGRKVEAEVIASPYEYILLSPTDVPWLTQQPLQLTILVPLQEYQEKILSKTALPEDQKQQLKTLFVKYDNLWQHWENQVGHRKIRPHNIATGDYPPRPQKQYPINPKAKPSIQIVIDDLLKQGVLTPQNSTMNTPVYPVPKPDGRWRMVLDYREVNKTIPLTAAQNQHSAGILATIVRQKYKTTLDLANGFWAHPITPESYWLTAFTWQGKQYCWTRLPQGFLNSPALFNADVVDLLKEIPNVQVYVDDIYLSHDDPKEHVQQLEKVFQILLQAGYVVSLKKSEIGQKTVEFLGFNITKEGRGLTDTFKTKLLNITPPKDLKQLQSILGKLNFARNFIPNFAELVQPLYNLIAPAKGKYIEWSEENTKQLNMVIEALNTASNLEERLPEQRLVIKVNTSPSAGYVRYYNETGKKPIMYLNYVFSKAELKFSMLEKLLTTMHKALIKAMDLAMGQEILVYSPIVSMTKIQKTPLPERKALPIRWITWMTYLEDPRIQFHYDKTLPELKHIPDVYTSSQSPVKHPSQYEGVFYTDGSAIKSPDPTKSNNAGMGIVHATYKPEYQVLNQWSIPLGNHTAQMAEIAAVEFACKKALKIPGPVLVITDSFYVAESANKELPYWKSNGFVNNKKKPLKHISKWKSIAECLSMKPDITIQHEKGISLQIPVFILKGNALADKLATQGSYVVNAGKRTADGSEFEKRTADGSEFESPKKKAKVE

SEQ ID NO: 6575 - protein, 2213 aa, synthetic construct
MPAAKRVKLDGGDKKYSIGLDIGTNSVGWAVITDEYKVPSKKFKVLGNTDRHSIKKNLIGALLFDSGETAEATRLKRTARRRYTRRKNRICYLQEIFSNEMAKVDDSFFHRLEESFLVEEDKKHERHPIFGNIVDEVAYHEKYPTIYHLRKKLVDSTDKADLRLIYLALAHMIKFRGHFLIEGDLNPDNSDVDKLFIQLVQTYNQLFEENPINASGVDAKAILSARLSKSRRLENLIAQLPGEKKNGLFGNLIALSLGLTPNFKSNFDLAEDAKLQLSKDTYDDDLDNLLAQIGDQYADLFLAAKNLSDAILLSDILRVNTEITKAPLSASMIKRYDEHHQDLTLLKALVRQQLPEKYKEIFFDQSKNGYAGYIDGGASQEEFYKFIKPILEKMDGTEELLVKLNREDLLRKQRTFDNGSIPHQIHLGELHAILRRQEDFYPFLKDNREKIEKILTFRIPYYVGPLARGNSRFAWMTRKSEETITPWNFEEVVDKGASAQSFIERMTNFDKNLPNEKVLPKHSLLYEYFTVYNELTKVKYVTEGMRKPAFLSGEQKKAIVDLLFKTNRKVTVKQLKEDYFKKIECFDSVEISGVEDRFNASLGTYHDLLKIIKDKDFLDNEENEDILEDIVLTLTLFEDREMIEERLKTYAHLFDDKVMKQLKRRRYTGWGRLSRKLINGIRDKQSGKTILDFLKSDGFANRNFMQLIHDDSLTFKEDIQKAQVSGQGDSLHEHIANLAGSPAIKKGILQTVKVVDELVKVMGRHKPENIVIEMARENQTTQKGQKNSRERMKRIEEGIKELGSQILKEHPVENTQLQNEKLYLYYLQNGRDMYVDQELDINRLSDYDVDHIVPQSFLKDDSIDNKVLTRSDKARGKSDNVPSEEVVKKMKNYWRQLLNAKLITQRKFDNLTKAERGGLSELDKAGFIKRQLVETRQITKHVAQILDSRMNTKYDENDKLIREVKVITLKSKLVSDFRKDFQFYKVREINNYHHAHDAYLNAVVGTALIKKYPKLESEFVYGDYKVYDVRKMIAKSEQEIGKATAKYFFYSNIMNFFKTEITLANGEIRKRPLIETNGETGEIVWDKGRDFATVRKVLSMPQVNIVKKTEVQTGGFSKESILPKRNSDKLIARKKDWDPKKYGGFDSPTVAYSVLVVAKVEKGKSKKLKSVKELLGITIMERSSFEKNPIDFLEAKGYKEVKKDLIIKLPKYSLFELENGRKRMLASAGELQKGNELALPSKYVNFLYLASHYEKLKGSPEDNEQKQLFVEQHKHYLDEIIEQISEFSKRVILADANLDKVLSAYNKHRDKPIREQAENIIHLFTLTNLGAPAAFKYFDTTIDRKRYTSTKEVLDATLIHQSITGLYETRIDLSQLGGDGGGGSGGGGGTLGDQGSRGSDPLPEPRVTLTVEGIPTEFLVNTGAEHSVLTKPMGKMGSKRTVVAGATGSKVYPWTTKRLLKIGQKQVTHSFLVIPECPAPLLGRDLLTKLKAQIQFSTEGPQVTWEDRPAMCLVLNLEEEYRLHEKPVPPSIDPSWLQLFPMVWAEKAGMGLANQVPPVVVELKSDASPVAVRQYPMSKEAREGIRPHIQRFLDLGILVPCQSPWNTPLLPVKKPGTNDYRPVQDLREVNKRVQDIHPTVPNPYNLLSSLPPSHTWYSVLDLKDAFFCLKLHPNSQPLFAFEWRDPEKGNTGQLTWTRLPQGFKNSPTLFNEALHRDLASFRALNPQVVMLQYVDDLLVAAPTYRDCKEGTRRLLQELSKLGYRVSAKKAQLCREEVTYLGYLLKGGKRWLTPARKATVMKIPTPTTPRQVREFLGKAGFCRLFIPGFASLAAPLYPLTRPKVPFTWTEAHQEAFGRIKEALLSAPALALPDLTKPFALYVDEKEGVARGVLTQTLGPWRRPVAYLSKKLDPVASGWPTCLKAIAAVALLLKDADKLTLGQNVLVIAPHNLESIVRQPPDRWMTNARMTHYQSLLLNERVSFAPPAILNPATLLPVESDDTPIHICSEILAEETGTRPDLRDQPLPGVPAWYTDGSSFIMDGRRQAGAAIVDNKRTVWASNLPEGTSAQKAELIALTQALRLAEGKSINIYTDSRYAFATAHVHGAIYKQRGWLTSAGKDIKNKEEILALLEAIHLPKRVAIIHCPGHQRGTDPVATGNRKADEAAKQAAQSTRILTETTKNAGKRTADGSEFEKRTADGSEFESPKKKAKVE

SEQ ID NO: 6576 - protein, 2091 aa, synthetic construct
MPAAKRVKLDGGDKKYSIGLDIGTNSVGWAVITDEYKVPSKKFKVLGNTDRHSIKKNLIGALLFDSGETAEATRLKRTARRRYTRRKNRICYLQEIFSNEMAKVDDSFFHRLEESFLVEEDKKHERHPIFGNIVDEVAYHEKYPTIYHLRKKLVDSTDKADLRLIYLALAHMIKFRGHFLIEGDLNPDNSDVDKLFIQLVQTYNQLFEENPINASGVDAKAILSARLSKSRRLENLIAQLPGEKKNGLFGNLIALSLGLTPNFKSNFDLAEDAKLQLSKDTYDDDLDNLLAQIGDQYADLFLAAKNLSDAILLSDILRVNTEITKAPLSASMIKRYDEHHQDLTLLKALVRQQLPEKYKEIFFDQSKNGYAGYIDGGASQEEFYKFIKPILEKMDGTEELLVKLNREDLLRKQRTFDNGSIPHQIHLGELHAILRRQEDFYPFLKDNREKIEKILTFRIPYYVGPLARGNSRFAWMTRKSEETITPWNFEEVVDKGASAQSFIERMTNFDKNLPNEKVLPKHSLLYEYFTVYNELTKVKYVTEGMRKPAFLSGEQKKAIVDLLFKTNRKVTVKQLKEDYFKKIECFDSVEISGVEDRFNASLGTYHDLLKIIKDKDFLDNEENEDILEDIVLTLTLFEDREMIEERLKTYAHLFDDKVMKQLKRRRYTGWGRLSRKLINGIRDKQSGKTILDFLKSDGFANRNFMQLIHDDSLTFKEDIQKAQVSGQGDSLHEHIANLAGSPAIKKGILQTVKVVDELVKVMGRHKPENIVIEMARENQTTQKGQKNSRERMKRIEEGIKELGSQILKEHPVENTQLQNEKLYLYYLQNGRDMYVDQELDINRLSDYDVDHIVPQSFLKDDSIDNKVLTRSDKARGKSDNVPSEEVVKKMKNYWRQLLNAKLITQRKFDNLTKAERGGLSELDKAGFIKRQLVETRQITKHVAQILDSRMNTKYDENDKLIREVKVITLKSKLVSDFRKDFQFYKVREINNYHHAHDAYLNAVVGTALIKKYPKLESEFVYGDYKVYDVRKMIAKSEQEIGKATAKYFFYSNIMNFFKTEITLANGEIRKRPLIETNGETGEIVWDKGRDFATVRKVLSMPQVNIVKKTEVQTGGFSKESILPKRNSDKLIARKKDWDPKKYGGFDSPTVAYSVLVVAKVEKGKSKKLKSVKELLGITIMERSSFEKNPIDFLEAKGYKEVKKDLIIKLPKYSLFELENGRKRMLASAGELQKGNELALPSKYVNFLYLASHYEKLKGSPEDNEQKQLFVEQHKHYLDEIIEQISEFSKRVILADANLDKVLSAYNKHRDKPIREQAENIIHLFTLTNLGAPAAFKYFDTTIDRKRYTSTKEVLDATLIHQSITGLYETRIDLSQLGGDGGGGSGGGGGTLNLEDEYRLYETSAEPEVSPGSTWLSDFPQAWAETGGMGLAVRQAPLIIPLKATSTPVSIKQYPMSQEAKLGIKPHIQRLLDQGILVPCQSPWNTPLLPVKKPGTNDYRPVQDLREVNKRVEDIHPTVPNPYNLLSGLPPSHRWYTVLDLKDAFFCLRLHPTSQPLFAFEWRDPGMGISGQLTWTRLPQGFKNSPTLFNEALHRDLADFRIQHPDLILLQYVDDILLAATSELDCQQGTRALLLTLGNLGYRASAKKAQLCQKQVKYLGYLLKEGQRWLTEARKETVMGQPTPKTPRQLREFLGTAGFCRLWIPGFAEMAAPLYPLTKPGTLFNWGPDQQKAYQEIKQALLTAPALGLPDLTKPFELFVDEKQGYAKGVLTQKLGPWRRPVAYLSKKLDPVAAGWPPCLRMVAAIAVLRKDAGKLTMGQPLVILAPHAVEALVKQPPDRWLSNARMTHYQAMLLDTDRVQFGPVVALNPATLLPLPEEGAPHDCLEILAETHGTRPDLTDQPIPDADHTWYTDGSSFLQEGQRKAGAAVTTETEVIWARALPAGTSAQRAELIALTQALKMAEGKRLNVYTDSRYAFATAHIHGEIYRRRGWLTSEGREIKNKSEILALLKALFLPKRLSIIHCLGHQKGDSAEARGNRLADQAAREAAIKTPPDTSTLLAGKRTADGSEFEKRTADGSEFESPKKKAKVE

SEQ ID NO: 6577 - protein, 2091 aa, synthetic construct
MPAAKRVKLDGGDKKYSIGLDIGTNSVGWAVITDEYKVPSKKFKVLGNTDRHSIKKNLIGALLFDSGETAEATRLKRTARRRYTRRKNRICYLQEIFSNEMAKVDDSFFHRLEESFLVEEDKKHERHPIFGNIVDEVAYHEKYPTIYHLRKKLVDSTDKADLRLIYLALAHMIKFRGHFLIEGDLNPDNSDVDKLFIQLVQTYNQLFEENPINASGVDAKAILSARLSKSRRLENLIAQLPGEKKNGLFGNLIALSLGLTPNFKSNFDLAEDAKLQLSKDTYDDDLDNLLAQIGDQYADLFLAAKNLSDAILLSDILRVNTEITKAPLSASMIKRYDEHHQDLTLLKALVRQQLPEKYKEIFFDQSKNGYAGYIDGGASQEEFYKFIKPILEKMDGTEELLVKLNREDLLRKQRTFDNGSIPHQIHLGELHAILRRQEDFYPFLKDNREKIEKILTFRIPYYVGPLARGNSRFAWMTRKSEETITPWNFEEVVDKGASAQSFIERMTNFDKNLPNEKVLPKHSLLYEYFTVYNELTKVKYVTEGMRKPAFLSGEQKKAIVDLLFKTNRKVTVKQLKEDYFKKIECFDSVEISGVEDRFNASLGTYHDLLKIIKDKDFLDNEENEDILEDIVLTLTLFEDREMIEERLKTYAHLFDDKVMKQLKRRRYTGWGRLSRKLINGIRDKQSGKTILDFLKSDGFANRNFMQLIHDDSLTFKEDIQKAQVSGQGDSLHEHIANLAGSPAIKKGILQTVKVVDELVKVMGRHKPENIVIEMARENQTTQKGQKNSRERMKRIEEGIKELGSQILKEHPVENTQLQNEKLYLYYLQNGRDMYVDQELDINRLSDYDVDHIVPQSFLKDDSIDNKVLTRSDKARGKSDNVPSEEVVKKMKNYWRQLLNAKLITQRKFDNLTKAERGGLSELDKAGFIKRQLVETRQITKHVAQILDSRMNTKYDENDKLIREVKVITLKSKLVSDFRKDFQFYKVREINNYHHAHDAYLNAVVGTALIKKYPKLESEFVYGDYKVYDVRKMIAKSEQEIGKATAKYFFYSNIMNFFKTEITLANGEIRKRPLIETNGETGEIVWDKGRDFATVRKVLSMPQVNIVKKTEVQTGGFSKESILPKRNSDKLIARKKDWDPKKYGGFDSPTVAYSVLVVAKVEKGKSKKLKSVKELLGITIMERSSFEKNPIDFLEAKGYKEVKKDLIIKLPKYSLFELENGRKRMLASAGELQKGNELALPSKYVNFLYLASHYEKLKGSPEDNEQKQLFVEQHKHYLDEIIEQISEFSKRVILADANLDKVLSAYNKHRDKPIREQAENIIHLFTLTNLGAPAAFKYFDTTIDRKRYTSTKEVLDATLIHQSITGLYETRIDLSQLGGDGGGGSGGGGGTLGIEDEYRLHETSTEPDVSLGSTWLSDFPQAWAETGGMGLAVRQAPLIIPLKATSTPVSIQQYPMSHEARLGIKPHIQRLLDQGILVPCQSPWNTPLLPVKKPGTNDYRPVQDLREVNKRVEDIHPTVPNPYNLLSGLPPSHQWYTVLDLKDAFFCLRLHPTSQPLFAFEWRDPGMGISGQLTWTRLPQGFKNSPTLFNEALHRDLADFRIQHPDLILLQYVDDILLAATSELDCQQGTRALLQTLGDLGYRASAKKAQICQKQVKYLGYLLREGQRWLTEARKETVMGQPVPKTPRQLREFLGTAGFCRLWIPGFAEMAAPLYPLTKPGTLFSWGPDQQKAYQEIKQALLTAPALGLPDLTKPFELFVDEKQGYAKGVLTQKLGPWRRPVAYLSKKLDPVAAGWPPCLRMVAAIAVLTKDAGKLTMGQPLVILAPHAVEALVKQPPDRWLSNARMTHYQAMLLDTDRVQFGPVVALNPATLLPLPEEGAPHDCLEILAETHGTRPDLTDQPIPDADHTWYTDGSSFLQEGQRKAGAAVTTETEVIWAGALPAGTSAQRAELIALTQALKMAEGKRLNVYTDSRYAFATAHIHGEIYRRRGWLTSEGREIKNKSEILALLKALFLPKRLSIIHCLGHQKGDSAEARGNRLADQAAREAAIKTPPDTSTLLAGKRTADGSEFEKRTADGSEFESPKKKAKVE

SEQ ID NO: 6578 - protein, 2091 aa, synthetic construct
MPAAKRVKLDGGDKKYSIGLDIGTNSVGWAVITDEYKVPSKKFKVLGNTDRHSIKKNLIGALLFDSGETAEATRLKRTARRRYTRRKNRICYLQEIFSNEMAKVDDSFFHRLEESFLVEEDKKHERHPIFGNIVDEVAYHEKYPTIYHLRKKLVDSTDKADLRLIYLALAHMIKFRGHFLIEGDLNPDNSDVDKLFIQLVQTYNQLFEENPINASGVDAKAILSARLSKSRRLENLIAQLPGEKKNGLFGNLIALSLGLTPNFKSNFDLAEDAKLQLSKDTYDDDLDNLLAQIGDQYADLFLAAKNLSDAILLSDILRVNTEITKAPLSASMIKRYDEHHQDLTLLKALVRQQLPEKYKEIFFDQSKNGYAGYIDGGASQEEFYKFIKPILEKMDGTEELLVKLNREDLLRKQRTFDNGSIPHQIHLGELHAILRRQEDFYPFLKDNREKIEKILTFRIPYYVGPLARGNSRFAWMTRKSEETITPWNFEEVVDKGASAQSFIERMTNFDKNLPNEKVLPKHSLLYEYFTVYNELTKVKYVTEGMRKPAFLSGEQKKAIVDLLFKTNRKVTVKQLKEDYFKKIECFDSVEISGVEDRFNASLGTYHDLLKIIKDKDFLDNEENEDILEDIVLTLTLFEDREMIEERLKTYAHLFDDKVMKQLKRRRYTGWGRLSRKLINGIRDKQSGKTILDFLKSDGFANRNFMQLIHDDSLTFKEDIQKAQVSGQGDSLHEHIANLAGSPAIKKGILQTVKVVDELVKVMGRHKPENIVIEMARENQTTQKGQKNSRERMKRIEEGIKELGSQILKEHPVENTQLQNEKLYLYYLQNGRDMYVDQELDINRLSDYDVDHIVPQSFLKDDSIDNKVLTRSDKARGKSDNVPSEEVVKKMKNYWRQLLNAKLITQRKFDNLTKAERGGLSELDKAGFIKRQLVETRQITKHVAQILDSRMNTKYDENDKLIREVKVITLKSKLVSDFRKDFQFYKVREINNYHHAHDAYLNAVVGTALIKKYPKLESEFVYGDYKVYDVRKMIAKSEQEIGKATAKYFFYSNIMNFFKTEITLANGEIRKRPLIETNGETGEIVWDKGRDFATVRKVLSMPQVNIVKKTEVQTGGFSKESILPKRNSDKLIARKKDWDPKKYGGFDSPTVAYSVLVVAKVEKGKSKKLKSVKELLGITIMERSSFEKNPIDFLEAKGYKEVKKDLIIKLPKYSLFELENGRKRMLASAGELQKGNELALPSKYVNFLYLASHYEKLKGSPEDNEQKQLFVEQHKHYLDEIIEQISEFSKRVILADANLDKVLSAYNKHRDKPIREQAENIIHLFTLTNLGAPAAFKYFDTTIDRKRYTSTKEVLDATLIHQSITGLYETRIDLSQLGGDGGGGSGGGGGTLNIEDEHRLHETSKEPDVSLGSTWLSDFPQAWAETGGMGLAVRQAPLIIPLKATSTPVSIKQYPMSQEARLGIKPHIQRLLDQGILVPCQSPWNTPLLPVKKPGTNDYRPVQDLREVNKRVEDIHPTVPNPYNLLSGLPPSHQWYTVLDLKDAFFCLRLHPTSQPLFAFEWRDPEMGISGQLTWTRLPQGFKNSPTLFNEALHRDLADFRIQHPDLILLQYVDDLLLAATSELDCQQGTRALLQTLGNLGYRASAKKAQICQKQVKYLGYLLKEGQRWLTEARKETVMGQPTPKTPRQLREFLGTAGFCRLWIPGFAEMAAPLYPLTKPGTLFNWGPDQQKAYQEIKQALLTAPALGLPDLTKPFELFVDEKQGYAKGVLTQKLGPWRRPVAYLSKKLDPVAAGWPPCLRMVAAIAVLTKDAGKLTMGQPLVILAPHAVEALVKQPPDRWLSNARMTHYQALLLDTDRVQFGPVVALNPATLLPLPEEGLQHNCLDILAEAHGTRPDLTDQPLPDADHTWYTDGSSLLQEGQRKAGAAVTTETEVIWAKALPAGTSAQRAELIALTQALKMAEGKKLNVYTDSRYAFATAHIHGEIYRRRGWLTSEGKEIKNKDEILALLKALFLPKRLSIIHCPGHQKGHSAEARGNRMADQAARKAAITETPDTSTLLAGKRTADGSEFEKRTADGSEFESPKKKAKVE

SEQ ID NO: 6579 - protein, 2091 aa, synthetic construct; identical to SEQ ID NO: 6578

SEQ ID NO: 6580 - protein, 2082 aa, synthetic construct
MPAAKRVKLDGGDKKYSIGLDIGTNSVGWAVITDEYKVPSKKFKVLGNTDRHSIKKNLIGALLFDSGETAEATRLKRTARRRYTRRKNRICYLQEIFSNEMAKVDDSFFHRLEESFLVEEDKKHERHPIFGNIVDEVAYHEKYPTIYHLRKKLVDSTDKADLRLIYLALAHMIKFRGHFLIEGDLNPDNSDVDKLFIQLVQTYNQLFEENPINASGVDAKAILSARLSKSRRLENLIAQLPGEKKNGLFGNLIALSLGLTPNFKSNFDLAEDAKLQLSKDTYDDDLDNLLAQIGDQYADLFLAAKNLSDAILLSDILRVNTEITKAPLSASMIKRYDEHHQDLTLLKALVRQQLPEKYKEIFFDQSKNGYAGYIDGGASQEEFYKFIKPILEKMDGTEELLVKLNREDLLRKQRTFDNGSIPHQIHLGELHAILRRQEDFYPFLKDNREKIEKILTFRIPYYVGPLARGNSRFAWMTRKSEETITPWNFEEVVDKGASAQSFIERMTNFDKNLPNEKVLPKHSLLYEYFTVYNELTKVKYVTEGMRKPAFLSGEQKKAIVDLLFKTNRKVTVKQLKEDYFKKIECFDSVEISGVEDRFNASLGTYHDLLKIIKDKDFLDNEENEDILEDIVLTLTLFEDREMIEERLKTYAHLFDDKVMKQLKRRRYTGWGRLSRKLINGIRDKQSGKTILDFLKSDGFANRNFMQLIHDDSLTFKEDIQKAQVSGQGDSLHEHIANLAGSPAIKKGILQTVKVVDELVKVMGRHKPENIVIEMARENQTTQKGQKNSRERMKRIEEGIKELGSQILKEHPVENTQLQNEKLYLYYLQNGRDMYVDQELDINRLSDYDVDHIVPQSFLKDDSIDNKVLTRSDKARGKSDNVPSEEVVKKMKNYWRQLLNAKLITQRKFDNLTKAERGGLSELDKAGFIKRQLVETRQITKHVAQILDSRMNTKYDENDKLIREVKVITLKSKLVSDFRKDFQFYKVREINNYHHAHDAYLNAVVGTALIKKYPKLESEFVYGDYKVYDVRKMIAKSEQEIGKATAKYFFYSNIMNFFKTEITLANGEIRKRPLIETNGETGEIVWDKGRDFATVRKVLSMPQVNIVKKTEVQTGGFSKESILPKRNSDKLIARKKDWDPKKYGGFDSPTVAYSVLVVAKVEKGKSKKLKSVKELLGITIMERSSFEKNPIDFLEAKGYKEVKKDLIIKLPKYSLFELENGRKRMLASAGELQKGNELALPSKYVNFLYLASHYEKLKGSPEDNEQKQLFVEQHKHYLDEIIEQISEFSKRVILADANLDKVLSAYNKHRDKPIREQAENIIHLFTLTNLGAPAAFKYFDTTIDRKRYTSTKEVLDATLIHQSITGLYETRIDLSQLGGDGGGGSGGGGGIPWLMKKPLQLTTLVPLQEYEERLLKQTMLTGSYKEKLQSLFLKYDALWQHWENQVGHRRIKPHHIATGTVNPRPQKQYPINPKAKASIQTVINDLLKQGVLIQQNSIMNTPVYPVPKPDGKWRMVLDYREVNKTIPLIAAQNQHSAGILSSIFRGKYKTTLDLSNGFWAHSITPESYWLTAFTWLGQQYCWTRLPQGFLNSPALFNADVVDLLKEVPNVQVYVDDIYISHDDPREHLEQLEKVFSLLLNAGYVVSLKKSEIAQHEVEFLGFNITKEGRGLTETFKQKLLNITPPRDLKQLQSILGLLNFARNFIPNFSELVKPLYNIIATAPGKYITWTTDNSQQLQNIISMLNSAENLEERNPEVRLIMKVNTSPSAGYIRFYNEFAKRPIMYLNYVYTKAEVKFTNTEKLLTTIHKGLIKALDLGMGQEILVYSPIVSMTKIQKTPLPERKALPIRWITWMSYLEDPRIQFHYDKTLPELQQVPTVTDDIIAKIKHPSEFSMVFYTDGSAIKHPNVNKSHNAGMGIAQVQFKPEFTVINTWSIPLGDHTAQLAEVAAVEFACKKALKIDGPVLIVTDSFYVAESVNKELPYWQSNGFFNNKKKPLKHVSKWKSIADCIQLKPDIIIIHEKGHQPTASTFHTEGNNLADKLATQGSYVVNAGKRTADGSEFEKRTADGSEFESPKKKAKVE

SEQ ID NO: 6581 - protein, 2089 aa, synthetic construct
MPAAKRVKLDGGDKKYSIGLDIGTNSVGWAVITDEYKVPSKKFKVLGNTDRHSIKKNLIGALLFDSGETAEATRLKRTARRRYTRRKNRICYLQEIFSNEMAKVDDSFFHRLEESFLVEEDKKHERHPIFGNIVDEVAYHEKYPTIYHLRKKLVDSTDKADLRLIYLALAHMIKFRGHFLIEGDLNPDNSDVDKLFIQLVQTYNQLFEENPINASGVDAKAILSARLSKSRRLENLIAQLPGEKKNGLFGNLIALSLGLTPNFKSNFDLAEDAKLQLSKDTYDDDLDNLLAQIGDQYADLFLAAKNLSDAILLSDILRVNTEITKAPLSASMIKRYDEHHQDLTLLKALVRQQLPEKYKEIFFDQSKNGYAGYIDGGASQEEFYKFIKPILEKMDGTEELLVKLNREDLLRKQRTFDNGSIPHQIHLGELHAILRRQEDFYPFLKDNREKIEKILTFRIPYYVGPLARGNSRFAWMTRKSEETITPWNFEEVVDKGASAQSFIERMTNFDKNLPNEKVLPKHSLLYEYFTVYNELTKVKYVTEGMRKPAFLSGEQKKAIVDLLFKTNRKVTVKQLKEDYFKKIECFDSVEISGVEDRFNASLGTYHDLLKIIKDKDFLDNEENEDILEDIVLTLTLFEDREMIEERLKTYAHLFDDKVMKQLKRRRYTGWGRLSRKLINGIRDKQSGKTILDFLKSDGFANRNFMQLIHDDSLTFKEDIQKAQVSGQGDSLHEHIANLAGSPAIKKGILQTVKVVDELVKVMGRHKPENIVIEMARENQTTQKGQKNSRERMKRIEEGIKELGSQILKEHPVENTQLQNEKLYLYYLQNGRDMYVDQELDINRLSDYDVDHIVPQSFLKDDSIDNKVLTRSDKARGKSDNVPSEEVVKKMKNYWRQLLNAKLITQRKFDNLTKAERGGLSELDKAGFIKRQLVETRQITKHVAQILDSRMNTKYDENDKLIREVKVITLKSKLVSDFRKDFQFYKVREINNYHHAHDAYLNAVVGTALIKKYPKLESEFVYGDYKVYDVRKMIAKSEQEIGKATAKYFFYSNIMNFFKTEITLANGEIRKRPLIETNGETGEIVWDKGRDFATVRKVLSMPQVNIVKKTEVQTGGFSKESILPKRNSDKLIARKKDWDPKKYGGFDSPTVAYSVLVVAKVEKGKSKKLKSVKELLGITIMERSSFEKNPIDFLEAKGYKEVKKDLIIKLPKYSLFELENGRKRMLASAGELQKGNELALPSKYVNFLYLASHYEKLKGSPEDNEQKQLFVEQHKHYLDEIIEQISEFSKRVILADANLDKVLSAYNKHRDKPIREQAENIIHLFTLTNLGAPAAFKYFDTTIDRKRYTSTKEVLDATLIHQSITGLYETRIDLSQLGGDGGGGSGGGGGVLNLEEEYRLHEKPVPSSIDPSWLQLFPTVWAERAGMGLANQVPPVVVELRSGASPVAVRQYPMSKEAREGIRPHIQRFLDLGVLVPCQSPWNTPLLPVKKPGTNDYRPVQDLREINKRVQDIHPTVPNPYNLLSSLPPSHTWYSVLDLKDAFFCLKLHPNSQPLFAFEWRDPEKGNTGQLTWTRLPQGFKNSPTLFNEALHRDLAPFRALNPQVVLLQYVDDLLVAAPTYRDCKEGTQKLLQELSKLGYRVSAKKAQLCQKEVTYLGYLLKEGKRWLTPARKATVMKIPPPTTPRQVREFLGKAGFCRLFIPGFASLAAPLYPLTKPSIPFIWTEEHQKAFDRIKEALLSAPALALPDLTKPFTLYVDERAGVARGVLTQTLGPWRRPVAYLSKKLDPVASGWPTCLKAVAAVALLLKDADKLTLGQNVTVIASHSLESIVRQPPDRWMTNARMTHYQSLLLNERVSFAPPAVLNPATLLPVESEATPVHRCSEILAEETGTRRDLKDQPLPGVPAWYTDGSSFIAEGKRRAGAAIVDGKRTVWASSLPEGTSAQKAELVALTQALRLAEGKDINIYTDSRYAFATAHIHGAIYKQRGWLTSAGKDIKNKEEILALLEAIHLPKRVAIIHCPGHQKGNDPVATGNRRADEAAKQAALSTRVLAETTKPAGKRTADGSEFEKRTADGSEFESPKKKAKVE

SEQ ID NO: 6582 - protein, 2091 aa, synthetic construct
MPAAKRVKLDGGDKKYSIGLDIGTNSVGWAVITDEYKVPSKKFKVLGNTDRHSIKKNLIGALLFDSGETAEATRLKRTARRRYTRRKNRICYLQEIFSNEMAKVDDSFFHRLEESFLVEEDKKHERHPIFGNIVDEVAYHEKYPTIYHLRKKLVDSTDKADLRLIYLALAHMIKFRGHFLIEGDLNPDNSDVDKLFIQLVQTYNQLFEENPINASGVDAKAILSARLSKSRRLENLIAQLPGEKKNGLFGNLIALSLGLTPNFKSNFDLAEDAKLQLSKDTYDDDLDNLLAQIGDQYADLFLAAKNLSDAILLSDILRVNTEITKAPLSASMIKRYDEHHQDLTLLKALVRQQLPEKYKEIFFDQSKNGYAGYIDGGASQEEFYKFIKPILEKMDGTEELLVKLNREDLLRKQRTFDNGSIPHQIHLGELHAILRRQEDFYPFLKDNREKIEKILTFRIPYYVGPLARGNSRFAWMTRKSEETITPWNFEEVVDKGASAQSFIERMTNFDKNLPNEKVLPKHSLLYEYFTVYNELTKVKYVTEGMRKPAFLSGEQKKAIVDLLFKTNRKVTVKQLKEDYFKKIECFDSVEISGVEDRFNASLGTYHDLLKIIKDKDFLDNEENEDILEDIVLTLTLFEDREMIEERLKTYAHLFDDKVMKQLKRRRYTGWGRLSRKLINGIRDKQSGKTILDFLKSDGFANRNFMQLIHDDSLTFKEDIQKAQVSGQGDSLHEHIANLAGSPAIKKGILQTVKVVDELVKVMGRHKPENIVIEMARENQTTQKGQKNSRERMKRIEEGIKELGSQILKEHPVENTQLQNEKLYLYYLQNGRDMYVDQELDINRLSDYDVDHIVPQSFLKDDSIDNKVLTRSDKARGKSDNVPSEEVVKKMKNYWRQLLNAKLITQRKFDNLTKAERGGLSELDKAGFIKRQLVETRQITKHVAQILDSRMNTKYDENDKLIREVKVITLKSKLVSDFRKDFQFYKVREINNYHHAHDAYLNAVVGTALIKKYPKLESEFVYGDYKVYDVRKMIAKSEQEIGKATAKYFFYSNIMNFFKTEITLANGEIRKRPLIETNGETGEIVWDKGRDFATVRKVLSMPQVNIVKKTEVQTGGFSKESILPKRNSDKLIARKKDWDPKKYGGFDSPTVAYSVLVVAKVEKGKSKKLKSVKELLGITIMERSSFEKNPIDFLEAKGYKEVKKDLIIKLPKYSLFELENGRKRMLASAGELQKGNELALPSKYVNFLYLASHYEKLKGSPEDNEQKQLFVEQHKHYLDEIIEQISEFSKRVILADANLDKVLSAYNKHRDKPIREQAENIIHLFTLTNLGAPAAFKYFDTTIDRKRYTSTKEVLDATLIHQSITGLYETRIDLSQLGGDGGGGSGGGGGTLNIEDEYRLHETSKEPDVPLGSTWLSDFPQAWAETGGMGLAVRQAPLIIPLKATSTPVSIKQYPMSQEARLGIKPHIQRLLDQGILVPCQSPWNTPLLPVKKPGTNDYRPVQDLREVNKRVEDIHPTVPNPYNLLSGLPPSHQWYTVLDLKDAFFCLRLHPTSQPLFAFEWRDPEMGISGQLTWTRLPQGFKNSPTLFNEALHRDLADFRIQHPDLILLQYVDDLLLAATSEQDCQRGTRALLQTLGNLGYRASAKKAQICQKQVKYLGYLLKEGQRWLTEARKETVMGQPTPKTPRQLREFLGTAGFCRLWIPGFAEMAAPLYPLTKPGTLFNWGPDQQKAYQEIKQALLTAPALGLPDLTKPFELFVDEKQGYAKGVLTQKLGPWRRPVAYLSKKLDPVAAGWPPCLRMVAAIAVLTKDAGKLTMGQPLVILAPHAVEALVKQPPDRWLSNARMTHYQAMLLDTDRVQFGPVVALNPATLLPLPEKEAPHDCLEILAETHGTRPDLTDQPIPDADYTWYTDGSSFLQEGQRRAGAAVTTETEVIWARALPAGTSAQRAELIALTQALKMAEGKKLNVYTDSRYAFATAHVHGEIYRRRGWLTSEGREIKNKNEILALLKALFLPKRLSIIHCPGHQKGNSAEARGNRMADQAAREAAMKAVLETSTLLAGKRTADGSEFEKRTADGSEFESPKKKAKVE

SEQ ID NO: 6583 - protein, 2091 aa, synthetic construct
MPAAKRVKLDGGDKKYSIGLDIGTNSVGWAVITDEYKVPSKKFKVLGNTDRHSIKKNLIGALLFDSGETAEATRLKRTARRRYTRRKNRICYLQEIFSNEMAKVDDSFFHRLEESFLVEEDKKHERHPIFGNIVDEVAYHEKYPTIYHLRKKLVDSTDKADLRLIYLALAHMIKFRGHFLIEGDLNPDNSDVDKLFIQLVQTYNQLFEENPINASGVDAKAILSARLSKSRRLENLIAQLPGEKKNGLFGNLIALSLGLTPNFKSNFDLAEDAKLQLSKDTYDDDLDNLLAQIGDQYADLFLAAKNLSDAILLSDILRVNTEITKAPLSASMIKRYDEHHQDLTLLKALVRQQLPEKYKEIFFDQSKNGYAGYIDGGASQEEFYKFIKPILEKMDGTEELLVKLNREDLLRKQRTFDNGSIPHQIHLGELHAILRRQEDFYPFLKDNREKIEKILTFRIPYYVGPLARGNSRFAWMTRKSEETITPWNFEEVVDKGASAQSFIERMTNFDKNLPNEKVLPKHSLLYEYFTVYNELTKVKYVTEGMRKPAFLSGEQKKAIVDLLFKTNRKVTVKQLKEDYFKKIECFDSVEISGVEDRFNASLGTYHDLLKIIKDKDFLDNEENEDILEDIVLTLTLFEDREMIEERLKTYAHLFDDKVMKQLKRRRYTGWGRLSRKLINGIRDKQSGKTILDFLKSDGFANRNFMQLIHDDSLTFKEDIQKAQVSGQGDSLHEHIANLAGSPAIKKGILQTVKVVDELVKVMGRHKPENIVIEMARENQTTQKGQKNSRERMKRIEEGIKELGSQILKEHPVENTQLQNEKLYLYYLQNGRDMYVDQELDINRLSDYDVDHIVPQSFLKDDSIDNKVLTRSDKARGKSDNVPSEEVVKKMKNYWRQLLNAKLITQRKFDNLTKAERGGLSELDKAGFIKRQLVETRQITKHVAQILDSRMNTKYDENDKLIREVKVITLKSKLVSDFRKDFQFYKVREINNYHHAHDAYLNAVVGTALIKKYPKLESEFVYGDYKVYDVRKMIAKSEQEIGKATAKYFFYSNIMNFFKTEITLANGEIRKRPLIETNGETGEIVWDKGRDFATVRKVLSMPQVNIVKKTEVQTGGFSKESILPKRNSDKLIARKKDWDPKKYGGFDSPTVAYSVLVVAKVEKGKSKKLKSVKELLGITIMERSSFEKNPIDFLEAKGYKEVKKDLIIKLPKYSLFELENGRKRMLASAGELQKGNELALPSKYVNFLYLASHYEKLKGSPEDNEQKQLFVEQHKHYLDEIIEQISEFSKRVILADANLDKVLSAYNKHRDKPIREQAENIIHLFTLTNLGAPAAFKYFDTTIDRKRYTSTKEVLDATLIHQSITGLYETRIDLSQLGGDGGGGSGGGGGTLNIEDEYRLHETSKEPDVPLGSTWLSDFPQAWAETGGMGLAVRQAPLIIPLKATSTPVSIKQYPMSQEARLGIKPHIQRLLDQGILVPCQSPWNTPLLPVKKPGTNDYRPVQDLREVNKRVEDIHPTVPNPYNLLSGLPPSHQWYTVLDLKDAFFCLRLHPTSQPLFAFEWRDPEMGISGQLTWTRLPQGFKNSPTLFNEALHRDLADFRIQHPDLILLQYVDDLLLAATSEQDCQRGTRALLQTLGNLGYRASAKKAQICQKQVKYLGYLLKEGQRWLTEARKETVMGQPTPKTPRQLREFLGKAGFCRLFIPGFAEMAAPLYPLTKPGTLFNWGPDQQKAYQEIKQALLTAPALGLPDLTKPFELFVDEKQGYAKGVLTQKLGPWRRPVAYLSKKLDPVAAGWPPCLRMVAAIAVLTKDAGKLTMGQPLVILAPHAVEALVKQPPDRWLSNARMTHYQAMLLDTDRVQFGPVVALNPATLLPLPEKEAPHDCLEILAETHGTRPDLTDQPIPDADYTWYTDGSSFLQEGQRRAGAAVTTETEVIWARALPAGTSAQRAELIALTQALKMAEGKKLNVYTDSRYAFATAHVHGEIYRRRGWLTSEGREIKNKNEILALLKALFLPKRLSIIHCPGHQKGNSAEARGNRMADQAAREAAMKAVLETSTLLAGKRTADGSEFEKRTADGSEFESPKKKAKVE

SEQ ID NO: 6584 - protein, 2093 aa, synthetic construct
MPAAKRVKLDGGDKKYSIGLDIGTNSVGWAVITDEYKVPSKKFKVLGNTDRHSIKKNLIGALLFDSGETAEATRLKRTARRRYTRRKNRICYLQEIFSNEMAKVDDSFFHRLEESFLVEEDKKHERHPIFGNIVDEVAYHEKYPTIYHLRKKLVDSTDKADLRLIYLALAHMIKFRGHFLIEGDLNPDNSDVDKLFIQLVQTYNQLFEENPINASGVDAKAILSARLSKSRRLENLIAQLPGEKKNGLFGNLIALSLGLTPNFKSNFDLAEDAKLQLSKDTYDDDLDNLLAQIGDQYADLFLAAKNLSDAILLSDILRVNTEITKAPLSASMIKRYDEHHQDLTLLKALVRQQLPEKYKEIFFDQSKNGYAGYIDGGASQEEFYKFIKPILEKMDGTEELLVKLNREDLLRKQRTFDNGSIPHQIHLGELHAILRRQEDFYPFLKDNREKIEKILTFRIPYYVGPLARGNSRFAWMTRKSEETITPWNFEEVVDKGASAQSFIERMTNFDKNLPNEKVLPKHSLLYEYFTVYNELTKVKYVTEGMRKPAFLSGEQKKAIVDLLFKTNRKVTVKQLKEDYFKKIECFDSVEISGVEDRFNASLGTYHDLLKIIKDKDFLDNEENEDILEDIVLTLTLFEDREMIEERLKTYAHLFDDKVMKQLKRRRYTGWGRLSRKLINGIRDKQSGKTILDFLKSDGFANRNFMQLIHDDSLTFKEDIQKAQVSGQGDSLHEHIANLAGSPAIKKGILQTVKVVDELVKVMGRHKPENIVIEMARENQTTQKGQKNSRERMKRIEEGIKELGSQILKEHPVENTQLQNEKLYLYYLQNGRDMYVDQELDINRLSDYDVDHIVPQSFLKDDSIDNKVLTRSDKARGKSDNVPSEEVVKKMKNYWRQLLNAKLITQRKFDNLTKAERGGLSELDKAGFIKRQLVETRQITKHVAQILDSRMNTKYDENDKLIREVKVITLKSKLVSDFRKDFQFYKVREINNYHHAHDAYLNAVVGTALIKKYPKLESEFVYGDYKVYDVRKMIAKSEQEIGKATAKYFFYSNIMNFFKTEITLANGEIRKRPLIETNGETGEIVWDKGRDFATVRKVLSMPQVNIVKKTEVQTGGFSKESILPKRNSDKLIARKKDWDPKKYGGFDSPTVAYSVLVVAKVEKGKSKKLKSVKELLGITIMERSSFEKNPIDFLEAKGYKEVKKDLIIKLPKYSLFELENGRKRMLASAGELQKGNELALPSKYVNFLYLASHYEKLKGSPEDNEQKQLFVEQHKHYLDEIIEQISEFSKRVILADANLDKVLSAYNKHRDKPIREQAENIIHLFTLTNLGAPAAFKYFDTTIDRKRYTSTKEVLDATLIHQSITGLYETRIDLSQLGGDGGGGGGGSGGTAPLEEEYRLFLEAPIQNVTLLEQWKREIPKVWAEINPPGLASTQAPIHVQLLSTALPVRVRQYPITLEAKRSLRETIRKFRAAGILRPVHSPWNTPLLPVRKSGTSEYRMVQDLREVNKRVETIHPTVPNPYTLLSLLPPDRIWYSVLDLKDAFFCIPLAPESQLIFAFEWADAEEGESGQLTWTRLPQGFKNSPTLFNEALNRDLQGFRLDHPSVSLLQYVDDLLIAADTQAACLSATRDLLMTLAELGYRVSGKKAQLCQEEVTYLGFKIHKGSRSLSNSRTQAILQIPVPKTKRQVREFLGTIGYCRLWIPGFAELAQPLYAATRPGNDPLVWGEKEEEAFQSLKLALTQPPALALPSLDKPFQLFVEETSGAAKGVLTQALGPWKRPVAYLSKRLDPVAAGWPRCLRAIAAAALLTREASKLTFGQDIEITSSHNLESLLRSPPDKWLTNARITQYQVLLLDPPRVRFKQTAALNPATLLPETDDTLPIHHCLDTLDSLTSTRPDLTDQPLAQAEATLFTDGSSYIRDGKRYAGAAVVTLDSVIWAEPLPIGTSAQKAELIALTKALEWSKDKSVNIYTDSRYAFATLHVHGMIYRERGWLTAGGKAIKNAPEILALLTAVWLPKRVAVMHCKGHQKDDAPTSTGNRRADEVAREVAIRPLSTQATISAGKRTADGSEFEKRTADGSEFESPKKKAKVE

SEQ ID NO: 6585 - protein, 2093 aa, synthetic construct
MPAAKRVKLDGGDKKYSIGLDIGTNSVGWAVITDEYKVPSKKFKVLGNTDRHSIKKNLIGALLFDSGETAEATRLKRTARRRYTRRKNRICYLQEIFSNEMAKVDDSFFHRLEESFLVEEDKKHERHPIFGNIVDEVAYHEKYPTIYHLRKKLVDSTDKADLRLIYLALAHMIKFRGHFLIEGDLNPDNSDVDKLFIQLVQTYNQLFEENPINASGVDAKAILSARLSKSRRLENLIAQLPGEKKNGLFGNLIALSLGLTPNFKSNFDLAEDAKLQLSKDTYDDDLDNLLAQIGDQYADLFLAAKNLSDAILLSDILRVNTEITKAPLSASMIKRYDEHHQDLTLLKALVRQQLPEKYKEIFFDQSKNGYAGYIDGGASQEEFYKFIKPILEKMDGTEELLVKLNREDLLRKQRTFDNGSIPHQIHLGELHAILRRQEDFYPFLKDNREKIEKILTFRIPYYVGPLARGNSRFAWMTRKSEETITPWNFEEVVDKGASAQSFIERMTNFDKNLPNEKVLPKHSLLYEYFTVYNELTKVKYVTEGMRKPAFLSGEQKKAIVDLLFKTNRKVTVKQLKEDYFKKIECFDSVEISGVEDRFNASLGTYHDLLKIIKDKDFLDNEENEDILEDIVLTLTLFEDREMIEERLKTYAHLFDDKVMKQLKRRRYTGWGRLSRKLINGIRDKQSGKTILDFLKSDGFANRNFMQLIHDDSLTFKEDIQKAQVSGQGDSLHEHIANLAGSPAIKKGILQTVKVVDELVKVMGRHKPENIVIEMARENQTTQKGQKNSRERMKRIEEGIKELGSQILKEHPVENTQLQNEKLYLYYLQNGRDMYVDQELDINRLSDYDVDHIVPQSFLKDDSIDNKVLTRSDKARGKSDNVPSEEVVKKMKNYWRQLLNAKLITQRKFDNLTKAERGGLSELDKAGFIKRQLVETRQITKHVAQILDSRMNTKYDENDKLIREVKVITLKSKLVSDFRKDFQFYKVREINNYHHAHDAYLNAVVGTALIKKYPKLESEFVYGDYKVYDVRKMIAKSEQEIGKATAKYFFYSNIMNFFKTEITLANGEIRKRPLIETNGETGEIVWDKGRDFATVRKVLSMPQVNIVKKTEVQTGGFSKESILPKRNSDKLIARKKDWDPKKYGGFDSPTVAYSVLVVAKVEKGKSKKLKSVKELLGITIMERSSFEKNPIDFLEAKGYKEVKKDLIIKLPKYSLFELENGRKRMLASAGELQKGNELALPSKYVNFLYLASHYEKLKGSPEDNEQKQLFVEQHKHYLDEIIEQISEFSKRVILADANLDKVLSAYNKHRDKPIREQAENIIHLFTLTNLGAPAAFKYFDTTIDRKRYTSTKEVLDATLIHQSITGLYETRIDLSQLGGDGGGGGGGSGGTAPLEEEYRLFLEAPIQNVTLLEQWKREIPKVWAEINPPGLASTQAPIHVQLLSTALPVRVRQYPITLEAKRSLRETIRKFRAAGILRPVHSPWNTPLLPVRKSGTSEYRMVQDLREVNKRVETIHPTVPNPYTLLSLLPPDRIWYSVLDLKDAFFCIPLAPESQLIFAFEWADAEEGESGQLTWTRLPQGFKNSPTLFNEALNRDLQGFRLDHPSVSLLQYVDDLLIAADTQAACLSATRDLLMTLAELGYRVSGKKAQLCQEEVTYLGFKIHKGSRSLSNSRTQAILQIPVPKTKRQVREFLGKIGYCRLFIPGFAELAQPLYAATRPGNDPLVWGEKEEEAFQSLKLALTQPPALALPSLDKPFQLFVEETSGAAKGVLTQALGPWKRPVAYLSKRLDPVAAGWPRCLRAIAAAALLTREASKLTFGQDIEITSSHNLESLLRSPPDKWLTNARITQYQVLLLDPPRVRFKQTAALNPATLLPETDDTLPIHHCLDTLDSLTSTRPDLTDQPLAQAEATLFTDGSSYIRDGKRYAGAAVVTLDSVIWAEPLPIGTSAQKAELIALTKALEWSKDKSVNIYTDSRYAFATLHVHGMIYRERGWLTAGGKAIKNAPEILALLTAVWLPKRVAVMHCKGHQKDDAPTSTGNRRADEVAREVAIRPLSTQATISAGKRTADGSEFEKRTADGSEFESPKKKAKVE

SEQ ID NO: 6586 - protein, 2097 aa, synthetic construct
MPAAKRVKLDGGDKKYSIGLDIGTNSVGWAVITDEYKVPSKKFKVLGNTDRHSIKKNLIGALLFDSGETAEATRLKRTARRRYTRRKNRICYLQEIFSNEMAKVDDSFFHRLEESFLVEEDKKHERHPIFGNIVDEVAYHEKYPTIYHLRKKLVDSTDKADLRLIYLALAHMIKFRGHFLIEGDLNPDNSDVDKLFIQLVQTYNQLFEENPINASGVDAKAILSARLSKSRRLENLIAQLPGEKKNGLFGNLIALSLGLTPNFKSNFDLAEDAKLQLSKDTYDDDLDNLLAQIGDQYADLFLAAKNLSDAILLSDILRVNTEITKAPLSASMIKRYDEHHQDLTLLKALVRQQLPEKYKEIFFDQSKNGYAGYIDGGASQEEFYKFIKPILEKMDGTEELLVKLNREDLLRKQRTFDNGSIPHQIHLGELHAILRRQEDFYPFLKDNREKIEKILTFRIPYYVGPLARGNSRFAWMTRKSEETITPWNFEEVVDKGASAQSFIERMTNFDKNLPNEKVLPKHSLLYEYFTVYNELTKVKYVTEGMRKPAFLSGEQKKAIVDLLFKTNRKVTVKQLKEDYFKKIECFDSVEISGVEDRFNASLGTYHDLLKIIKDKDFLDNEENEDILEDIVLTLTLFEDREMIEERLKTYAHLFDDKVMKQLKRRRYTGWGRLSRKLINGIRDKQSGKTILDFLKSDGFANRNFMQLIHDDSLTFKEDIQKAQVSGQGDSLHEHIANLAGSPAIKKGILQTVKVVDELVKVMGRHKPENIVIEMARENQTTQKGQKNSRERMKRIEEGIKELGSQILKEHPVENTQLQNEKLYLYYLQNGRDMYVDQELDINRLSDYDVDHIVPQSFLKDDSIDNKVLTRSDKARGKSDNVPSEEVVKKMKNYWRQLLNAKLITQRKFDNLTKAERGGLSELDKAGFIKRQLVETRQITKHVAQILDSRMNTKYDENDKLIREVKVITLKSKLVSDFRKDFQFYKVREINNYHHAHDAYLNAVVGTALIKKYPKLESEFVYGDYKVYDVRKMIAKSEQEIGKATAKYFFYSNIMNFFKTEITLANGEIRKRPLIETNGETGEIVWDKGRDFATVRKVLSMPQVNIVKKTEVQTGGFSKESILPKRNSDKLIARKKDWDPKKYGGFDSPTVAYSVLVVAKVEKGKSKKLKSVKELLGITIMERSSFEKNPIDFLEAKGYKEVKKDLIIKLPKYSLFELENGRKRMLASAGELQKGNELALPSKYVNFLYLASHYEKLKGSPEDNEQKQLFVEQHKHYLDEIIEQISEFSKRVILADANLDKVLSAYNKHRDKPIREQAENIIHLFTLTNLGAPAAFKYFDTTIDRKRYTSTKEVLDATLIHQSITGLYETRIDLSQLGGDGGGGGGGSGGTVSLQDEHRLFDIPVTTSLPDVWLQDFPQAWAETGGLGRAKCQAPIIIDLKPTAVPVSIKQYPMSLEAHMGIRQHIIKFLELGVLRPCRSPWNTPLLPVKKPGTQDYRPVQDLREINKRTVDIHPTVPNPYNLLSTLKPDYSWYTVLDLKDAFFCLPLAPQSQELFAFEWKDPERGISGQLTWTRLPQGFKNSPTLFNEALHRDLTDFRTQHPEVTLLQYVDDLLLAAPTKKACTQGTRHLLQELGEKGYRASAKKAQICQTKVTYLGYILSEGKRWLTPGRIETVARIPPPRNPREVREFLGTAGFCRLWIPGFAELAAPLYALTKPSTPFTWQTEHQLAFEALKKALLSAPALGLPDTSKPFTLFLDERQGIAKGVLTQKLGPWKRPVAYLSKKLDPVAAGWPPCLRIMAATAMLVKDSAKLTLGQPLTVITPHTLEAIVRQPPDRWITNARLTHYQALLLDTDRVQFGPPVTLNPATLLPVPENQPSPHDCRQVLAETHGTREDLKDQELPDADHTWYTDGSSYLDSGTRRAGAAVVDGHNTIWAQSLPPGTSAQKAELIALTKALELSKGKKANIYTDSRYAFATAHTHGSIYERRGWLTSEGKEIKNKAEIIALLKALFLPQEVAIIHCPGHQKGQDPVAVGNRQADRVARQAAMAEVLTLATEPDNTSHITAGKRTADGSEFEKRTADGSEFESPKKKAKVE

SEQ ID NO: 6587 - protein, 2090 aa, synthetic construct
MPAAKRVKLDGGDKKYSIGLDIGTNSVGWAVITDEYKVPSKKFKVLGNTDRHSIKKNLIGALLFDSGETAEATRLKRTARRRYTRRKNRICYLQEIFSNEMAKVDDSFFHRLEESFLVEEDKKHERHPIFGNIVDEVAYHEKYPTIYHLRKKLVDSTDKADLRLIYLALAHMIKFRGHFLIEGDLNPDNSDVDKLFIQLVQTYNQLFEENPINASGVDAKAILSARLSKSRRLENLIAQLPGEKKNGLFGNLIALSLGLTPNFKSNFDLAEDAKLQLSKDTYDDDLDNLLAQIGDQYADLFLAAKNLSDAILLSDILRVNTEITKAPLSASMIKRYDEHHQDLTLLKALVRQQLPEKYKEIFFDQSKNGYAGYIDGGASQEEFYKFIKPILEKMDGTEELLVKLNREDLLRKQRTFDNGSIPHQIHLGELHAILRRQEDFYPFLKDNREKIEKILTFRIPYYVGPLARGNSRFAWMTRKSEETITPWNFEEVVDKGASAQSFIERMTNFDKNLPNEKVLPKHSLLYEYFTVYNELTKVKYVTEGMRKPAFLSGEQKKAIVDLLFKTNRKVTVKQLKEDYFKKIECFDSVEISGVEDRFNASLGTYHDLLKIIKDKDFLDNEENEDILEDIVLTLTLFEDREMIEERLKTYAHLFDDKVMKQLKRRRYTGWGRLSRKLINGIRDKQSGKTILDFLKSDGFANRNFMQLIHDDSLTFKEDIQKAQVSGQGDSLHEHIANLAGSPAIKKGILQTVKVVDELVKVMGRHKPENIVIEMARENQTTQKGQKNSRERMKRIEEGIKELGSQILKEHPVENTQLQNEKLYLYYLQNGRDMYVDQELDINRLSDYDVDHIVPQSFLKDDSIDNKVLTRSDKARGKSDNVPSEEVVKKMKNYWRQLLNAKLITQRKFDNLTKAERGGLSELDKAGFIKRQLVETRQITKHVAQILDSRMNTKYDENDKLIREVKVITLKSKLVSDFRKDFQFYKVREINNYHHAHDAYLNAVVGTALIKKYPKLESEFVYGDYKVYDVRKMIAKSEQEIGKATAKYFFYSNIMNFFKTEITLANGEIRKRPLIETNGETGEIVWDKGRDFATVRKVLSMPQVNIVKKTEVQTGGFSKESILPKRNSDKLIARKKDWDPKKYGGFDSPTVAYSVLVVAKVEKGKSKKLKSVKELLGITIMERSSFEKNPIDFLEAKGYKEVKKDLIIKLPKYSLFELENGRKRMLASAGELQKGNELALPSKYVNFLYLASHYEKLKGSPEDNEQKQLFVEQHKHYLDEIIEQISEFSKRVILADANLDKVLSAYNKHRDKPIREQAENIIHLFTLTNLGAPAAFKYFDTTIDRKRYTSTKEVLDATLIHQSITGLYETRIDLSQLGGDGGGGGGGSGGTLQLEEEYRLFEPESTQKQEMDIWLKNFPQAWAETGGMGTAHCQAPVLIQLKATATPISIRQYPMPHEAYQGIKPHIRRMLDQGILKPCQSPWNTPLLPVKKPGTEDYRPVQDLREVNKRVEDIHPTVPNPYNLLSTLPPSHPWYTVLDLKDAFFCLRLHSESQLLFAFEWRDPEIGLSGQLTWTRLPQGFKNSPTLFNEALHSDLADFRVRYPALVLLQYVDDLLLAAATRTECLEGTKALLETLGNKGYRASAKKAQICLQEVTYLGYSLKDGQRWLTKARKEAILSIPVPKNSRQVREFLGTAGYCRLWIPGFAELAAPLYPLTRPGTLFQWGTEQQLAFEDIKKALLSSPALGLPDITKPFELFIDENSGFAKGVLVQKLGPWKRPVAYLSKKLDTVASGWPPCLRMVAAIAILVKDAGKLTLGQPLTILTSHPVEALVRQPPNKWLSNARMTHYQAMLLDAERVHFGPTVSLNPATLLPLPSGGNHHDCLQILAETHGTRPDLTDQPLPDADLTWYTDGSSFIRNGEREAGAAVTTESEVIWAAPLPPGTSAQRAELIALTQALKMAEGKKLTVYTDSRYAFATTHVHGEIYRRRGWLTSEGKEIKNKNEILALLEALFLPKRLSIIHCPGHQKGDSPQAKGNRLADDTAKKAATETHSSLTVLPAGKRTADGSEFEKRTADGSEFESPKKKAKVE

SEQ ID NO: 6588 - protein, 2213 aa, synthetic construct
MPAAKRVKLDGGDKKYSIGLDIGTNSVGWAVITDEYKVPSKKFKVLGNTDRHSIKKNLIGALLFDSGETAEATRLKRTARRRYTRRKNRICYLQEIFSNEMAKVDDSFFHRLEESFLVEEDKKHERHPIFGNIVDEVAYHEKYPTIYHLRKKLVDSTDKADLRLIYLALAHMIKFRGHFLIEGDLNPDNSDVDKLFIQLVQTYNQLFEENPINASGVDAKAILSARLSKSRRLENLIAQLPGEKKNGLFGNLIALSLGLTPNFKSNFDLAEDAKLQLSKDTYDDDLDNLLAQIGDQYADLFLAAKNLSDAILLSDILRVNTEITKAPLSASMIKRYDEHHQDLTLLKALVRQQLPEKYKEIFFDQSKNGYAGYIDGGASQEEFYKFIKPILEKMDGTEELLVKLNREDLLRKQRTFDNGSIPHQIHLGELHAILRRQEDFYPFLKDNREKIEKILTFRIPYYVGPLARGNSRFAWMTRKSEETITPWNFEEVVDKGASAQSFIERMTNFDKNLPNEKVLPKHSLLYEYFTVYNELTKVKYVTEGMRKPAFLSGEQKKAIVDLLFKTNRKVTVKQLKEDYFKKIECFDSVEISGVEDRFNASLGTYHDLLKIIKDKDFLDNEENEDILEDIVLTLTLFEDREMIEERLKTYAHLFDDKVMKQLKRRRYTGWGRLSRKLINGIRDKQSGKTILDFLKSDGFANRNFMQLIHDDSLTFKEDIQKAQVSGQGDSLHEHIANLAGSPAIKKGILQTVKVVDELVKVMGRHKPENIVIEMARENQTTQKGQKNSRERMKRIEEGIKELGSQILKEHPVENTQLQNEKLYLYYLQNGRDMYVDQELDINRLSDYDVDHIVPQSFLKDDSIDNKVLTRSDKARGKSDNVPSEEVVKKMKNYWRQLLNAKLITQRKFDNLTKAERGGLSELDKAGFIKRQLVETRQITKHVAQILDSRMNTKYDENDKLIREVKVITLKSKLVSDFRKDFQFYKVREINNYHHAHDAYLNAVVGTALIKKYPKLESEFVYGDYKVYDVRKMIAKSEQEIGKATAKYFFYSNIMNFFKTEITLANGEIRKRPLIETNGETGEIVWDKGRDFATVRKVLSMPQVNIVKKTEVQTGGFSKESILPKRNSDKLIARKKDWDPKKYGGFDSPTVAYSVLVVAKVEKGKSKKLKSVKELLGITIMERSSFEKNPIDFLEAKGYKEVKKDLIIKLPKYSLFELENGRKRMLASAGELQKGNELALPSKYVNFLYLASHYEKLKGSPEDNEQKQLFVEQHKHYLDEIIEQISEFSKRVILADANLDKVLSAYNKHRDKPIREQAENIIHLFTLTNLGAPAAFKYFDTTIDRKRYTSTKEVLDATLIHQSITGLYETRIDLSQLGGDGGGGGGGSGGTLGDQGSRGSDPLPEPRVTLTVEGIPTEFLVNTGAEHSVLTKPMGKMGSKRTVVAGATGSKVYPWTTKRLLKIGQKQVTHSFLVIPECPAPLLGRDLLTKLKAQIQFSTEGPQVTWEDRPAMCLVLNLEEEYRLHEKPVPPSIDPSWLQLFPMVWAEKAGMGLANQVPPVVVELKSDASPVAVRQYPMSKEAREGIRPHIQRFLDLGILVPCQSPWNTPLLPVKKPGTNDYRPVQDLREVNKRVQDIHPTVPNPYNLLSSLPPSHTWYSVLDLKDAFFCLKLHPNSQPLFAFEWRDPEKGNTGQLTWTRLPQGFKNSPTLFNEALHRDLASFRALNPQVVMLQYVDDLLVAAPTYRDCKEGTRRLLQELSKLGYRVSAKKAQLCREEVTYLGYLLKGGKRWLTPARKATVMKIPTPTTPRQVREFLGKAGFCRLFIPGFASLAAPLYPLTRPKVPFTWTEAHQEAFGRIKEALLSAPALALPDLTKPFALYVDEKEGVARGVLTQTLGPWRRPVAYLSKKLDPVASGWPTCLKAIAAVALLLKDADKLTLGQNVLVIAPHNLESIVRQPPDRWMTNARMTHYQSLLLNERVSFAPPAILNPATLLPVESDDTPIHICSEILAEETGTRPDLRDQPLPGVPAWYTDGSSFIMDGRRQAGAAIVDNKRTVWASNLPEGTSAQKAELIALTQALRLAEGKSINIYTDSRYAFATAHVHGAIYKQRGWLTSAGKDIKNKEEILALLEAIHLPKRVAIIHCPGHQRGTDPVATGNRKADEAAKQAAQSTRILTETTKNAGKRTADGSEFEKRTADGSEFESPKKKAKVE

SEQ ID NO: 6589 - protein, 2091 aa, synthetic construct; identical to SEQ ID NO: 4511

SEQ ID NO: 6590 - protein, 2091 aa, synthetic construct
MPAAKRVKLDGGDKKYSIGLDIGTNSVGWAVITDEYKVPSKKFKVLGNTDRHSIKKNLIGALLFDSGETAEATRLKRTARRRYTRRKNRICYLQEIFSNEMAKVDDSFFHRLEESFLVEEDKKHERHPIFGNIVDEVAYHEKYPTIYHLRKKLVDSTDKADLRLIYLALAHMIKFRGHFLIEGDLNPDNSDVDKLFIQLVQTYNQLFEENPINASGVDAKAILSARLSKSRRLENLIAQLPGEKKNGLFGNLIALSLGLTPNFKSNFDLAEDAKLQLSKDTYDDDLDNLLAQIGDQYADLFLAAKNLSDAILLSDILRVNTEITKAPLSASMIKRYDEHHQDLTLLKALVRQQLPEKYKEIFFDQSKNGYAGYIDGGASQEEFYKFIKPILEKMDGTEELLVKLNREDLLRKQRTFDNGSIPHQIHLGELHAILRRQEDFYPFLKDNREKIEKILTFRIPYYVGPLARGNSRFAWMTRKSEETITPWNFEEVVDKGASAQSFIERMTNFDKNLPNEKVLPKHSLLYEYFTVYNELTKVKYVTEGMRKPAFLSGEQKKAIVDLLFKTNRKVTVKQLKEDYFKKIECFDSVEISGVEDRFNASLGTYHDLLKIIKDKDFLDNEENEDILEDIVLTLTLFEDREMIEERLKTYAHLFDDKVMKQLKRRRYTGWGRLSRKLINGIRDKQSGKTILDFLKSDGFANRNFMQLIHDDSLTFKEDIQKAQVSGQGDSLHEHIANLAGSPAIKKGILQTVKVVDELVKVMGRHKPENIVIEMARENQTTQKGQKNSRERMKRIEEGIKELGSQILKEHPVENTQLQNEKLYLYYLQNGRDMYVDQELDINRLSDYDVDHIVPQSFLKDDSIDNKVLTRSDKARGKSDNVPSEEVVKKMKNYWRQLLNAKLITQRKFDNLTKAERGGLSELDKAGFIKRQLVETRQITKHVAQILDSRMNTKYDENDKLIREVKVITLKSKLVSDFRKDFQFYKVREINNYHHAHDAYLNAVVGTALIKKYPKLESEFVYGDYKVYDVRKMIAKSEQEIGKATAKYFFYSNIMNFFKTEITLANGEIRKRPLIETNGETGEIVWDKGRDFATVRKVLSMPQVNIVKKTEVQTGGFSKESILPKRNSDKLIARKKDWDPKKYGGFDSPTVAYSVLVVAKVEKGKSKKLKSVKELLGITIMERSSFEKNPIDFLEAKGYKEVKKDLIIKLPKYSLFELENGRKRMLASAGELQKGNELALPSKYVNFLYLASHYEKLKGSPEDNEQKQLFVEQHKHYLDEIIEQISEFSKRVILADANLDKVLSAYNKHRDKPIREQAENIIHLFTLTNLGAPAAFKYFDTTIDRKRYTSTKEVLDATLIHQSITGLYETRIDLSQLGGDGGGGGGGSGGTLGIEDEYRLHETSTEPDVSLGSTWLSDFPQAWAETGGMGLAVRQAPLIIPLKATSTPVSIQQYPMSHEARLGIKPHIQRLLDQGILVPCQSPWNTPLLPVKKPGTNDYRPVQDLREVNKRVEDIHPTVPNPYNLLSGLPPSHQWYTVLDLKDAFFCLRLHPTSQPLFAFEWRDPGMGISGQLTWTRLPQGFKNSPTLFNEALHRDLADFRIQHPDLILLQYVDDILLAATSELDCQQGTRALLQTLGDLGYRASAKKAQICQKQVKYLGYLLREGQRWLTEARKETVMGQPVPKTPRQLREFLGTAGFCRLWIPGFAEMAAPLYPLTKPGTLFSWGPDQQKAYQEIKQALLTAPALGLPDLTKPFELFVDEKQGYAKGVLTQKLGPWRRPVAYLSKKLDPVAAGWPPCLRMVAAIAVLTKDAGKLTMGQPLVILAPHAVEALVKQPPDRWLSNARMTHYQAMLLDTDRVQFGPVVALNPATLLPLPEEGAPHDCLEILAETHGTRPDLTDQPIPDADHTWYTDGSSFLQEGQRKAGAAVTTETEVIWAGALPAGTSAQRAELIALTQALKMAEGKRLNVYTDSRYAFATAHIHGEIYRRRGWLTSEGREIKNKSEILALLKALFLPKRLSIIHCLGHQKGDSAEARGNRLADQAAREAAIKTPPDTSTLLAGKRTADGSEFEKRTADGSEFESPKKKAKVE

SEQ ID NO: 6591 - protein, 2091 aa, synthetic construct; identical to SEQ ID NO: 4511

SEQ ID NO: 6592 - protein, 2091 aa, synthetic construct
MPAAKRVKLDGGDKKYSIGLDIGTNSVGWAVITDEYKVPSKKFKVLGNTDRHSIKKNLIGALLFDSGETAEATRLKRTARRRYTRRKNRICYLQEIFSNEMAKVDDSFFHRLEESFLVEEDKKHERHPIFGNIVDEVAYHEKYPTIYHLRKKLVDSTDKADLRLIYLALAHMIKFRGHFLIEGDLNPDNSDVDKLFIQLVQTYNQLFEENPINASGVDAKAILSARLSKSRRLENLIAQLPGEKKNGLFGNLIALSLGLTPNFKSNFDLAEDAKLQLSKDTYDDDLDNLLAQIGDQYADLFLAAKNLSDAILLSDILRVNTEITKAPLSASMIKRYDEHHQDLTLLKALVRQQLPEKYKEIFFDQSKNGYAGYIDGGASQEEFYKFIKPILEKMDGTEELLVKLNREDLLRKQRTFDNGSIPHQIHLGELHAILRRQEDFYPFLKDNREKIEKILTFRIPYYVGPLARGNSRFAWMTRKSEETITPWNFEEVVDKGASAQSFIERMTNFDKNLPNEKVLPKHSLLYEYFTVYNELTKVKYVTEGMRKPAFLSGEQKKAIVDLLFKTNRKVTVKQLKEDYFKKIECFDSVEISGVEDRFNASLGTYHDLLKIIKDKDFLDNEENEDILEDIVLTLTLFEDREMIEERLKTYAHLFDDKVMKQLKRRRYTGWGRLSRKLINGIRDKQSGKTILDFLKSDGFANRNFMQLIHDDSLTFKEDIQKAQVSGQGDSLHEHIANLAGSPAIKKGILQTVKVVDELVKVMGRHKPENIVIEMARENQTTQKGQKNSRERMKRIEEGIKELGSQILKEHPVENTQLQNEKLYLYYLQNGRDMYVDQELDINRLSDYDVDHIVPQSFLKDDSIDNKVLTRSDKARGKSDNVPSEEVVKKMKNYWRQLLNAKLITQRKFDNLTKAERGGLSELDKAGFIKRQLVETRQITKHVAQILDSRMNTKYDENDKLIREVKVITLKSKLVSDFRKDFQFYKVREINNYHHAHDAYLNAVVGTALIKKYPKLESEFVYGDYKVYDVRKMIAKSEQEIGKATAKYFFYSNIMNFFKTEITLANGEIRKRPLIETNGETGEIVWDKGRDFATVRKVLSMPQVNIVKKTEVQTGGFSKESILPKRNSDKLIARKKDWDPKKYGGFDSPTVAYSVLVVAKVEKGKSKKLKSVKELLGITIMERSSFEKNPIDFLEAKGYKEVKKDLIIKLPKYSLFELENGRKRMLASAGELQKGNELALPSKYVNFLYLASHYEKLKGSPEDNEQKQLFVEQHKHYLDEIIEQISEFSKRVILADANLDKVLSAYNKHRDKPIREQAENIIHLFTLTNLGAPAAFKYFDTTIDRKRYTSTKEVLDATLIHQSITGLYETRIDLSQLGGDGGGGGGGSGGTLNIEDEYRLHETSKGPDVPLGSTWLSDFPQAWAETGGMGLAFRQAPLIISLKATSTPVSIKQYPMSQEARLGIKPHIQRLLDQGILVPCQSPWNTPLLPVKKPGTNDYRPVQDLREVNKRVEDIHPTVPNPYNLLSGLPPSHQWYTVLDLKDAFFCLRLHPTSQSLFAFEWKDPEMGISGQLTWTRLPQGFKNSPTLFDEALHRDLADFRIQHPDLILLQYVDDLLLAATSELDCQQGTRALLQTLGDLGYRASAKKAQICQKQVKYLGYLLKEGQRWLTEARKETVMGQPTPKTPRQLREFLGTAGLCRLWIPGFAEMAAPLYPLTKTGTLFKWGPDQQKAYQEIKQALLTAPALGLPDLTKPFELFVDEKQGYAKGVLTQKLGPWRRPVAYLSKKLDPVAAGWPPCLRMVAAIAVLTKDVGKLTMGQPLVILAPHAVEALVKQPPDRWLSNARMTHYQALLLDTDRVQFGPIVALNPATLLPLPEEGLQHDCLDILAEAHGTRPDLTDQPLPDADHTWYTDGSSFLQEGQRRAGAAVTTETEVIWAKALPAGTSAQRAELIALTQALKMAAGKKLNVYTDSRYAFATAHIHGEIYRRRGLLTSEGKEIKNKDEILALLKALFLPKRLSIIHCPGHQKGNHAEARGNRMADQAAREVATRETPETSTLLAGKRTADGSEFEKRTADGSEFESPKKKAKVE

SEQ ID NO: 6593 - protein, 2091 aa, synthetic construct
MPAAKRVKLDGGDKKYSIGLDIGTNSVGWAVITDEYKVPSKKFKVLGNTDRHSIKKNLIGALLFDSGETAEATRLKRTARRRYTRRKNRICYLQEIFSNEMAKVDDSFFHRLEESFLVEEDKKHERHPIFGNIVDEVAYHEKYPTIYHLRKKLVDSTDKADLRLIYLALAHMIKFRGHFLIEGDLNPDNSDVDKLFIQLVQTYNQLFEENPINASGVDAKAILSARLSKSRRLENLIAQLPGEKKNGLFGNLIALSLGLTPNFKSNFDLAEDAKLQLSKDTYDDDLDNLLAQIGDQYADLFLAAKNLSDAILLSDILRVNTEITKAPLSASMIKRYDEHHQDLTLLKALVRQQLPEKYKEIFFDQSKNGYAGYIDGGASQEEFYKFIKPILEKMDGTEELLVKLNREDLLRKQRTFDNGSIPHQIHLGELHAILRRQEDFYPFLKDNREKIEKILTFRIPYYVGPLARGNSRFAWMTRKSEETITPWNFEEVVDKGASAQSFIERMTNFDKNLPNEKVLPKHSLLYEYFTVYNELTKVKYVTEGMRKPAFLSGEQKKAIVDLLFKTNRKVTVKQLKEDYFKKIECFDSVEISGVEDRFNASLGTYHDLLKIIKDKDFLDNEENEDILEDIVLTLTLFEDREMIEERLKTYAHLFDDKVMKQLKRRRYTGWGRLSRKLINGIRDKQSGKTILDFLKSDGFANRNFMQLIHDDSLTFKEDIQKAQVSGQGDSLHEHIANLAGSPAIKKGILQTVKVVDELVKVMGRHKPENIVIEMARENQTTQKGQKNSRERMKRIEEGIKELGSQILKEHPVENTQLQNEKLYLYYLQNGRDMYVDQELDINRLSDYDVDHIVPQSFLKDDSIDNKVLTRSDKARGKSDNVPSEEVVKKMKNYWRQLLNAKLITQRKFDNLTKAERGGLSELDKAGFIKRQLVETRQITKHVAQILDSRMNTKYDENDKLIREVKVITLKSKLVSDFRKDFQFYKVREINNYHHAHDAYLNAVVGTALIKKYPKLESEFVYGDYKVYDVRKMIAKSEQEIGKATAKYFFYSNIMNFFKTEITLANGEIRKRPLIETNGETGEIVWDKGRDFATVRKVLSMPQVNIVKKTEVQTGGFSKESILPKRNSDKLIARKKDWDPKKYGGFDSPTVAYSVLVVAKVEKGKSKKLKSVKELLGITIMERSSFEKNPIDFLEAKGYKEVKKDLIIKLPKYSLFELENGRKRMLASAGELQKGNELALPSKYVNFLYLASHYEKLKGSPEDNEQKQLFVEQHKHYLDEIIEQISEFSKRVILADANLDKVLSAYNKHRDKPIREQAENIIHLFTLTNLGAPAAFKYFDTTIDRKRYTSTKEVLDATLIHQSITGLYETRIDLSQLGGDGGGGGGGSGGTLNIEDEYRLHETSKGPDVPLGSTWLSDFPQAWAETGGMGLAVRQAPLIIPLKATSTPVSIKQYPMSQEARLGIKPHIQRLLDQGILVPCQSPWNTPLLPVKKPGTNDYRPVQDLREVNKRVEDIHPTVPNPYNLLSGLPPSHQWYTVLDLKDAFFCLRLHPTSQSLFAFEWRDPEMGISGQLTWTRLPQGFKNSPTLFNEALHRDLADFRIQHPDLILLQYVDDLLLAATSELDCQQGTRALLQTLGDLGYRASAKKAQICQKQVKYLGYLLKEGQRWLTEARKETVMGQPTPKTPRQLREFLGTAGFCRLWIPGFAEMAAPLYPLTKPGTLFEWGPDQQKAYQEIKQALLTAPALGLPDLTKPFELFVDEKQGYAKGVLTQKLGPWRRPVAYLSKKLDPVAAGWPPCLRMVAAIAVLTKDAGKLTMGQPLVILAPHAVEALVKQPPDRWLSNARMTHYQALLLDTDRVQFGPIVALNPATLLPLPEEGLQHDCLDILAEAHGTRPDLTDQPLPDADHTWYTDGSSFLQEGQRKAGAAVTTETEVVWAKALPAGTSAQRAELIALTQALKMAEGKKLNVYTDSRYAFATAHIHGEIYRRRGWLTSEGKEIKNKDEILALLKALFLPKRLSIIHCPGHQKGNRAEARGNRMADQAAREVATRETPETSTLLAGKRTADGSEFEKRTADGSEFESPKKKAKVE

SEQ ID NO: 6594 - protein, 2091 aa, synthetic construct
MPAAKRVKLDGGDKKYSIGLDIGTNSVGWAVITDEYKVPSKKFKVLGNTDRHSIKKNLIGALLFDSGETAEATRLKRTARRRYTRRKNRICYLQEIFSNEMAKVDDSFFHRLEESFLVEEDKKHERHPIFGNIVDEVAYHEKYPTIYHLRKKLVDSTDKADLRLIYLALAHMIKFRGHFLIEGDLNPDNSDVDKLFIQLVQTYNQLFEENPINASGVDAKAILSARLSKSRRLENLIAQLPGEKKNGLFGNLIALSLGLTPNFKSNFDLAEDAKLQLSKDTYDDDLDNLLAQIGDQYADLFLAAKNLSDAILLSDILRVNTEITKAPLSASMIKRYDEHHQDLTLLKALVRQQLPEKYKEIFFDQSKNGYAGYIDGGASQEEFYKFIKPILEKMDGTEELLVKLNREDLLRKQRTFDNGSIPHQIHLGELHAILRRQEDFYPFLKDNREKIEKILTFRIPYYVGPLARGNSRFAWMTRKSEETITPWNFEEVVDKGASAQSFIERMTNFDKNLPNEKVLPKHSLLYEYFTVYNELTKVKYVTEGMRKPAFLSGEQKKAIVDLLFKTNRKVTVKQLKEDYFKKIECFDSVEISGVEDRFNASLGTYHDLLKIIKDKDFLDNEENEDILEDIVLTLTLFEDREMIEERLKTYAHLFDDKVMKQLKRRRYTGWGRLSRKLINGIRDKQSGKTILDFLKSDGFANRNFMQLIHDDSLTFKEDIQKAQVSGQGDSLHEHIANLAGSPAIKKGILQTVKVVDELVKVMGRHKPENIVIEMARENQTTQKGQKNSRERMKRIEEGIKELGSQILKEHPVENTQLQNEKLYLYYLQNGRDMYVDQELDINRLSDYDVDHIVPQSFLKDDSIDNKVLTRSDKARGKSDNVPSEEVVKKMKNYWRQLLNAKLITQRKFDNLTKAERGGLSELDKAGFIKRQLVETRQITKHVAQILDSRMNTKYDENDKLIREVKVITLKSKLVSDFRKDFQFYKVREINNYHHAHDAYLNAVVGTALIKKYPKLESEFVYGDYKVYDVRKMIAKSEQEIGKATAKYFFYSNIMNFFKTEITLANGEIRKRPLIETNGETGEIVWDKGRDFATVRKVLSMPQVNIVKKTEVQTGGFSKESILPKRNSDKLIARKKDWDPKKYGGFDSPTVAYSVLVVAKVEKGKSKKLKSVKELLGITIMERSSFEKNPIDFLEAKGYKEVKKDLIIKLPKYSLFELENGRKRMLASAGELQKGNELALPSKYVNFLYLASHYEKLKGSPEDNEQKQLFVEQHKHYLDEIIEQISEFSKRVILADANLDKVLSAYNKHRDKPIREQAENIIHLFTLTNLGAPAAFKYFDTTIDRKRYTSTKEVLDATLIHQSITGLYETRIDLSQLGGDGGGGGGGSGGTLNIEDEYRLHETSKGPDVPLGSTWLSDFPQAWAETGGMGLAVRQAPLIIPLKATSTPVSIKQYPMSQEARLGIKPHIQRLLDQGILVPCQSPWNTPLLPVKKPGTNDYRPVQDLREVNKRVEDIHPTVPNPYNLLSGLPPSHQWYTVLDLKDAFFCLRLHPTSQSLFAFEWRDPEMGISGQLTWTRLPQGFKNSPTLFNEALHRDLADFRIQHPDLILLQYVDDLLLAATSELDCQQGTRALLQTLGDLGYRASAKKAQICQKQVKYLGYLLKEGQRWLTEARKETVMGQPTPKTPRQLREFLGKAGFCRLFIPGFAEMAAPLYPLTKPGTLFEWGPDQQKAYQEIKQALLTAPALGLPDLTKPFELFVDEKQGYAKGVLTQKLGPWRRPVAYLSKKLDPVAAGWPPCLRMVAAIAVLTKDAGKLTMGQPLVILAPHAVEALVKQPPDRWLSNARMTHYQALLLDTDRVQFGPIVALNPATLLPLPEEGLQHDCLDILAEAHGTRPDLTDQPLPDADHTWYTDGSSFLQEGQRKAGAAVTTETEVVWAKALPAGTSAQRAELIALTQALKMAEGKKLNVYTDSRYAFATAHIHGEIYRRRGWLTSEGKEIKNKDEILALLKALFLPKRLSIIHCPGHQKGNRAEARGNRMADQAAREVATRETPETSTLLAGKRTADGSEFEKRTADGSEFESPKKKAKVE

SEQ ID NO: 6595 - protein, 2111 aa, synthetic construct
MPAAKRVKLDGGDKKYSIGLDIGTNSVGWAVITDEYKVPSKKFKVLGNTDRHSIKKNLIGALLFDSGETAEATRLKRTARRRYTRRKNRICYLQEIFSNEMAKVDDSFFHRLEESFLVEEDKKHERHPIFGNIVDEVAYHEKYPTIYHLRKKLVDSTDKADLRLIYLALAHMIKFRGHFLIEGDLNPDNSDVDKLFIQLVQTYNQLFEENPINASGVDAKAILSARLSKSRRLENLIAQLPGEKKNGLFGNLIALSLGLTPNFKSNFDLAEDAKLQLSKDTYDDDLDNLLAQIGDQYADLFLAAKNLSDAILLSDILRVNTEITKAPLSASMIKRYDEHHQDLTLLKALVRQQLPEKYKEIFFDQSKNGYAGYIDGGASQEEFYKFIKPILEKMDGTEELLVKLNREDLLRKQRTFDNGSIPHQIHLGELHAILRRQEDFYPFLKDNREKIEKILTFRIPYYVGPLARGNSRFAWMTRKSEETITPWNFEEVVDKGASAQSFIERMTNFDKNLPNEKVLPKHSLLYEYFTVYNELTKVKYVTEGMRKPAFLSGEQKKAIVDLLFKTNRKVTVKQLKEDYFKKIECFDSVEISGVEDRFNASLGTYHDLLKIIKDKDFLDNEENEDILEDIVLTLTLFEDREMIEERLKTYAHLFDDKVMKQLKRRRYTGWGRLSRKLINGIRDKQSGKTILDFLKSDGFANRNFMQLIHDDSLTFKEDIQKAQVSGQGDSLHEHIANLAGSPAIKKGILQTVKVVDELVKVMGRHKPENIVIEMARENQTTQKGQKNSRERMKRIEEGIKELGSQILKEHPVENTQLQNEKLYLYYLQNGRDMYVDQELDINRLSDYDVDHIVPQSFLKDDSIDNKVLTRSDKARGKSDNVPSEEVVKKMKNYWRQLLNAKLITQRKFDNLTKAERGGLSELDKAGFIKRQLVETRQITKHVAQILDSRMNTKYDENDKLIREVKVITLKSKLVSDFRKDFQFYKVREINNYHHAHDAYLNAVVGTALIKKYPKLESEFVYGDYKVYDVRKMIAKSEQEIGKATAKYFFYSNIMNFFKTEITLANGEIRKRPLIETNGETGEIVWDKGRDFATVRKVLSMPQVNIVKKTEVQTGGFSKESILPKRNSDKLIARKKDWDPKKYGGFDSPTVAYSVLVVAKVEKGKSKKLKSVKELLGITIMERSSFEKNPIDFLEAKGYKEVKKDLIIKLPKYSLFELENGRKRMLASAGELQKGNELALPSKYVNFLYLASHYEKLKGSPEDNEQKQLFVEQHKHYLDEIIEQISEFSKRVILADANLDKVLSAYNKHRDKPIREQAENIIHLFTLTNLGAPAAFKYFDTTIDRKRYTSTKEVLDATLIHQSITGLYETRIDLSQLGGDGGGGGGGSGGTLNIEDEYRLHETSKEPDVSLGSTWLSDFPQAWAETGGMGLAVRQAPLIIPLKATSTPVSIKQYPMSQEARLGIKPHIQRLLDQGILVPCQSPWNTPLLPVKKPGTNDYRPVQDLREVNKRVEDIHPTVPNPYNLLSGLPPSHQWYTVLDLKDAFFCLRLHPTSQPLFAFEWRDPEMGISGQLTWTRLPQGFKNSPTLFNEALHRDLADFRIQHPDLILLQYVDDLLLAATSELDCQQGTRALLQTLGNLGYRASAKKAQICQKQVKYLGYLLKEGQRWLTEARKETVMGQPTPKTPRQLREFLGKAGFCRLFIPGFAEMAAPLYPLTKPGTLFNWGPDQQKAYQEIKQALLTAPALGLPDLTKPFELFVDEKQGYAKGVLTQKLGPWRRPVAYLSKKLDPVAAGWPPCLRMVAAIAVLTKDAGKLTMGQPLVILAPHAVEALVKQPPDRWLSNARMTHYQALLLDTDRVQFGPVVALNPATLLPLPEEGLQHNCLDILAEAHGTRPDLTDQPLPDADHTWYTDGSSLLQEGQRKAGAAVTTETEVIWAKALPAGTSAQRAELIALTQALKMAEGKKLNVYTDSRYAFATAHIHGEIYRRRGWLTSEGKEIKNKDEILALLKALFLPKRLSIIHCPGHQKGHSAEARGNRMADQAARKAAITETPDTSTLLIENSSPSGGSKRTADGSEFEAGKRTADGSEFEKRTADGSEFESPKKKAKVE

SEQ ID NO: 6596 - protein, 2111 aa, synthetic construct; identical to SEQ ID NO: 6595

SEQ ID NO: 6597 - protein, 2091 aa, synthetic construct
MPAAKRVKLDGGDKKYSIGLDIGTNSVGWAVITDEYKVPSKKFKVLGNTDRHSIKKNLIGALLFDSGETAEATRLKRTARRRYTRRKNRICYLQEIFSNEMAKVDDSFFHRLEESFLVEEDKKHERHPIFGNIVDEVAYHEKYPTIYHLRKKLVDSTDKADLRLIYLALAHMIKFRGHFLIEGDLNPDNSDVDKLFIQLVQTYNQLFEENPINASGVDAKAILSARLSKSRRLENLIAQLPGEKKNGLFGNLIALSLGLTPNFKSNFDLAEDAKLQLSKDTYDDDLDNLLAQIGDQYADLFLAAKNLSDAILLSDILRVNTEITKAPLSASMIKRYDEHHQDLTLLKALVRQQLPEKYKEIFFDQSKNGYAGYIDGGASQEEFYKFIKPILEKMDGTEELLVKLNREDLLRKQRTFDNGSIPHQIHLGELHAILRRQEDFYPFLKDNREKIEKILTFRIPYYVGPLARGNSRFAWMTRKSEETITPWNFEEVVDKGASAQSFIERMTNFDKNLPNEKVLPKHSLLYEYFTVYNELTKVKYVTEGMRKPAFLSGEQKKAIVDLLFKTNRKVTVKQLKEDYFKKIECFDSVEISGVEDRFNASLGTYHDLLKIIKDKDFLDNEENEDILEDIVLTLTLFEDREMIEERLKTYAHLFDDKVMKQLKRRRYTGWGRLSRKLINGIRDKQSGKTILDFLKSDGFANRNFMQLIHDDSLTFKEDIQKAQVSGQGDSLHEHIANLAGSPAIKKGILQTVKVVDELVKVMGRHKPENIVIEMARENQTTQKGQKNSRERMKRIEEGIKELGSQILKEHPVENTQLQNEKLYLYYLQNGRDMYVDQELDINRLSDYDVDHIVPQSFLKDDSIDNKVLTRSDKARGKSDNVPSEEVVKKMKNYWRQLLNAKLITQRKFDNLTKAERGGLSELDKAGFIKRQLVETRQITKHVAQILDSRMNTKYDENDKLIREVKVITLKSKLVSDFRKDFQFYKVREINNYHHAHDAYLNAVVGTALIKKYPKLESEFVYGDYKVYDVRKMIAKSEQEIGKATAKYFFYSNIMNFFKTEITLANGEIRKRPLIETNGETGEIVWDKGRDFATVRKVLSMPQVNIVKKTEVQTGGFSKESILPKRNSDKLIARKKDWDPKKYGGFDSPTVAYSVLVVAKVEKGKSKKLKSVKELLGITIMERSSFEKNPIDFLEAKGYKEVKKDLIIKLPKYSLFELENGRKRMLASAGELQKGNELALPSKYVNFLYLASHYEKLKGSPEDNEQKQLFVEQHKHYLDEIIEQISEFSKRVILADANLDKVLSAYNKHRDKPIREQAENIIHLFTLTNLGAPAAFKYFDTTIDRKRYTSTKEVLDATLIHQSITGLYETRIDLSQLGGDGGGGGGGSGGTLNIEDEYRLHEISTEPDVSPGSTWLSDFPQAWAETGGMGLAVRQAPLIIPLKATSTPVSIKQYPMSQEAKLGIKPHIQRLLDQGILVPCQSPWNTPLLPVKKPGTNDYRPVQGLREVNKRVEDIHPTVPNPYNLLSGLPTSHRWYTVLDLKDAFFCLRLHPTSQPLFASEWRDPGMGISGQLTWTRLPQGFKNSPTLFNEALHRGLADFRIQHPDLILLQYVDDLLLAATSELDCQQGTRALLKTLGNLGYRASAKKAQICQKQVKYLGYLLREGQRWLTEARKETVMGQPTPKTPRQLREFLGTAGFCRLWIPRFAEMAAPLYPLTKPGTLFNWGPDQQKAYHEIKQALLTAPALGLPDLTKPFELFVDEKQGYAKGVLTQKLGPWRRPVAYLSKKLDPVAAGWPPCLRMVAAIAVLTKDAGKLTMGQPLVILAPHAVEALVKQPPDRWLSNARMTHYQAMLLDTDRVQFGPVVALNPATLLPLPEEGAPHDCLEILAETHGTEPDLTDQPIPDADHTWYTDGSSFLQEGQRKAGAAVTTETEVIWARALPAGTSAQRAELIALTQALKMAEGKRLNVYTDSRYAFATAHIHGEIYKRRGWLTSEGREIKNKSEILALLKALFLPKRLSIIHCLGHQKGDSAEARGNRLADQAAREAAIKTPPDTSTLLAGKRTADGSEFEKRTADGSEFESPKKKAKVE

SEQ ID NO: 6598 - protein, 2082 aa, synthetic construct
MPAAKRVKLDGGDKKYSIGLDIGTNSVGWAVITDEYKVPSKKFKVLGNTDRHSIKKNLIGALLFDSGETAEATRLKRTARRRYTRRKNRICYLQEIFSNEMAKVDDSFFHRLEESFLVEEDKKHERHPIFGNIVDEVAYHEKYPTIYHLRKKLVDSTDKADLRLIYLALAHMIKFRGHFLIEGDLNPDNSDVDKLFIQLVQTYNQLFEENPINASGVDAKAILSARLSKSRRLENLIAQLPGEKKNGLFGNLIALSLGLTPNFKSNFDLAEDAKLQLSKDTYDDDLDNLLAQIGDQYADLFLAAKNLSDAILLSDILRVNTEITKAPLSASMIKRYDEHHQDLTLLKALVRQQLPEKYKEIFFDQSKNGYAGYIDGGASQEEFYKFIKPILEKMDGTEELLVKLNREDLLRKQRTFDNGSIPHQIHLGELHAILRRQEDFYPFLKDNREKIEKILTFRIPYYVGPLARGNSRFAWMTRKSEETITPWNFEEVVDKGASAQSFIERMTNFDKNLPNEKVLPKHSLLYEYFTVYNELTKVKYVTEGMRKPAFLSGEQKKAIVDLLFKTNRKVTVKQLKEDYFKKIECFDSVEISGVEDRFNASLGTYHDLLKIIKDKDFLDNEENEDILEDIVLTLTLFEDREMIEERLKTYAHLFDDKVMKQLKRRRYTGWGRLSRKLINGIRDKQSGKTILDFLKSDGFANRNFMQLIHDDSLTFKEDIQKAQVSGQGDSLHEHIANLAGSPAIKKGILQTVKVVDELVKVMGRHKPENIVIEMARENQTTQKGQKNSRERMKRIEEGIKELGSQILKEHPVENTQLQNEKLYLYYLQNGRDMYVDQELDINRLSDYDVDHIVPQSFLKDDSIDNKVLTRSDKARGKSDNVPSEEVVKKMKNYWRQLLNAKLITQRKFDNLTKAERGGLSELDKAGFIKRQLVETRQITKHVAQILDSRMNTKYDENDKLIREVKVITLKSKLVSDFRKDFQFYKVREINNYHHAHDAYLNAVVGTALIKKYPKLESEFVYGDYKVYDVRKMIAKSEQEIGKATAKYFFYSNIMNFFKTEITLANGEIRKRPLIETNGETGEIVWDKGRDFATVRKVLSMPQVNIVKKTEVQTGGFSKESILPKRNSDKLIARKKDWDPKKYGGFDSPTVAYSVLVVAKVEKGKSKKLKSVKELLGITIMERSSFEKNPIDFLEAKGYKEVKKDLIIKLPKYSLFELENGRKRMLASAGELQKGNELALPSKYVNFLYLASHYEKLKGSPEDNEQKQLFVEQHKHYLDEIIEQISEFSKRVILADANLDKVLSAYNKHRDKPIREQAENIIHLFTLTNLGAPAAFKYFDTTIDRKRYTSTKEVLDATLIHQSITGLYETRIDLSQLGGDGGGGGGGSGGIPWLMKKPLQLTTLVPLQEYEERLLKQTMLTGSYKEKLQSLFLKYDALWQHWENQVGHRRIKPHHIATGTVNPRPQKQYPINPKAKASIQTVINDLLKQGVLIQQNSIMNTPVYPVPKPDGKWRMVLDYREVNKTIPLIAAQNQHSAGILSSIFRGKYKTTLDLSNGFWAHSITPESYWLTAFTWLGQQYCWTRLPQGFLNSPALFNADVVDLLKEVPNVQVYVDDIYISHDDPREHLEQLEKVFSLLLNAGYVVSLKKSEIAQHEVEFLGFNITKEGRGLTETFKQKLLNITPPRDLKQLQSILGKLNFARNFIPNFSELVKPLYNIIATAPGKYITWTTDNSQQLQNIISMLNSAENLEERNPEVRLIMKVNTSPSAGYIRFYNEFAKRPIMYLNYVYTKAEVKFTNTEKLLTTIHKGLIKALDLGMGQEILVYSPIVSMTKIQKTPLPERKALPIRWITWMSYLEDPRIQFHYDKTLPELQQVPTVTDDIIAKIKHPSEFSMVFYTDGSAIKHPNVNKSHNAGMGIAQVQFKPEFTVINTWSIPLGDHTAQLAEVAAVEFACKKALKIDGPVLIVTDSFYVAESVNKELPYWQSNGFFNNKKKPLKHVSKWKSIADCIQLKPDIIIIHEKGHQPTASTFHTEGNNLADKLATQGSYVVNAGKRTADGSEFEKRTADGSEFESPKKKAKVE

SEQ ID NO: 6599 - protein, 2089 aa, synthetic construct
MPAAKRVKLDGGDKKYSIGLDIGTNSVGWAVITDEYKVPSKKFKVLGNTDRHSIKKNLIGALLFDSGETAEATRLKRTARRRYTRRKNRICYLQEIFSNEMAKVDDSFFHRLEESFLVEEDKKHERHPIFGNIVDEVAYHEKYPTIYHLRKKLVDSTDKADLRLIYLALAHMIKFRGHFLIEGDLNPDNSDVDKLFIQLVQTYNQLFEENPINASGVDAKAILSARLSKSRRLENLIAQLPGEKKNGLFGNLIALSLGLTPNFKSNFDLAEDAKLQLSKDTYDDDLDNLLAQIGDQYADLFLAAKNLSDAILLSDILRVNTEITKAPLSASMIKRYDEHHQDLTLLKALVRQQLPEKYKEIFFDQSKNGYAGYIDGGASQEEFYKFIKPILEKMDGTEELLVKLNREDLLRKQRTFDNGSIPHQIHLGELHAILRRQEDFYPFLKDNREKIEKILTFRIPYYVGPLARGNSRFAWMTRKSEETITPWNFEEVVDKGASAQSFIERMTNFDKNLPNEKVLPKHSLLYEYFTVYNELTKVKYVTEGMRKPAFLSGEQKKAIVDLLFKTNRKVTVKQLKEDYFKKIECFDSVEISGVEDRFNASLGTYHDLLKIIKDKDFLDNEENEDILEDIVLTLTLFEDREMIEERLKTYAHLFDDKVMKQLKRRRYTGWGRLSRKLINGIRDKQSGKTILDFLKSDGFANRNFMQLIHDDSLTFKEDIQKAQVSGQGDSLHEHIANLAGSPAIKKGILQTVKVVDELVKVMGRHKPENIVIEMARENQTTQKGQKNSRERMKRIEEGIKELGSQILKEHPVENTQLQNEKLYLYYLQNGRDMYVDQELDINRLSDYDVDHIVPQSFLKDDSIDNKVLTRSDKARGKSDNVPSEEVVKKMKNYWRQLLNAKLITQRKFDNLTKAERGGLSELDKAGFIKRQLVETRQITKHVAQILDSRMNTKYDENDKLIREVKVITLKSKLVSDFRKDFQFYKVREINNYHHAHDAYLNAVVGTALIKKYPKLESEFVYGDYKVYDVRKMIAKSEQEIGKATAKYFFYSNIMNFFKTEITLANGEIRKRPLIETNGETGEIVWDKGRDFATVRKVLSMPQVNIVKKTEVQTGGFSKESILPKRNSDKLIARKKDWDPKKYGGFDSPTVAYSVLVVAKVEKGKSKKLKSVKELLGITIMERSSFEKNPIDFLEAKGYKEVKKDLIIKLPKYSLFELENGRKRMLASAGELQKGNELALPSKYVNFLYLASHYEKLKGSPEDNEQKQLFVEQHKHYLDEIIEQISEFSKRVILADANLDKVLSAYNKHRDKPIREQAENIIHLFTLTNLGAPAAFKYFDTTIDRKRYTSTKEVLDATLIHQSITGLYETRIDLSQLGGDGGGGGGGSGGVLNLEEEYRLHEKPVPSSIDPSWLQLFPTVWAERAGMGLANQVPPVVVELRSGASPVAVRQYPMSKEAREGIRPHIQRFLDLGVLVPCQSPWNTPLLPVKKPGTNDYRPVQDLREINKRVQDIHPTVPNPYNLLSSLPPSHTWYSVLDLKDAFFCLKLHPNSQPLFAFEWRDPEKGNTGQLTWTRLPQGFKNSPTLFNEALHRDLAPFRALNPQVVLLQYVDDLLVAAPTYRDCKEGTQKLLQELSKLGYRVSAKKAQLCQKEVTYLGYLLKEGKRWLTPARKATVMKIPPPTTPRQVREFLGTAGFCRLWIPGFASLAAPLYPLTKPSIPFIWTEEHQKAFDRIKEALLSAPALALPDLTKPFTLYVDERAGVARGVLTQTLGPWRRPVAYLSKKLDPVASGWPTCLKAVAAVALLLKDADKLTLGQNVTVIASHSLESIVRQPPDRWMTNARMTHYQSLLLNERVSFAPPAVLNPATLLPVESEATPVHRCSEILAEETGTRRDLKDQPLPGVPAWYTDGSSFIAEGKRRAGAAIVDGKRTVWASSLPEGTSAQKAELVALTQALRLAEGKDINIYTDSRYAFATAHIHGAIYKQRGWLTSAGKDIKNKEEILALLEAIHLPKRVAIIHCPGHQKGNDPVATGNRRADEAAKQAALSTRVLAETTKPAGKRTADGSEFEKRTADGSEFESPKKKAKVE

SEQ ID NO: 6600 - protein, 2089 aa, synthetic construct
MPAAKRVKLDGGDKKYSIGLDIGTNSVGWAVITDEYKVPSKKFKVLGNTDRHSIKKNLIGALLFDSGETAEATRLKRTARRRYTRRKNRICYLQEIFSNEMAKVDDSFFHRLEESFLVEEDKKHERHPIFGNIVDEVAYHEKYPTIYHLRKKLVDSTDKADLRLIYLALAHMIKFRGHFLIEGDLNPDNSDVDKLFIQLVQTYNQLFEENPINASGVDAKAILSARLSKSRRLENLIAQLPGEKKNGLFGNLIALSLGLTPNFKSNFDLAEDAKLQLSKDTYDDDLDNLLAQIGDQYADLFLAAKNLSDAILLSDILRVNTEITKAPLSASMIKRYDEHHQDLTLLKALVRQQLPEKYKEIFFDQSKNGYAGYIDGGASQEEFYKFIKPILEKMDGTEELLVKLNREDLLRKQRTFDNGSIPHQIHLGELHAILRRQEDFYPFLKDNREKIEKILTFRIPYYVGPLARGNSRFAWMTRKSEETITPWNFEEVVDKGASAQSFIERMTNFDKNLPNEKVLPKHSLLYEYFTVYNELTKVKYVTEGMRKPAFLSGEQKKAIVDLLFKTNRKVTVKQLKEDYFKKIECFDSVEISGVEDRFNASLGTYHDLLKIIKDKDFLDNEENEDILEDIVLTLTLFEDREMIEERLKTYAHLFDDKVMKQLKRRRYTGWGRLSRKLINGIRDKQSGKTILDFLKSDGFANRNFMQLIHDDSLTFKEDIQKAQVSGQGDSLHEHIANLAGSPAIKKGILQTVKVVDELVKVMGRHKPENIVIEMARENQTTQKGQKNSRERMKRIEEGIKELGSQILKEHPVENTQLQNEKLYLYYLQNGRDMYVDQELDINRLSDYDVDHIVPQSFLKDDSIDNKVLTRSDKARGKSDNVPSEEVVKKMKNYWRQLLNAKLITQRKFDNLTKAERGGLSELDKAGFIKRQLVETRQITKHVAQILDSRMNTKYDENDKLIREVKVITLKSKLVSDFRKDFQFYKVREINNYHHAHDAYLNAVVGTALIKKYPKLESEFVYGDYKVYDVRKMIAKSEQEIGKATAKYFFYSNIMNFFKTEITLANGEIRKRPLIETNGETGEIVWDKGRDFATVRKVLSMPQVNIVKKTEVQTGGFSKESILPKRNSDKLIARKKDWDPKKYGGFDSPTVAYSVLVVAKVEKGKSKKLKSVKELLGITIMERSSFEKNPIDFLEAKGYKEVKKDLIIKLPKYSLFELENGRKRMLASAGELQKGNELALPSKYVNFLYLASHYEKLKGSPEDNEQKQLFVEQHKHYLDEIIEQISEFSKRVILADANLDKVLSAYNKHRDKPIREQAENIIHLFTLTNLGAPAAFKYFDTTIDRKRYTSTKEVLDATLIHQSITGLYETRIDLSQLGGDGGGGGGGSGGVLNLEEEYRLHEKPVPSSIDPSWLQLFPTVWAERAGMGLANQVPPVVVELRSGASPVAVRQYPMSKEAREGIRPHIQRFLDLGVLVPCQSPWNTPLLPVKKPGTNDYRPVQDLREINKRVQDIHPTVPNPYNLLSSLPPSHTWYSVLDLKDAFFCLKLHPNSQPLFAFEWRDPEKGNTGQLTWTRLPQGFKNSPTLFNEALHRDLAPFRALNPQVVLLQYVDDLLVAAPTYRDCKEGTQKLLQELSKLGYRVSAKKAQLCQKEVTYLGYLLKEGKRWLTPARKATVMKIPPPTTPRQVREFLGKAGFCRLFIPGFASLAAPLYPLTKPSIPFIWTEEHQKAFDRIKEALLSAPALALPDLTKPFTLYVDERAGVARGVLTQTLGPWRRPVAYLSKKLDPVASGWPTCLKAVAAVALLLKDADKLTLGQNVTVIASHSLESIVRQPPDRWMTNARMTHYQSLLLNERVSFAPPAVLNPATLLPVESEATPVHRCSEILAEETGTRRDLKDQPLPGVPAWYTDGSSFIAEGKRRAGAAIVDGKRTVWASSLPEGTSAQKAELVALTQALRLAEGKDINIYTDSRYAFATAHIHGAIYKQRGWLTSAGKDIKNKEEILALLEAIHLPKRVAIIHCPGHQKGNDPVATGNRRADEAAKQAALSTRVLAETTKPAGKRTADGSEFEKRTADGSEFESPKKKAKVE

SEQ ID NO: 6601 - protein, 2091 aa, synthetic construct
MPAAKRVKLDGGDKKYSIGLDIGTNSVGWAVITDEYKVPSKKFKVLGNTDRHSIKKNLIGALLFDSGETAEATRLKRTARRRYTRRKNRICYLQEIFSNEMAKVDDSFFHRLEESFLVEEDKKHERHPIFGNIVDEVAYHEKYPTIYHLRKKLVDSTDKADLRLIYLALAHMIKFRGHFLIEGDLNPDNSDVDKLFIQLVQTYNQLFEENPINASGVDAKAILSARLSKSRRLENLIAQLPGEKKNGLFGNLIALSLGLTPNFKSNFDLAEDAKLQLSKDTYDDDLDNLLAQIGDQYADLFLAAKNLSDAILLSDILRVNTEITKAPLSASMIKRYDEHHQDLTLLKALVRQQLPEKYKEIFFDQSKNGYAGYIDGGASQEEFYKFIKPILEKMDGTEELLVKLNREDLLRKQRTFDNGSIPHQIHLGELHAILRRQEDFYPFLKDNREKIEKILTFRIPYYVGPLARGNSRFAWMTRKSEETITPWNFEEVVDKGASAQSFIERMTNFDKNLPNEKVLPKHSLLYEYFTVYNELTKVKYVTEGMRKPAFLSGEQKKAIVDLLFKTNRKVTVKQLKEDYFKKIECFDSVEISGVEDRFNASLGTYHDLLKIIKDKDFLDNEENEDILEDIVLTLTLFEDREMIEERLKTYAHLFDDKVMKQLKRRRYTGWGRLSRKLINGIRDKQSGKTILDFLKSDGFANRNFMQLIHDDSLTFKEDIQKAQVSGQGDSLHEHIANLAGSPAIKKGILQTVKVVDELVKVMGRHKPENIVIEMARENQTTQKGQKNSRERMKRIEEGIKELGSQILKEHPVENTQLQNEKLYLYYLQNGRDMYVDQELDINRLSDYDVDHIVPQSFLKDDSIDNKVLTRSDKARGKSDNVPSEEVVKKMKNYWRQLLNAKLITQRKFDNLTKAERGGLSELDKAGFIKRQLVETRQITKHVAQILDSRMNTKYDENDKLIREVKVITLKSKLVSDFRKDFQFYKVREINNYHHAHDAYLNAVVGTALIKKYPKLESEFVYGDYKVYDVRKMIAKSEQEIGKATAKYFFYSNIMNFFKTEITLANGEIRKRPLIETNGETGEIVWDKGRDFATVRKVLSMPQVNIVKKTEVQTGGFSKESILPKRNSDKLIARKKDWDPKKYGGFDSPTVAYSVLVVAKVEKGKSKKLKSVKELLGITIMERSSFEKNPIDFLEAKGYKEVKKDLIIKLPKYSLFELENGRKRMLASAGELQKGNELALPSKYVNFLYLASHYEKLKGSPEDNEQKQLFVEQHKHYLDEIIEQISEFSKRVILADANLDKVLSAYNKHRDKPIREQAENIIHLFTLTNLGAPAAFKYFDTTIDRKRYTSTKEVLDATLIHQSITGLYETRIDLSQLGGDGGGGGGGSGGTLNIEDEYRLHETSKEPDVPLGSTWLSDFPQAWAETGGMGLAVRQAPLIIPLKATSTPVSIKQYPMSQEARLGIKPHIQRLLDQGILVPCQSPWNTPLLPVKKPGTNDYRPVQDLREVNKRVEDIHPTVPNPYNLLSGLPPSHQWYTVLDLKDAFFCLRLHPTSQPLFAFEWRDPEMGISGQLTWTRLPQGFKNSPTLFNEALHRDLADFRIQHPDLILLQYVDDLLLAATSEQDCQRGTRALLQTLGNLGYRASAKKAQICQKQVKYLGYLLKEGQRWLTEARKETVMGQPTPKTPRQLREFLGKAGFCRLFIPGFAEMAAPLYPLTKPGTLFNWGPDQQKAYQEIKQALLTAPALGLPDLTKPFELFVDEKQGYAKGVLTQKLGPWRRPVAYLSKKLDPVAAGWPPCLRMVAAIAVLTKDAGKLTMGQPLVILAPHAVEALVKQPPDRWLSNARMTHYQAMLLDTDRVQFGPVVALNPATLLPLPEKEAPHDCLEILAETHGTRPDLTDQPIPDADYTWYTDGSSFLQEGQRRAGAAVTTETEVIWARALPAGTSAQRAELIALTQALKMAEGKKLNVYTDSRYAFATAHVHGEIYRRRGWLTSEGREIKNKNEILALLKALFLPKRLSIIHCPGHQKGNSAEARGNRMADQAAREAAMKAVLETSTLLAGKRTADGSEFEKRTADGSEFESPKKKAKVE

SEQ ID NO: 6602 - protein, 2168 aa, synthetic construct
MPAAKRVKLDGGDKKYSIGLDIGTNSVGWAVITDEYKVPSKKFKVLGNTDRHSIKKNLIGALLFDSGETAEATRLKRTARRRYTRRKNRICYLQEIFSNEMAKVDDSFFHRLEESFLVEEDKKHERHPIFGNIVDEVAYHEKYPTIYHLRKKLVDSTDKADLRLIYLALAHMIKFRGHFLIEGDLNPDNSDVDKLFIQLVQTYNQLFEENPINASGVDAKAILSARLSKSRRLENLIAQLPGEKKNGLFGNLIALSLGLTPNFKSNFDLAEDAKLQLSKDTYDDDLDNLLAQIGDQYADLFLAAKNLSDAILLSDILRVNTEITKAPLSASMIKRYDEHHQDLTLLKALVRQQLPEKYKEIFFDQSKNGYAGYIDGGASQEEFYKFIKPILEKMDGTEELLVKLNREDLLRKQRTFDNGSIPHQIHLGELHAILRRQEDFYPFLKDNREKIEKILTFRIPYYVGPLARGNSRFAWMTRKSEETITPWNFEEVVDKGASAQSFIERMTNFDKNLPNEKVLPKHSLLYEYFTVYNELTKVKYVTEGMRKPAFLSGEQKKAIVDLLFKTNRKVTVKQLKEDYFKKIECFDSVEISGVEDRFNASLGTYHDLLKIIKDKDFLDNEENEDILEDIVLTLTLFEDREMIEERLKTYAHLFDDKVMKQLKRRRYTGWGRLSRKLINGIRDKQSGKTILDFLKSDGFANRNFMQLIHDDSLTFKEDIQKAQVSGQGDSLHEHIANLAGSPAIKKGILQTVKVVDELVKVMGRHKPENIVIEMARENQTTQKGQKNSRERMKRIEEGIKELGSQILKEHPVENTQLQNEKLYLYYLQNGRDMYVDQELDINRLSDYDVDHIVPQSFLKDDSIDNKVLTRSDKARGKSDNVPSEEVVKKMKNYWRQLLNAKLITQRKFDNLTKAERGGLSELDKAGFIKRQLVETRQITKHVAQILDSRMNTKYDENDKLIREVKVITLKSKLVSDFRKDFQFYKVREINNYHHAHDAYLNAVVGTALIKKYPKLESEFVYGDYKVYDVRKMIAKSEQEIGKATAKYFFYSNIMNFFKTEITLANGEIRKRPLIETNGETGEIVWDKGRDFATVRKVLSMPQVNIVKKTEVQTGGFSKESILPKRNSDKLIARKKDWDPKKYGGFDSPTVAYSVLVVAKVEKGKSKKLKSVKELLGITIMERSSFEKNPIDFLEAKGYKEVKKDLIIKLPKYSLFELENGRKRMLASAGELQKGNELALPSKYVNFLYLASHYEKLKGSPEDNEQKQLFVEQHKHYLDEIIEQISEFSKRVILADANLDKVLSAYNKHRDKPIREQAENIIHLFTLTNLGAPAAFKYFDTTIDRKRYTSTKEVLDATLIHQSITGLYETRIDLSQLGGDGGGGSGSSGGMDLLKPLTVERKGVKIKGYWNSQADITCVPKDLLQGEEPVRQQNVTTIHGTQEGDVYYVNLKIDGRRINTEVIGTTLDYAIITPGDVPWILKKPLELTIKLDLEEQQGTLLNNSILSKKGKEELKQLFEKYSALWQSWENQVGHRRIRPHKIATGTVKPTPQKQYHINPKAKPDIQIVINDLLKQGVLIQKESTMNTPVYPVPKPNGRWRMVLDYRAVNKVTPLIAVQNQHSYGILGSLFKGRYKTTIDLSNGFWAHPIVPEDYWITAFTWQGKQYCWTVLPQGFLNSPGLFTGDVVDLLQGIPNVEVYVDDVYISHDSEKEHLEYLDILFNRLKEAGYIISLKKSNIANSIVDFLGFQITNEGRGLTDTFKEKLENITAPTTLKQLQSILGLLNFARNFIPDFTELIAPLYALIPKSTKNYVPWQIEHSTTLETLITKLNGAEYLQGRKGDKTLIMKVNASYTTGYIRYYNEGEKKPISYVSIVFSKTELKFTELEKLLTTVHKGLLKALDLSMGQNIHVYSPIVSMQNIQKTPQTAKKALASRWLSWLSYLEDPRIRFFYDPQMPALKDLPAVDTGKDNKKHPSNFQHIFYTDGSAITSPTKEGHLNAGMGIVYFINKDGNLQKQQEWSISLGNHTAQFAEIAAFEFALKKCLPLGGNILVVTDSNYVAKAYNEELDVWASNGFVNNRKKPLKHISKWKSVADLKRLRPDVVVTHEPGHQKLDSSPHAYGNNLADQLATQASFKVHAGKRTADGSEFEKRTADGSEFESPKKKAKVE

SEQ ID NO: 6603 - protein, 2090 aa, synthetic construct
MPAAKRVKLDGGDKKYSIGLDIGTNSVGWAVITDEYKVPSKKFKVLGNTDRHSIKKNLIGALLFDSGETAEATRLKRTARRRYTRRKNRICYLQEIFSNEMAKVDDSFFHRLEESFLVEEDKKHERHPIFGNIVDEVAYHEKYPTIYHLRKKLVDSTDKADLRLIYLALAHMIKFRGHFLIEGDLNPDNSDVDKLFIQLVQTYNQLFEENPINASGVDAKAILSARLSKSRRLENLIAQLPGEKKNGLFGNLIALSLGLTPNFKSNFDLAEDAKLQLSKDTYDDDLDNLLAQIGDQYADLFLAAKNLSDAILLSDILRVNTEITKAPLSASMIKRYDEHHQDLTLLKALVRQQLPEKYKEIFFDQSKNGYAGYIDGGASQEEFYKFIKPILEKMDGTEELLVKLNREDLLRKQRTFDNGSIPHQIHLGELHAILRRQEDFYPFLKDNREKIEKILTFRIPYYVGPLARGNSRFAWMTRKSEETITPWNFEEVVDKGASAQSFIERMTNFDKNLPNEKVLPKHSLLYEYFTVYNELTKVKYVTEGMRKPAFLSGEQKKAIVDLLFKTNRKVTVKQLKEDYFKKIECFDSVEISGVEDRFNASLGTYHDLLKIIKDKDFLDNEENEDILEDIVLTLTLFEDREMIEERLKTYAHLFDDKVMKQLKRRRYTGWGRLSRKLINGIRDKQSGKTILDFLKSDGFANRNFMQLIHDDSLTFKEDIQKAQVSGQGDSLHEHIANLAGSPAIKKGILQTVKVVDELVKVMGRHKPENIVIEMARENQTTQKGQKNSRERMKRIEEGIKELGSQILKEHPVENTQLQNEKLYLYYLQNGRDMYVDQELDINRLSDYDVDHIVPQSFLKDDSIDNKVLTRSDKARGKSDNVPSEEVVKKMKNYWRQLLNAKLITQRKFDNLTKAERGGLSELDKAGFIKRQLVETRQITKHVAQILDSRMNTKYDENDKLIREVKVITLKSKLVSDFRKDFQFYKVREINNYHHAHDAYLNAVVGTALIKKYPKLESEFVYGDYKVYDVRKMIAKSEQEIGKATAKYFFYSNIMNFFKTEITLANGEIRKRPLIETNGETGEIVWDKGRDFATVRKVLSMPQVNIVKKTEVQTGGFSKESILPKRNSDKLIARKKDWDPKKYGGFDSPTVAYSVLVVAKVEKGKSKKLKSVKELLGITIMERSSFEKNPIDFLEAKGYKEVKKDLIIKLPKYSLFELENGRKRMLASAGELQKGNELALPSKYVNFLYLASHYEKLKGSPEDNEQKQLFVEQHKHYLDEIIEQISEFSKRVILADANLDKVLSAYNKHRDKPIREQAENIIHLFTLTNLGAPAAFKYFDTTIDRKRYTSTKEVLDATLIHQSITGLYETRIDLSQLGGDGGGGSGSSGGTLQLEEEYRLFEPESTQKQEMDIWLKNFPQAWAETGGMGTAHCQAPVLIQLKATATPISIRQYPMPHEAYQGIKPHIRRMLDQGILKPCQSPWNTPLLPVKKPGTEDYRPVQDLREVNKRVEDIHPTVPNPYNLLSTLPPSHPWYTVLDLKDAFFCLRLHSESQLLFAFEWRDPEIGLSGQLTWTRLPQGFKNSPTLFNEALHSDLADFRVRYPALVLLQYVDDLLLAAATRTECLEGTKALLETLGNKGYRASAKKAQICLQEVTYLGYSLKDGQRWLTKARKEAILSIPVPKNSRQVREFLGKAGYCRLFIPGFAELAAPLYPLTRPGTLFQWGTEQQLAFEDIKKALLSSPALGLPDITKPFELFIDENSGFAKGVLVQKLGPWKRPVAYLSKKLDTVASGWPPCLRMVAAIAILVKDAGKLTLGQPLTILTSHPVEALVRQPPNKWLSNARMTHYQAMLLDAERVHFGPTVSLNPATLLPLPSGGNHHDCLQILAETHGTRPDLTDQPLPDADLTWYTDGSSFIRNGEREAGAAVTTESEVIWAAPLPPGTSAQRAELIALTQALKMAEGKKLTVYTDSRYAFATTHVHGEIYRRRGWLTSEGKEIKNKNEILALLEALFLPKRLSIIHCPGHQKGDSPQAKGNRLADDTAKKAATETHSSLTVLPAGKRTADGSEFEKRTADGSEFESPKKKAKVE

SEQ ID NO: 6604 - protein, 2213 aa, synthetic construct
MPAAKRVKLDGGDKKYSIGLDIGTNSVGWAVITDEYKVPSKKFKVLGNTDRHSIKKNLIGALLFDSGETAEATRLKRTARRRYTRRKNRICYLQEIFSNEMAKVDDSFFHRLEESFLVEEDKKHERHPIFGNIVDEVAYHEKYPTIYHLRKKLVDSTDKADLRLIYLALAHMIKFRGHFLIEGDLNPDNSDVDKLFIQLVQTYNQLFEENPINASGVDAKAILSARLSKSRRLENLIAQLPGEKKNGLFGNLIALSLGLTPNFKSNFDLAEDAKLQLSKDTYDDDLDNLLAQIGDQYADLFLAAKNLSDAILLSDILRVNTEITKAPLSASMIKRYDEHHQDLTLLKALVRQQLPEKYKEIFFDQSKNGYAGYIDGGASQEEFYKFIKPILEKMDGTEELLVKLNREDLLRKQRTFDNGSIPHQIHLGELHAILRRQEDFYPFLKDNREKIEKILTFRIPYYVGPLARGNSRFAWMTRKSEETITPWNFEEVVDKGASAQSFIERMTNFDKNLPNEKVLPKHSLLYEYFTVYNELTKVKYVTEGMRKPAFLSGEQKKAIVDLLFKTNRKVTVKQLKEDYFKKIECFDSVEISGVEDRFNASLGTYHDLLKIIKDKDFLDNEENEDILEDIVLTLTLFEDREMIEERLKTYAHLFDDKVMKQLKRRRYTGWGRLSRKLINGIRDKQSGKTILDFLKSDGFANRNFMQLIHDDSLTFKEDIQKAQVSGQGDSLHEHIANLAGSPAIKKGILQTVKVVDELVKVMGRHKPENIVIEMARENQTTQKGQKNSRERMKRIEEGIKELGSQILKEHPVENTQLQNEKLYLYYLQNGRDMYVDQELDINRLSDYDVDHIVPQSFLKDDSIDNKVLTRSDKARGKSDNVPSEEVVKKMKNYWRQLLNAKLITQRKFDNLTKAERGGLSELDKAGFIKRQLVETRQITKHVAQILDSRMNTKYDENDKLIREVKVITLKSKLVSDFRKDFQFYKVREINNYHHAHDAYLNAVVGTALIKKYPKLESEFVYGDYKVYDVRKMIAKSEQEIGKATAKYFFYSNIMNFFKTEITLANGEIRKRPLIETNGETGEIVWDKGRDFATVRKVLSMPQVNIVKKTEVQTGGFSKESILPKRNSDKLIARKKDWDPKKYGGFDSPTVAYSVLVVAKVEKGKSKKLKSVKELLGITIMERSSFEKNPIDFLEAKGYKEVKKDLIIKLPKYSLFELENGRKRMLASAGELQKGNELALPSKYVNFLYLASHYEKLKGSPEDNEQKQLFVEQHKHYLDEIIEQISEFSKRVILADANLDKVLSAYNKHRDKPIREQAENIIHLFTLTNLGAPAAFKYFDTTIDRKRYTSTKEVLDATLIHQSITGLYETRIDLSQLGGDGGGGSGSSGGTLGDQGSRGSDPLPEPRVTLTVEGIPTEFLVNTGAEHSVLTKPMGKMGSKRTVVAGATGSKVYPWTTKRLLKIGQKQVTHSFLVIPECPAPLLGRDLLTKLKAQIQFSTEGPQVTWEDRPAMCLVLNLEEEYRLHEKPVPPSIDPSWLQLFPMVWAEKAGMGLANQVPPVVVELKSDASPVAVRQYPMSKEAREGIRPHIQRFLDLGILVPCQSPWNTPLLPVKKPGTNDYRPVQDLREVNKRVQDIHPTVPNPYNLLSSLPPSHTWYSVLDLKDAFFCLKLHPNSQPLFAFEWRDPEKGNTGQLTWTRLPQGFKNSPTLFDEALHRDLASFRALNPQVVMLQYVDDLLVAAPTYRDCKEGTRRLLQELSKLGYRVSAKKAQLCREEVTYLGYLLKGGKRWLTPARKATVMKIPTPTTPRQVREFLGTAGFCRLWIPGFASLAAPLYPLTREKVPFTWTEAHQEAFGRIKEALLSAPALALPDLTKPFALYVDEKEGVARGVLTQTLGPWRRPVAYLSKKLDPVASGWPTCLKAIAAVALLLKDADKLTLGQNVLVIAPHNLESIVRQPPDRWMTNARMTHYQSLLLNERVSFAPPAILNPATLLPVESDDTPIHICSEILAEETGTRPDLRDQPLPGVPAWYTDGSSFIMDGRRQAGAAIVDNKRTVWASNLPEGTSAQKAELIALTQALRLAEGKSINIYTDSRYAFATAHVHGAIYKQRGLLTSAGKDIKNKEEILALLEAIHLPKRVAIIHCPGHQRGTDPVATGNRKADEAAKQAAQSTRILTETTKNAGKRTADGSEFEKRTADGSEFESPKKKAKVE

SEQ ID NO: 6605 - protein, 2091 aa, synthetic construct
MPAAKRVKLDGGDKKYSIGLDIGTNSVGWAVITDEYKVPSKKFKVLGNTDRHSIKKNLIGALLFDSGETAEATRLKRTARRRYTRRKNRICYLQEIFSNEMAKVDDSFFHRLEESFLVEEDKKHERHPIFGNIVDEVAYHEKYPTIYHLRKKLVDSTDKADLRLIYLALAHMIKFRGHFLIEGDLNPDNSDVDKLFIQLVQTYNQLFEENPINASGVDAKAILSARLSKSRRLENLIAQLPGEKKNGLFGNLIALSLGLTPNFKSNFDLAEDAKLQLSKDTYDDDLDNLLAQIGDQYADLFLAAKNLSDAILLSDILRVNTEITKAPLSASMIKRYDEHHQDLTLLKALVRQQLPEKYKEIFFDQSKNGYAGYIDGGASQEEFYKFIKPILEKMDGTEELLVKLNREDLLRKQRTFDNGSIPHQIHLGELHAILRRQEDFYPFLKDNREKIEKILTFRIPYYVGPLARGNSRFAWMTRKSEETITPWNFEEVVDKGASAQSFIERMTNFDKNLPNEKVLPKHSLLYEYFTVYNELTKVKYVTEGMRKPAFLSGEQKKAIVDLLFKTNRKVTVKQLKEDYFKKIECFDSVEISGVEDRFNASLGTYHDLLKIIKDKDFLDNEENEDILEDIVLTLTLFEDREMIEERLKTYAHLFDDKVMKQLKRRRYTGWGRLSRKLINGIRDKQSGKTILDFLKSDGFANRNFMQLIHDDSLTFKEDIQKAQVSGQGDSLHEHIANLAGSPAIKKGILQTVKVVDELVKVMGRHKPENIVIEMARENQTTQKGQKNSRERMKRIEEGIKELGSQILKEHPVENTQLQNEKLYLYYLQNGRDMYVDQELDINRLSDYDVDHIVPQSFLKDDSIDNKVLTRSDKARGKSDNVPSEEVVKKMKNYWRQLLNAKLITQRKFDNLTKAERGGLSELDKAGFIKRQLVETRQITKHVAQILDSRMNTKYDENDKLIREVKVITLKSKLVSDFRKDFQFYKVREINNYHHAHDAYLNAVVGTALIKKYPKLESEFVYGDYKVYDVRKMIAKSEQEIGKATAKYFFYSNIMNFFKTEITLANGEIRKRPLIETNGETGEIVWDKGRDFATVRKVLSMPQVNIVKKTEVQTGGFSKESILPKRNSDKLIARKKDWDPKKYGGFDSPTVAYSVLVVAKVEKGKSKKLKSVKELLGITIMERSSFEKNPIDFLEAKGYKEVKKDLIIKLPKYSLFELENGRKRMLASAGELQKGNELALPSKYVNFLYLASHYEKLKGSPEDNEQKQLFVEQHKHYLDEIIEQISEFSKRVILADANLDKVLSAYNKHRDKPIREQAENIIHLFTLTNLGAPAAFKYFDTTIDRKRYTSTKEVLDATLIHQSITGLYETRIDLSQLGGDGGGGSGSSGGTLGIEDEYRLHETSTEPDVSLGSTWLSDFPQAWAETGGMGLAVRQAPLIIPLKATSTPVSIQQYPMSHEARLGIKPHIQRLLDQGILVPCQSPWNTPLLPVKKPGTNDYRPVQDLREVNKRVEDIHPTVPNPYNLLSGLPPSHQWYTVLDLKDAFFCLRLHPTSQPLFAFEWRDPGMGISGQLTWTRLPQGFKNSPTLFDEALHRDLADFRIQHPDLILLQYVDDILLAATSELDCQQGTRALLQTLGDLGYRASAKKAQICQKQVKYLGYLLREGQRWLTEARKETVMGQPVPKTPRQLREFLGTAGFCRLWIPGFAEMAAPLYPLTKTGTLFSWGPDQQKAYQEIKQALLTAPALGLPDLTKPFELFVDEKQGYAKGVLTQKLGPWRRPVAYLSKKLDPVAAGWPPCLRMVAAIAVLTKDAGKLTMGQPLVILAPHAVEALVKQPPDRWLSNARMTHYQAMLLDTDRVQFGPVVALNPATLLPLPEEGAPHDCLEILAETHGTRPDLTDQPIPDADHTWYTDGSSFLQEGQRKAGAAVTTETEVIWAGALPAGTSAQRAELIALTQALKMAEGKRLNVYTDSRYAFATAHIHGEIYRRRGLLTSEGREIKNKSEILALLKALFLPKRLSIIHCLGHQKGDSAEARGNRLADQAAREAAIKTPPDTSTLLAGKRTADGSEFEKRTADGSEFESPKKKAKVE

SEQ ID NO: 6606 - protein, 2091 aa, synthetic construct
MPAAKRVKLDGGDKKYSIGLDIGTNSVGWAVITDEYKVPSKKFKVLGNTDRHSIKKNLIGALLFDSGETAEATRLKRTARRRYTRRKNRICYLQEIFSNEMAKVDDSFFHRLEESFLVEEDKKHERHPIFGNIVDEVAYHEKYPTIYHLRKKLVDSTDKADLRLIYLALAHMIKFRGHFLIEGDLNPDNSDVDKLFIQLVQTYNQLFEENPINASGVDAKAILSARLSKSRRLENLIAQLPGEKKNGLFGNLIALSLGLTPNFKSNFDLAEDAKLQLSKDTYDDDLDNLLAQIGDQYADLFLAAKNLSDAILLSDILRVNTEITKAPLSASMIKRYDEHHQDLTLLKALVRQQLPEKYKEIFFDQSKNGYAGYIDGGASQEEFYKFIKPILEKMDGTEELLVKLNREDLLRKQRTFDNGSIPHQIHLGELHAILRRQEDFYPFLKDNREKIEKILTFRIPYYVGPLARGNSRFAWMTRKSEETITPWNFEEVVDKGASAQSFIERMTNFDKNLPNEKVLPKHSLLYEYFTVYNELTKVKYVTEGMRKPAFLSGEQKKAIVDLLFKTNRKVTVKQLKEDYFKKIECFDSVEISGVEDRFNASLGTYHDLLKIIKDKDFLDNEENEDILEDIVLTLTLFEDREMIEERLKTYAHLFDDKVMKQLKRRRYTGWGRLSRKLINGIRDKQSGKTILDFLKSDGFANRNFMQLIHDDSLTFKEDIQKAQVSGQGDSLHEHIANLAGSPAIKKGILQTVKVVDELVKVMGRHKPENIVIEMARENQTTQKGQKNSRERMKRIEEGIKELGSQILKEHPVENTQLQNEKLYLYYLQNGRDMYVDQELDINRLSDYDVDHIVPQSFLKDDSIDNKVLTRSDKARGKSDNVPSEEVVKKMKNYWRQLLNAKLITQRKFDNLTKAERGGLSELDKAGFIKRQLVETRQITKHVAQILDSRMNTKYDENDKLIREVKVITLKSKLVSDFRKDFQFYKVREINNYHHAHDAYLNAVVGTALIKKYPKLESEFVYGDYKVYDVRKMIAKSEQEIGKATAKYFFYSNIMNFFKTEITLANGEIRKRPLIETNGETGEIVWDKGRDFATVRKVLSMPQVNIVKKTEVQTGGFSKESILPKRNSDKLIARKKDWDPKKYGGFDSPTVAYSVLVVAKVEKGKSKKLKSVKELLGITIMERSSFEKNPIDFLEAKGYKEVKKDLIIKLPKYSLFELENGRKRMLASAGELQKGNELALPSKYVNFLYLASHYEKLKGSPEDNEQKQLFVEQHKHYLDEIIEQISEFSKRVILADANLDKVLSAYNKHRDKPIREQAENIIHLFTLTNLGAPAAFKYFDTTIDRKRYTSTKEVLDATLIHQSITGLYETRIDLSQLGGDGGGGSGSSGGTLGIEDEYRLHETSTEPDVSLGSTWLSDFPQAWAETGGMGLAVRQAPLIIPLKATSTPVSIQQYPMSHEARLGIKPHIQRLLDQGILVPCQSPWNTPLLPVKKPGTNDYRPVQDLREVNKRVEDIHPTVPNPYNLLSGLPPSHQWYTVLDLKDAFFCLRLHPTSQPLFAFEWRDPGMGISGQLTWTRLPQGFKNSPTLFNEALHRDLADFRIQHPDLILLQYVDDILLAATSELDCQQGTRALLQTLGDLGYRASAKKAQICQKQVKYLGYLLREGQRWLTEARKETVMGQPVPKTPRQLREFLGTAGFCRLWIPGFAEMAAPLYPLTKPGTLFSWGPDQQKAYQEIKQALLTAPALGLPDLTKPFELFVDEKQGYAKGVLTQKLGPWRRPVAYLSKKLDPVAAGWPPCLRMVAAIAVLTKDAGKLTMGQPLVILAPHAVEALVKQPPDRWLSNARMTHYQAMLLDTDRVQFGPVVALNPATLLPLPEEGAPHDCLEILAETHGTRPDLTDQPIPDADHTWYTDGSSFLQEGQRKAGAAVTTETEVIWAGALPAGTSAQRAELIALTQALKMAEGKRLNVYTDSRYAFATAHIHGEIYRRRGWLTSEGREIKNKSEILALLKALFLPKRLSIIHCLGHQKGDSAEARGNRLADQAAREAAIKTPPDTSTLLAGKRTADGSEFEKRTADGSEFESPKKKAKVE

SEQ ID NO: 6607 - protein, 2091 aa, synthetic construct
MPAAKRVKLDGGDKKYSIGLDIGTNSVGWAVITDEYKVPSKKFKVLGNTDRHSIKKNLIGALLFDSGETAEATRLKRTARRRYTRRKNRICYLQEIFSNEMAKVDDSFFHRLEESFLVEEDKKHERHPIFGNIVDEVAYHEKYPTIYHLRKKLVDSTDKADLRLIYLALAHMIKFRGHFLIEGDLNPDNSDVDKLFIQLVQTYNQLFEENPINASGVDAKAILSARLSKSRRLENLIAQLPGEKKNGLFGNLIALSLGLTPNFKSNFDLAEDAKLQLSKDTYDDDLDNLLAQIGDQYADLFLAAKNLSDAILLSDILRVNTEITKAPLSASMIKRYDEHHQDLTLLKALVRQQLPEKYKEIFFDQSKNGYAGYIDGGASQEEFYKFIKPILEKMDGTEELLVKLNREDLLRKQRTFDNGSIPHQIHLGELHAILRRQEDFYPFLKDNREKIEKILTFRIPYYVGPLARGNSRFAWMTRKSEETITPWNFEEVVDKGASAQSFIERMTNFDKNLPNEKVLPKHSLLYEYFTVYNELTKVKYVTEGMRKPAFLSGEQKKAIVDLLFKTNRKVTVKQLKEDYFKKIECFDSVEISGVEDRFNASLGTYHDLLKIIKDKDFLDNEENEDILEDIVLTLTLFEDREMIEERLKTYAHLFDDKVMKQLKRRRYTGWGRLSRKLINGIRDKQSGKTILDFLKSDGFANRNFMQLIHDDSLTFKEDIQKAQVSGQGDSLHEHIANLAGSPAIKKGILQTVKVVDELVKVMGRHKPENIVIEMARENQTTQKGQKNSRERMKRIEEGIKELGSQILKEHPVENTQLQNEKLYLYYLQNGRDMYVDQELDINRLSDYDVDHIVPQSFLKDDSIDNKVLTRSDKARGKSDNVPSEEVVKKMKNYWRQLLNAKLITQRKFDNLTKAERGGLSELDKAGFIKRQLVETRQITKHVAQILDSRMNTKYDENDKLIREVKVITLKSKLVSDFRKDFQFYKVREINNYHHAHDAYLNAVVGTALIKKYPKLESEFVYGDYKVYDVRKMIAKSEQEIGKATAKYFFYSNIMNFFKTEITLANGEIRKRPLIETNGETGEIVWDKGRDFATVRKVLSMPQVNIVKKTEVQTGGFSKESILPKRNSDKLIARKKDWDPKKYGGFDSPTVAYSVLVVAKVEKGKSKKLKSVKELLGITIMERSSFEKNPIDFLEAKGYKEVKKDLIIKLPKYSLFELENGRKRMLASAGELQKGNELALPSKYVNFLYLASHYEKLKGSPEDNEQKQLFVEQHKHYLDEIIEQISEFSKRVILADANLDKVLSAYNKHRDKPIREQAENIIHLFTLTNLGAPAAFKYFDTTIDRKRYTSTKEVLDATLIHQSITGLYETRIDLSQLGGDGGGGSGSSGGTLNIEDEYRLHETSKGPDVPLGSTWLSDFPQAWAETGGMGLAVRQAPLIIPLKATSTPVSIKQYPMSQEARLGIKPHIQRLLDQGILVPCQSPWNTPLLPVKKPGTNDYRPVQDLREVNKRVEDIHPTVPNPYNLLSGLPPSHQWYTVLDLKDAFFCLRLHPTSQSLFAFEWRDPEMGISGQLTWTRLPQGFKNSPTLFNEALHRDLADFRIQHPDLILLQYVDDLLLAATSELDCQQGTRALLQTLGDLGYRASAKKAQICQKQVKYLGYLLKEGQRWLTEARKETVMGQPTPKTPRQLREFLGKAGFCRLFIPGFAEMAAPLYPLTKPGTLFEWGPDQQKAYQEIKQALLTAPALGLPDLTKPFELFVDEKQGYAKGVLTQKLGPWRRPVAYLSKKLDPVAAGWPPCLRMVAAIAVLTKDAGKLTMGQPLVILAPHAVEALVKQPPDRWLSNARMTHYQALLLDTDRVQFGPIVALNPATLLPLPEEGLQHDCLDILAEAHGTRPDLTDQPLPDADHTWYTDGSSFLQEGQRKAGAAVTTETEVVWAKALPAGTSAQRAELIALTQALKMAEGKKLNVYTDSRYAFATAHIHGEIYRRRGWLTSEGKEIKNKDEILALLKALFLPKRLSIIHCPGHQKGNRAEARGNRMADQAAREVATRETPETSTLLAGKRTADGSEFEKRTADGSEFESPKKKAKVE

SEQ ID NO: 6608 - protein, 2082 aa, synthetic construct
MPAAKRVKLDGGDKKYSIGLDIGTNSVGWAVITDEYKVPSKKFKVLGNTDRHSIKKNLIGALLFDSGETAEATRLKRTARRRYTRRKNRICYLQEIFSNEMAKVDDSFFHRLEESFLVEEDKKHERHPIFGNIVDEVAYHEKYPTIYHLRKKLVDSTDKADLRLIYLALAHMIKFRGHFLIEGDLNPDNSDVDKLFIQLVQTYNQLFEENPINASGVDAKAILSARLSKSRRLENLIAQLPGEKKNGLFGNLIALSLGLTPNFKSNFDLAEDAKLQLSKDTYDDDLDNLLAQIGDQYADLFLAAKNLSDAILLSDILRVNTEITKAPLSASMIKRYDEHHQDLTLLKALVRQQLPEKYKEIFFDQSKNGYAGYIDGGASQEEFYKFIKPILEKMDGTEELLVKLNREDLLRKQRTFDNGSIPHQIHLGELHAILRRQEDFYPFLKDNREKIEKILTFRIPYYVGPLARGNSRFAWMTRKSEETITPWNFEEVVDKGASAQSFIERMTNFDKNLPNEKVLPKHSLLYEYFTVYNELTKVKYVTEGMRKPAFLSGEQKKAIVDLLFKTNRKVTVKQLKEDYFKKIECFDSVEISGVEDRFNASLGTYHDLLKIIKDKDFLDNEENEDILEDIVLTLTLFEDREMIEERLKTYAHLFDDKVMKQLKRRRYTGWGRLSRKLINGIRDKQSGKTILDFLKSDGFANRNFMQLIHDDSLTFKEDIQKAQVSGQGDSLHEHIANLAGSPAIKKGILQTVKVVDELVKVMGRHKPENIVIEMARENQTTQKGQKNSRERMKRIEEGIKELGSQILKEHPVENTQLQNEKLYLYYLQNGRDMYVDQELDINRLSDYDVDHIVPQSFLKDDSIDNKVLTRSDKARGKSDNVPSEEVVKKMKNYWRQLLNAKLITQRKFDNLTKAERGGLSELDKAGFIKRQLVETRQITKHVAQILDSRMNTKYDENDKLIREVKVITLKSKLVSDFRKDFQFYKVREINNYHHAHDAYLNAVVGTALIKKYPKLESEFVYGDYKVYDVRKMIAKSEQEIGKATAKYFFYSNIMNFFKTEITLANGEIRKRPLIETNGETGEIVWDKGRDFATVRKVLSMPQVNIVKKTEVQTGGFSKESILPKRNSDKLIARKKDWDPKKYGGFDSPTVAYSVLVVAKVEKGKSKKLKSVKELLGITIMERSSFEKNPIDFLEAKGYKEVKKDLIIKLPKYSLFELENGRKRMLASAGELQKGNELALPSKYVNFLYLASHYEKLKGSPEDNEQKQLFVEQHKHYLDEIIEQISEFSKRVILADANLDKVLSAYNKHRDKPIREQAENIIHLFTLTNLGAPAAFKYFDTTIDRKRYTSTKEVLDATLIHQSITGLYETRIDLSQLGGDGGGGSGSSGGVPWLMKKPLQLTVLVPLHEYQERLLQQTALPKEQKELLQKLFLKYDALWQHWENQVGHRRIKPHNIATGTLAPRPQKQYPINPKAKPSIQIVIDDLLKQGVLIQQNSTMNTPVYPVPKPDGKWRMVLDYREVNKTIPLIAAQNQHSAGILSSIYRGKYKTTLDLTNGFWAHPITPESYWLTAFTWQGKQYCWTRLPQGFLNSPALFNADVVDLLKEIPNVQAYVDDIYISHDDPQEHLEQLEKIFSILLNAGYVVSLKKSEIAQREVEFLGFNITKEGRGLTDTFKQKLLNITPPKDLKQLQSILGLLNFARNFIPNYSELVKPLYTIVAPANGKFISWTEDNSNQLQHIISVLNQADNLEERNPETRLIIKVNSSPSAGYIRYYNEGSKRPIMYVNYIFSKAEAKFTQTEKLLTTMHKGLIKAMDLAMGQEILVYSPIVSMTKIQRTPLPERKALPVRWITWMTYLEDPRIQFHYDKSLPELQQIPNVTEDVIAKTKHPSEFAMVFYTDGSAIKHPDVNKSHSAGMGIAQVQFIPEYKIVHQWSIPLGDHTAQLAEIAAVEFACKKALKISGPVLIVTDSFYVAESANKELPYWKSNGFLNNKKKPLRHVSKWKSIAECLQLKPDIIIMHEKGHQQPMTTLHTEGNNLADKLATQGSYVVHAGKRTADGSEFEKRTADGSEFESPKKKAKVE

SEQ ID NO: 6609 - protein, 2082 aa, synthetic construct
MPAAKRVKLDGGDKKYSIGLDIGTNSVGWAVITDEYKVPSKKFKVLGNTDRHSIKKNLIGALLFDSGETAEATRLKRTARRRYTRRKNRICYLQEIFSNEMAKVDDSFFHRLEESFLVEEDKKHERHPIFGNIVDEVAYHEKYPTIYHLRKKLVDSTDKADLRLIYLALAHMIKFRGHFLIEGDLNPDNSDVDKLFIQLVQTYNQLFEENPINASGVDAKAILSARLSKSRRLENLIAQLPGEKKNGLFGNLIALSLGLTPNFKSNFDLAEDAKLQLSKDTYDDDLDNLLAQIGDQYADLFLAAKNLSDAILLSDILRVNTEITKAPLSASMIKRYDEHHQDLTLLKALVRQQLPEKYKEIFFDQSKNGYAGYIDGGASQEEFYKFIKPILEKMDGTEELLVKLNREDLLRKQRTFDNGSIPHQIHLGELHAILRRQEDFYPFLKDNREKIEKILTFRIPYYVGPLARGNSRFAWMTRKSEETITPWNFEEVVDKGASAQSFIERMTNFDKNLPNEKVLPKHSLLYEYFTVYNELTKVKYVTEGMRKPAFLSGEQKKAIVDLLFKTNRKVTVKQLKEDYFKKIECFDSVEISGVEDRFNASLGTYHDLLKIIKDKDFLDNEENEDILEDIVLTLTLFEDREMIEERLKTYAHLFDDKVMKQLKRRRYTGWGRLSRKLINGIRDKQSGKTILDFLKSDGFANRNFMQLIHDDSLTFKEDIQKAQVSGQGDSLHEHIANLAGSPAIKKGILQTVKVVDELVKVMGRHKPENIVIEMARENQTTQKGQKNSRERMKRIEEGIKELGSQILKEHPVENTQLQNEKLYLYYLQNGRDMYVDQELDINRLSDYDVDHIVPQSFLKDDSIDNKVLTRSDKARGKSDNVPSEEVVKKMKNYWRQLLNAKLITQRKFDNLTKAERGGLSELDKAGFIKRQLVETRQITKHVAQILDSRMNTKYDENDKLIREVKVITLKSKLVSDFRKDFQFYKVREINNYHHAHDAYLNAVVGTALIKKYPKLESEFVYGDYKVYDVRKMIAKSEQEIGKATAKYFFYSNIMNFFKTEITLANGEIRKRPLIETNGETGEIVWDKGRDFATVRKVLSMPQVNIVKKTEVQTGGFSKESILPKRNSDKLIARKKDWDPKKYGGFDSPTVAYSVLVVAKVEKGKSKKLKSVKELLGITIMERSSFEKNPIDFLEAKGYKEVKKDLIIKLPKYSLFELENGRKRMLASAGELQKGNELALPSKYVNFLYLASHYEKLKGSPEDNEQKQLFVEQHKHYLDEIIEQISEFSKRVILADANLDKVLSAYNKHRDKPIREQAENIIHLFTLTNLGAPAAFKYFDTTIDRKRYTSTKEVLDATLIHQSITGLYETRIDLSQLGGDGGGGSGSSGGIPWLMKKPLQLTTLVPLQEYEERLLKQTMLTGSYKEKLQSLFLKYDALWQHWENQVGHRRIKPHHIATGTVNPRPQKQYPINPKAKASIQTVINDLLKQGVLIQQNSIMNTPVYPVPKPDGKWRMVLDYREVNKTIPLIAAQNQHSAGILSSIFRGKYKTTLDLSNGFWAHSITPESYWLTAFTWLGQQYCWTRLPQGFLNSPALFNADVVDLLKEVPNVQVYVDDIYISHDDPREHLEQLEKVFSLLLNAGYVVSLKKSEIAQHEVEFLGFNITKEGRGLTETFKQKLLNITPPRDLKQLQSILGLLNFARNFIPNFSELVKPLYNIIATAPGKYITWTTDNSQQLQNIISMLNSAENLEERNPEVRLIMKVNTSPSAGYIRFYNEFAKRPIMYLNYVYTKAEVKFTNTEKLLTTIHKGLIKALDLGMGQEILVYSPIVSMTKIQKTPLPERKALPIRWITWMSYLEDPRIQFHYDKTLPELQQVPTVTDDIIAKIKHPSEFSMVFYTDGSAIKHPNVNKSHNAGMGIAQVQFKPEFTVINTWSIPLGDHTAQLAEVAAVEFACKKALKIDGPVLIVTDSFYVAESVNKELPYWQSNGFFNNKKKPLKHVSKWKSIADCIQLKPDIIIIHEKGHQPTASTFHTEGNNLADKLATQGSYVVNAGKRTADGSEFEKRTADGSEFESPKKKAKVE

SEQ ID NO: 6610 - protein, 2082 aa, synthetic construct
MPAAKRVKLDGGDKKYSIGLDIGTNSVGWAVITDEYKVPSKKFKVLGNTDRHSIKKNLIGALLFDSGETAEATRLKRTARRRYTRRKNRICYLQEIFSNEMAKVDDSFFHRLEESFLVEEDKKHERHPIFGNIVDEVAYHEKYPTIYHLRKKLVDSTDKADLRLIYLALAHMIKFRGHFLIEGDLNPDNSDVDKLFIQLVQTYNQLFEENPINASGVDAKAILSARLSKSRRLENLIAQLPGEKKNGLFGNLIALSLGLTPNFKSNFDLAEDAKLQLSKDTYDDDLDNLLAQIGDQYADLFLAAKNLSDAILLSDILRVNTEITKAPLSASMIKRYDEHHQDLTLLKALVRQQLPEKYKEIFFDQSKNGYAGYIDGGASQEEFYKFIKPILEKMDGTEELLVKLNREDLLRKQRTFDNGSIPHQIHLGELHAILRRQEDFYPFLKDNREKIEKILTFRIPYYVGPLARGNSRFAWMTRKSEETITPWNFEEVVDKGASAQSFIERMTNFDKNLPNEKVLPKHSLLYEYFTVYNELTKVKYVTEGMRKPAFLSGEQKKAIVDLLFKTNRKVTVKQLKEDYFKKIECFDSVEISGVEDRFNASLGTYHDLLKIIKDKDFLDNEENEDILEDIVLTLTLFEDREMIEERLKTYAHLFDDKVMKQLKRRRYTGWGRLSRKLINGIRDKQSGKTILDFLKSDGFANRNFMQLIHDDSLTFKEDIQKAQVSGQGDSLHEHIANLAGSPAIKKGILQTVKVVDELVKVMGRHKPENIVIEMARENQTTQKGQKNSRERMKRIEEGIKELGSQILKEHPVENTQLQNEKLYLYYLQNGRDMYVDQELDINRLSDYDVDHIVPQSFLKDDSIDNKVLTRSDKARGKSDNVPSEEVVKKMKNYWRQLLNAKLITQRKFDNLTKAERGGLSELDKAGFIKRQLVETRQITKHVAQILDSRMNTKYDENDKLIREVKVITLKSKLVSDFRKDFQFYKVREINNYHHAHDAYLNAVVGTALIKKYPKLESEFVYGDYKVYDVRKMIAKSEQEIGKATAKYFFYSNIMNFFKTEITLANGEIRKRPLIETNGETGEIVWDKGRDFATVRKVLSMPQVNIVKKTEVQTGGFSKESILPKRNSDKLIARKKDWDPKKYGGFDSPTVAYSVLVVAKVEKGKSKKLKSVKELLGITIMERSSFEKNPIDFLEAKGYKEVKKDLIIKLPKYSLFELENGRKRMLASAGELQKGNELALPSKYVNFLYLASHYEKLKGSPEDNEQKQLFVEQHKHYLDEIIEQISEFSKRVILADANLDKVLSAYNKHRDKPIREQAENIIHLFTLTNLGAPAAFKYFDTTIDRKRYTSTKEVLDATLIHQSITGLYETRIDLSQLGGDGGGGSGSSGGIPWLMKKPLQLTTLVPLQEYEERLLKQTMLTGSYKEKLQSLFLKYDALWQHWENQVGHRRIKPHHIATGTVNPRPQKQYPINPKAKASIQTVINDLLKQGVLIQQNSIMNTPVYPVPKPDGKWRMVLDYREVNKTIPLIAAQNQHSAGILSSIFRGKYKTTLDLSNGFWAHSITPESYWLTAFTWLGQQYCWTRLPQGFLNSPALFNADVVDLLKEVPNVQVYVDDIYISHDDPREHLEQLEKVFSLLLNAGYVVSLKKSEIAQHEVEFLGFNITKEGRGLTETFKQKLLNITPPRDLKQLQSILGKLNFARNFIPNFSELVKPLYNIIATAPGKYITWTTDNSQQLQNIISMLNSAENLEERNPEVRLIMKVNTSPSAGYIRFYNEFAKRPIMYLNYVYTKAEVKFTNTEKLLTTIHKGLIKALDLGMGQEILVYSPIVSMTKIQKTPLPERKALPIRWITWMSYLEDPRIQFHYDKTLPELQQVPTVTDDIIAKIKHPSEFSMVFYTDGSAIKHPNVNKSHNAGMGIAQVQFKPEFTVINTWSIPLGDHTAQLAEVAAVEFACKKALKIDGPVLIVTDSFYVAESVNKELPYWQSNGFFNNKKKPLKHVSKWKSIADCIQLKPDIIIIHEKGHQPTASTFHTEGNNLADKLATQGSYVVNAGKRTADGSEFEKRTADGSEFESPKKKAKVE

SEQ ID NO: 6611 - protein, 2089 aa, synthetic construct
MPAAKRVKLDGGDKKYSIGLDIGTNSVGWAVITDEYKVPSKKFKVLGNTDRHSIKKNLIGALLFDSGETAEATRLKRTARRRYTRRKNRICYLQEIFSNEMAKVDDSFFHRLEESFLVEEDKKHERHPIFGNIVDEVAYHEKYPTIYHLRKKLVDSTDKADLRLIYLALAHMIKFRGHFLIEGDLNPDNSDVDKLFIQLVQTYNQLFEENPINASGVDAKAILSARLSKSRRLENLIAQLPGEKKNGLFGNLIALSLGLTPNFKSNFDLAEDAKLQLSKDTYDDDLDNLLAQIGDQYADLFLAAKNLSDAILLSDILRVNTEITKAPLSASMIKRYDEHHQDLTLLKALVRQQLPEKYKEIFFDQSKNGYAGYIDGGASQEEFYKFIKPILEKMDGTEELLVKLNREDLLRKQRTFDNGSIPHQIHLGELHAILRRQEDFYPFLKDNREKIEKILTFRIPYYVGPLARGNSRFAWMTRKSEETITPWNFEEVVDKGASAQSFIERMTNFDKNLPNEKVLPKHSLLYEYFTVYNELTKVKYVTEGMRKPAFLSGEQKKAIVDLLFKTNRKVTVKQLKEDYFKKIECFDSVEISGVEDRFNASLGTYHDLLKIIKDKDFLDNEENEDILEDIVLTLTLFEDREMIEERLKTYAHLFDDKVMKQLKRRRYTGWGRLSRKLINGIRDKQSGKTILDFLKSDGFANRNFMQLIHDDSLTFKEDIQKAQVSGQGDSLHEHIANLAGSPAIKKGILQTVKVVDELVKVMGRHKPENIVIEMARENQTTQKGQKNSRERMKRIEEGIKELGSQILKEHPVENTQLQNEKLYLYYLQNGRDMYVDQELDINRLSDYDVDHIVPQSFLKDDSIDNKVLTRSDKARGKSDNVPSEEVVKKMKNYWRQLLNAKLITQRKFDNLTKAERGGLSELDKAGFIKRQLVETRQITKHVAQILDSRMNTKYDENDKLIREVKVITLKSKLVSDFRKDFQFYKVREINNYHHAHDAYLNAVVGTALIKKYPKLESEFVYGDYKVYDVRKMIAKSEQEIGKATAKYFFYSNIMNFFKTEITLANGEIRKRPLIETNGETGEIVWDKGRDFATVRKVLSMPQVNIVKKTEVQTGGFSKESILPKRNSDKLIARKKDWDPKKYGGFDSPTVAYSVLVVAKVEKGKSKKLKSVKELLGITIMERSSFEKNPIDFLEAKGYKEVKKDLIIKLPKYSLFELENGRKRMLASAGELQKGNELALPSKYVNFLYLASHYEKLKGSPEDNEQKQLFVEQHKHYLDEIIEQISEFSKRVILADANLDKVLSAYNKHRDKPIREQAENIIHLFTLTNLGAPAAFKYFDTTIDRKRYTSTKEVLDATLIHQSITGLYETRIDLSQLGGDGGGGSGSSGGVLNLEEEYRLHEKPVPSSIDPSWLQLFPTVWAERAGMGLANQVPPVVVELRSGASPVAVRQYPMSKEAREGIRPHIQRFLDLGVLVPCQSPWNTPLLPVKKPGTNDYRPVQDLREINKRVQDIHPTVPNPYNLLSSLPPSHTWYSVLDLKDAFFCLKLHPNSQPLFAFEWRDPEKGNTGQLTWTRLPQGFKNSPTLFNEALHRDLAPFRALNPQVVLLQYVDDLLVAAPTYRDCKEGTQKLLQELSKLGYRVSAKKAQLCQKEVTYLGYLLKEGKRWLTPARKATVMKIPPPTTPRQVREFLGTAGFCRLWIPGFASLAAPLYPLTKPSIPFIWTEEHQKAFDRIKEALLSAPALALPDLTKPFTLYVDERAGVARGVLTQTLGPWRRPVAYLSKKLDPVASGWPTCLKAVAAVALLLKDADKLTLGQNVTVIASHSLESIVRQPPDRWMTNARMTHYQSLLLNERVSFAPPAVLNPATLLPVESEATPVHRCSEILAEETGTRRDLKDQPLPGVPAWYTDGSSFIAEGKRRAGAAIVDGKRTVWASSLPEGTSAQKAELVALTQALRLAEGKDINIYTDSRYAFATAHIHGAIYKQRGWLTSAGKDIKNKEEILALLEAIHLPKRVAIIHCPGHQKGNDPVATGNRRADEAAKQAALSTRVLAETTKPAGKRTADGSEFEKRTADGSEFESPKKKAKVE

SEQ ID NO: 6612 - protein, 2091 aa, synthetic construct
MPAAKRVKLDGGDKKYSIGLDIGTNSVGWAVITDEYKVPSKKFKVLGNTDRHSIKKNLIGALLFDSGETAEATRLKRTARRRYTRRKNRICYLQEIFSNEMAKVDDSFFHRLEESFLVEEDKKHERHPIFGNIVDEVAYHEKYPTIYHLRKKLVDSTDKADLRLIYLALAHMIKFRGHFLIEGDLNPDNSDVDKLFIQLVQTYNQLFEENPINASGVDAKAILSARLSKSRRLENLIAQLPGEKKNGLFGNLIALSLGLTPNFKSNFDLAEDAKLQLSKDTYDDDLDNLLAQIGDQYADLFLAAKNLSDAILLSDILRVNTEITKAPLSASMIKRYDEHHQDLTLLKALVRQQLPEKYKEIFFDQSKNGYAGYIDGGASQEEFYKFIKPILEKMDGTEELLVKLNREDLLRKQRTFDNGSIPHQIHLGELHAILRRQEDFYPFLKDNREKIEKILTFRIPYYVGPLARGNSRFAWMTRKSEETITPWNFEEVVDKGASAQSFIERMTNFDKNLPNEKVLPKHSLLYEYFTVYNELTKVKYVTEGMRKPAFLSGEQKKAIVDLLFKTNRKVTVKQLKEDYFKKIECFDSVEISGVEDRFNASLGTYHDLLKIIKDKDFLDNEENEDILEDIVLTLTLFEDREMIEERLKTYAHLFDDKVMKQLKRRRYTGWGRLSRKLINGIRDKQSGKTILDFLKSDGFANRNFMQLIHDDSLTFKEDIQKAQVSGQGDSLHEHIANLAGSPAIKKGILQTVKVVDELVKVMGRHKPENIVIEMARENQTTQKGQKNSRERMKRIEEGIKELGSQILKEHPVENTQLQNEKLYLYYLQNGRDMYVDQELDINRLSDYDVDHIVPQSFLKDDSIDNKVLTRSDKARGKSDNVPSEEVVKKMKNYWRQLLNAKLITQRKFDNLTKAERGGLSELDKAGFIKRQLVETRQITKHVAQILDSRMNTKYDENDKLIREVKVITLKSKLVSDFRKDFQFYKVREINNYHHAHDAYLNAVVGTALIKKYPKLESEFVYGDYKVYDVRKMIAKSEQEIGKATAKYFFYSNIMNFFKTEITLANGEIRKRPLIETNGETGEIVWDKGRDFATVRKVLSMPQVNIVKKTEVQTGGFSKESILPKRNSDKLIARKKDWDPKKYGGFDSPTVAYSVLVVAKVEKGKSKKLKSVKELLGITIMERSSFEKNPIDFLEAKGYKEVKKDLIIKLPKYSLFELENGRKRMLASAGELQKGNELALPSKYVNFLYLASHYEKLKGSPEDNEQKQLFVEQHKHYLDEIIEQISEFSKRVILADANLDKVLSAYNKHRDKPIREQAENIIHLFTLTNLGAPAAFKYFDTTIDRKRYTSTKEVLDATLIHQSITGLYETRIDLSQLGGDGGGGSGSSGGTLNIEDEYRLHETSKEPDVPLGSTWLSDFPQAWAETGGMGLAVRQAPLIIPLKATSTPVSIKQYPMSQEARLGIKPHIQRLLDQGILVPCQSPWNTPLLPVKKPGTNDYRPVQDLREVNKRVEDIHPTVPNPYNLLSGLPPSHQWYTVLDLKDAFFCLRLHPTSQPLFAFEWRDPEMGISGQLTWTRLPQGFKNSPTLFNEALHRDLADFRIQHPDLILLQYVDDLLLAATSEQDCQRGTRALLQTLGNLGYRASAKKAQICQKQVKYLGYLLKEGQRWLTEARKETVMGQPTPKTPRQLREFLGTAGFCRLWIPGFAEMAAPLYPLTKPGTLFNWGPDQQKAYQEIKQALLTAPALGLPDLTKPFELFVDEKQGYAKGVLTQKLGPWRRPVAYLSKKLDPVAAGWPPCLRMVAAIAVLTKDAGKLTMGQPLVILAPHAVEALVKQPPDRWLSNARMTHYQAMLLDTDRVQFGPVVALNPATLLPLPEKEAPHDCLEILAETHGTRPDLTDQPIPDADYTWYTDGSSFLQEGQRRAGAAVTTETEVIWARALPAGTSAQRAELIALTQALKMAEGKKLNVYTDSRYAFATAHVHGEIYRRRGWLTSEGREIKNKNEILALLKALFLPKRLSIIHCPGHQKGNSAEARGNRMADQAAREAAMKAVLETSTLLAGKRTADGSEFEKRTADGSEFESPKKKAKVE

SEQ ID NO: 6613 - protein, 2093 aa, synthetic construct
MPAAKRVKLDGGDKKYSIGLDIGTNSVGWAVITDEYKVPSKKFKVLGNTDRHSIKKNLIGALLFDSGETAEATRLKRTARRRYTRRKNRICYLQEIFSNEMAKVDDSFFHRLEESFLVEEDKKHERHPIFGNIVDEVAYHEKYPTIYHLRKKLVDSTDKADLRLIYLALAHMIKFRGHFLIEGDLNPDNSDVDKLFIQLVQTYNQLFEENPINASGVDAKAILSARLSKSRRLENLIAQLPGEKKNGLFGNLIALSLGLTPNFKSNFDLAEDAKLQLSKDTYDDDLDNLLAQIGDQYADLFLAAKNLSDAILLSDILRVNTEITKAPLSASMIKRYDEHHQDLTLLKALVRQQLPEKYKEIFFDQSKNGYAGYIDGGASQEEFYKFIKPILEKMDGTEELLVKLNREDLLRKQRTFDNGSIPHQIHLGELHAILRRQEDFYPFLKDNREKIEKILTFRIPYYVGPLARGNSRFAWMTRKSEETITPWNFEEVVDKGASAQSFIERMTNFDKNLPNEKVLPKHSLLYEYFTVYNELTKVKYVTEGMRKPAFLSGEQKKAIVDLLFKTNRKVTVKQLKEDYFKKIECFDSVEISGVEDRFNASLGTYHDLLKIIKDKDFLDNEENEDILEDIVLTLTLFEDREMIEERLKTYAHLFDDKVMKQLKRRRYTGWGRLSRKLINGIRDKQSGKTILDFLKSDGFANRNFMQLIHDDSLTFKEDIQKAQVSGQGDSLHEHIANLAGSPAIKKGILQTVKVVDELVKVMGRHKPENIVIEMARENQTTQKGQKNSRERMKRIEEGIKELGSQILKEHPVENTQLQNEKLYLYYLQNGRDMYVDQELDINRLSDYDVDHIVPQSFLKDDSIDNKVLTRSDKARGKSDNVPSEEVVKKMKNYWRQLLNAKLITQRKFDNLTKAERGGLSELDKAGFIKRQLVETRQITKHVAQILDSRMNTKYDENDKLIREVKVITLKSKLVSDFRKDFQFYKVREINNYHHAHDAYLNAVVGTALIKKYPKLESEFVYGDYKVYDVRKMIAKSEQEIGKATAKYFFYSNIMNFFKTEITLANGEIRKRPLIETNGETGEIVWDKGRDFATVRKVLSMPQVNIVKKTEVQTGGFSKESILPKRNSDKLIARKKDWDPKKYGGFDSPTVAYSVLVVAKVEKGKSKKLKSVKELLGITIMERSSFEKNPIDFLEAKGYKEVKKDLIIKLPKYSLFELENGRKRMLASAGELQKGNELALPSKYVNFLYLASHYEKLKGSPEDNEQKQLFVEQHKHYLDEIIEQISEFSKRVILADANLDKVLSAYNKHRDKPIREQAENIIHLFTLTNLGAPAAFKYFDTTIDRKRYTSTKEVLDATLIHQSITGLYETRIDLSQLGGDGGGSSGGSGGTAPLEEEYRLFLEAPIQNVTLLEQWKREIPKVWAEINPPGLASTQAPIHVQLLSTALPVRVRQYPITLEAKRSLRETIRKFRAAGILRPVHSPWNTPLLPVRKSGTSEYRMVQDLREVNKRVETIHPTVPNPYTLLSLLPPDRIWYSVLDLKDAFFCIPLAPESQLIFAFEWADAEEGESGQLTWTRLPQGFKNSPTLFDEALNRDLQGFRLDHPSVSLLQYVDDLLIAADTQAACLSATRDLLMTLAELGYRVSGKKAQLCQEEVTYLGFKIHKGSRSLSNSRTQAILQIPVPKTKRQVREFLGTIGYCRLWIPGFAELAQPLYAATRGGNDPLVWGEKEEEAFQSLKLALTQPPALALPSLDKPFQLFVEETSGAAKGVLTQALGPWKRPVAYLSKRLDPVAAGWPRCLRAIAAAALLTREASKLTFGQDIEITSSHNLESLLRSPPDKWLTNARITQYQVLLLDPPRVRFKQTAALNPATLLPETDDTLPIHHCLDTLDSLTSTRPDLTDQPLAQAEATLFTDGSSYIRDGKRYAGAAVVTLDSVIWAEPLPIGTSAQKAELIALTKALEWSKDKSVNIYTDSRYAFATLHVHGMIYRERGLLTAGGKAIKNAPEILALLTAVWLPKRVAVMHCKGHQKDDAPTSTGNRRADEVAREVAIRPLSTQATISAGKRTADGSEFEKRTADGSEFESPKKKAKVE

SEQ ID NO: 6614 - protein, 2097 aa, synthetic construct
MPAAKRVKLDGGDKKYSIGLDIGTNSVGWAVITDEYKVPSKKFKVLGNTDRHSIKKNLIGALLFDSGETAEATRLKRTARRRYTRRKNRICYLQEIFSNEMAKVDDSFFHRLEESFLVEEDKKHERHPIFGNIVDEVAYHEKYPTIYHLRKKLVDSTDKADLRLIYLALAHMIKFRGHFLIEGDLNPDNSDVDKLFIQLVQTYNQLFEENPINASGVDAKAILSARLSKSRRLENLIAQLPGEKKNGLFGNLIALSLGLTPNFKSNFDLAEDAKLQLSKDTYDDDLDNLLAQIGDQYADLFLAAKNLSDAILLSDILRVNTEITKAPLSASMIKRYDEHHQDLTLLKALVRQQLPEKYKEIFFDQSKNGYAGYIDGGASQEEFYKFIKPILEKMDGTEELLVKLNREDLLRKQRTFDNGSIPHQIHLGELHAILRRQEDFYPFLKDNREKIEKILTFRIPYYVGPLARGNSRFAWMTRKSEETITPWNFEEVVDKGASAQSFIERMTNFDKNLPNEKVLPKHSLLYEYFTVYNELTKVKYVTEGMRKPAFLSGEQKKAIVDLLFKTNRKVTVKQLKEDYFKKIECFDSVEISGVEDRFNASLGTYHDLLKIIKDKDFLDNEENEDILEDIVLTLTLFEDREMIEERLKTYAHLFDDKVMKQLKRRRYTGWGRLSRKLINGIRDKQSGKTILDFLKSDGFANRNFMQLIHDDSLTFKEDIQKAQVSGQGDSLHEHIANLAGSPAIKKGILQTVKVVDELVKVMGRHKPENIVIEMARENQTTQKGQKNSRERMKRIEEGIKELGSQILKEHPVENTQLQNEKLYLYYLQNGRDMYVDQELDINRLSDYDVDHIVPQSFLKDDSIDNKVLTRSDKARGKSDNVPSEEVVKKMKNYWRQLLNAKLITQRKFDNLTKAERGGLSELDKAGFIKRQLVETRQITKHVAQILDSRMNTKYDENDKLIREVKVITLKSKLVSDFRKDFQFYKVREINNYHHAHDAYLNAVVGTALIKKYPKLESEFVYGDYKVYDVRKMIAKSEQEIGKATAKYFFYSNIMNFFKTEITLANGEIRKRPLIETNGETGEIVWDKGRDFATVRKVLSMPQVNIVKKTEVQTGGFSKESILPKRNSDKLIARKKDWDPKKYGGFDSPTVAYSVLVVAKVEKGKSKKLKSVKELLGITIMERSSFEKNPIDFLEAKGYKEVKKDLIIKLPKYSLFELENGRKRMLASAGELQKGNELALPSKYVNFLYLASHYEKLKGSPEDNEQKQLFVEQHKHYLDEIIEQISEFSKRVILADANLDKVLSAYNKHRDKPIREQAENIIHLFTLTNLGAPAAFKYFDTTIDRKRYTSTKEVLDATLIHQSITGLYETRIDLSQLGGDGGGSSGGSGGTVSLQDEHRLFDIPVTTSLPDVWLQDFPQAWAETGGLGRAKCQAPIIIDLKPTAVPVSIKQYPMSLEAHMGIRQHIIKFLELGVLRPCRSPWNTPLLPVKKPGTQDYRPVQDLREINKRTVDIHPTVPNPYNLLSTLKPDYSWYTVLDLKDAFFCLPLAPQSQELFAFEWKDPERGISGQLTWTRLPQGFKNSPTLFNEALHRDLTDFRTQHPEVTLLQYVDDLLLAAPTKKACTQGTRHLLQELGEKGYRASAKKAQICQTKVTYLGYILSEGKRWLTPGRIETVARIPPPRNPREVREFLGTAGFCRLWIPGFAELAAPLYALTKPSTPFTWQTEHQLAFEALKKALLSAPALGLPDTSKPFTLFLDERQGIAKGVLTQKLGPWKRPVAYLSKKLDPVAAGWPPCLRIMAATAMLVKDSAKLTLGQPLTVITPHTLEAIVRQPPDRWITNARLTHYQALLLDTDRVQFGPPVTLNPATLLPVPENQPSPHDCRQVLAETHGTREDLKDQELPDADHTWYTDGSSYLDSGTRRAGAAVVDGHNTIWAQSLPPGTSAQKAELIALTKALELSKGKKANIYTDSRYAFATAHTHGSIYERRGWLTSEGKEIKNKAEIIALLKALFLPQEVAIIHCPGHQKGQDPVAVGNRQADRVARQAAMAEVLTLATEPDNTSHITAGKRTADGSEFEKRTADGSEFESPKKKAKVE

SEQ ID NO: 6615 - protein, 2090 aa, synthetic construct
MPAAKRVKLDGGDKKYSIGLDIGTNSVGWAVITDEYKVPSKKFKVLGNTDRHSIKKNLIGALLFDSGETAEATRLKRTARRRYTRRKNRICYLQEIFSNEMAKVDDSFFHRLEESFLVEEDKKHERHPIFGNIVDEVAYHEKYPTIYHLRKKLVDSTDKADLRLIYLALAHMIKFRGHFLIEGDLNPDNSDVDKLFIQLVQTYNQLFEENPINASGVDAKAILSARLSKSRRLENLIAQLPGEKKNGLFGNLIALSLGLTPNFKSNFDLAEDAKLQLSKDTYDDDLDNLLAQIGDQYADLFLAAKNLSDAILLSDILRVNTEITKAPLSASMIKRYDEHHQDLTLLKALVRQQLPEKYKEIFFDQSKNGYAGYIDGGASQEEFYKFIKPILEKMDGTEELLVKLNREDLLRKQRTFDNGSIPHQIHLGELHAILRRQEDFYPFLKDNREKIEKILTFRIPYYVGPLARGNSRFAWMTRKSEETITPWNFEEVVDKGASAQSFIERMTNFDKNLPNEKVLPKHSLLYEYFTVYNELTKVKYVTEGMRKPAFLSGEQKKAIVDLLFKTNRKVTVKQLKEDYFKKIECFDSVEISGVEDRFNASLGTYHDLLKIIKDKDFLDNEENEDILEDIVLTLTLFEDREMIEERLKTYAHLFDDKVMKQLKRRRYTGWGRLSRKLINGIRDKQSGKTILDFLKSDGFANRNFMQLIHDDSLTFKEDIQKAQVSGQGDSLHEHIANLAGSPAIKKGILQTVKVVDELVKVMGRHKPENIVIEMARENQTTQKGQKNSRERMKRIEEGIKELGSQILKEHPVENTQLQNEKLYLYYLQNGRDMYVDQELDINRLSDYDVDHIVPQSFLKDDSIDNKVLTRSDKARGKSDNVPSEEVVKKMKNYWRQLLNAKLITQRKFDNLTKAERGGLSELDKAGFIKRQLVETRQITKHVAQILDSRMNTKYDENDKLIREVKVITLKSKLVSDFRKDFQFYKVREINNYHHAHDAYLNAVVGTALIKKYPKLESEFVYGDYKVYDVRKMIAKSEQEIGKATAKYFFYSNIMNFFKTEITLANGEIRKRPLIETNGETGEIVWDKGRDFATVRKVLSMPQVNIVKKTEVQTGGFSKESILPKRNSDKLIARKKDWDPKKYGGFDSPTVAYSVLVVAKVEKGKSKKLKSVKELLGITIMERSSFEKNPIDFLEAKGYKEVKKDLIIKLPKYSLFELENGRKRMLASAGELQKGNELALPSKYVNFLYLASHYEKLKGSPEDNEQKQLFVEQHKHYLDEIIEQISEFSKRVILADANLDKVLSAYNKHRDKPIREQAENIIHLFTLTNLGAPAAFKYFDTTIDRKRYTSTKEVLDATLIHQSITGLYETRIDLSQLGGDGGGSSGGSGGTLQLEEEYRLFEPESTQKQEMDIWLKNFPQAWAETGGMGTAHCQAPVLIQLKATATPISIRQYPMPHEAYQGIKPHIRRMLDQGILKPCQSPWNTPLLPVKKPGTEDYRPVQDLREVNKRVEDIHPTVPNPYNLLSTLPPSHPWYTVLDLKDAFFCLRLHSESQLLFAFEWRDPEIGLSGQLTWTRLPQGFKNSPTLFNEALHSDLADFRVRYPALVLLQYVDDLLLAAATRTECLEGTKALLETLGNKGYRASAKKAQICLQEVTYLGYSLKDGQRWLTKARKEAILSIPVPKNSRQVREFLGKAGYCRLFIPGFAELAAPLYPLTRPGTLFQWGTEQQLAFEDIKKALLSSPALGLPDITKPFELFIDENSGFAKGVLVQKLGPWKRPVAYLSKKLDTVASGWPPCLRMVAAIAILVKDAGKLTLGQPLTILTSHPVEALVRQPPNKWLSNARMTHYQAMLLDAERVHFGPTVSLNPATLLPLPSGGNHHDCLQILAETHGTRPDLTDQPLPDADLTWYTDGSSFIRNGEREAGAAVTTESEVIWAAPLPPGTSAQRAELIALTQALKMAEGKKLTVYTDSRYAFATTHVHGEIYRRRGWLTSEGKEIKNKNEILALLEALFLPKRLSIIHCPGHQKGDSPQAKGNRLADDTAKKAATETHSSLTVLPAGKRTADGSEFEKRTADGSEFESPKKKAKVE

SEQ ID NO: 6616 - protein, 2213 aa, synthetic construct
MPAAKRVKLDGGDKKYSIGLDIGTNSVGWAVITDEYKVPSKKFKVLGNTDRHSIKKNLIGALLFDSGETAEATRLKRTARRRYTRRKNRICYLQEIFSNEMAKVDDSFFHRLEESFLVEEDKKHERHPIFGNIVDEVAYHEKYPTIYHLRKKLVDSTDKADLRLIYLALAHMIKFRGHFLIEGDLNPDNSDVDKLFIQLVQTYNQLFEENPINASGVDAKAILSARLSKSRRLENLIAQLPGEKKNGLFGNLIALSLGLTPNFKSNFDLAEDAKLQLSKDTYDDDLDNLLAQIGDQYADLFLAAKNLSDAILLSDILRVNTEITKAPLSASMIKRYDEHHQDLTLLKALVRQQLPEKYKEIFFDQSKNGYAGYIDGGASQEEFYKFIKPILEKMDGTEELLVKLNREDLLRKQRTFDNGSIPHQIHLGELHAILRRQEDFYPFLKDNREKIEKILTFRIPYYVGPLARGNSRFAWMTRKSEETITPWNFEEVVDKGASAQSFIERMTNFDKNLPNEKVLPKHSLLYEYFTVYNELTKVKYVTEGMRKPAFLSGEQKKAIVDLLFKTNRKVTVKQLKEDYFKKIECFDSVEISGVEDRFNASLGTYHDLLKIIKDKDFLDNEENEDILEDIVLTLTLFEDREMIEERLKTYAHLFDDKVMKQLKRRRYTGWGRLSRKLINGIRDKQSGKTILDFLKSDGFANRNFMQLIHDDSLTFKEDIQKAQVSGQGDSLHEHIANLAGSPAIKKGILQTVKVVDELVKVMGRHKPENIVIEMARENQTTQKGQKNSRERMKRIEEGIKELGSQILKEHPVENTQLQNEKLYLYYLQNGRDMYVDQELDINRLSDYDVDHIVPQSFLKDDSIDNKVLTRSDKARGKSDNVPSEEVVKKMKNYWRQLLNAKLITQRKFDNLTKAERGGLSELDKAGFIKRQLVETRQITKHVAQILDSRMNTKYDENDKLIREVKVITLKSKLVSDFRKDFQFYKVREINNYHHAHDAYLNAVVGTALIKKYPKLESEFVYGDYKVYDVRKMIAKSEQEIGKATAKYFFYSNIMNFFKTEITLANGEIRKRPLIETNGETGEIVWDKGRDFATVRKVLSMPQVNIVKKTEVQTGGFSKESILPKRNSDKLIARKKDWDPKKYGGFDSPTVAYSVLVVAKVEKGKSKKLKSVKELLGITIMERSSFEKNPIDFLEAKGYKEVKKDLIIKLPKYSLFELENGRKRMLASAGELQKGNELALPSKYVNFLYLASHYEKLKGSPEDNEQKQLFVEQHKHYLDEIIEQISEFSKRVILADANLDKVLSAYNKHRDKPIREQAENIIHLFTLTNLGAPAAFKYFDTTIDRKRYTSTKEVLDATLIHQSITGLYETRIDLSQLGGDGGGSSGGSGGTLGDQGSRGSDPLPEPRVTLTVEGIPTEFLVNTGAEHSVLTKPMGKMGSKRTVVAGATGSKVYPWTTKRLLKIGQKQVTHSFLVIPECPAPLLGRDLLTKLKAQIQFSTEGPQVTWEDRPAMCLVLNLEEEYRLHEKPVPPSIDPSWLQLFPMVWAEKAGMGLANQVPPVVVELKSDASPVAVRQYPMSKEAREGIRPHIQRFLDLGILVPCQSPWNTPLLPVKKPGTNDYRPVQDLREVNKRVQDIHPTVPNPYNLLSSLPPSHTWYSVLDLKDAFFCLKLHPNSQPLFAFEWRDPEKGNTGQLTWTRLPQGFKNSPTLFNEALHRDLASFRALNPQVVMLQYVDDLLVAAPTYRDCKEGTRRLLQELSKLGYRVSAKKAQLCREEVTYLGYLLKGGKRWLTPARKATVMKIPTPTTPRQVREFLGKAGFCRLFIPGFASLAAPLYPLTRPKVPFTWTEAHQEAFGRIKEALLSAPALALPDLTKPFALYVDEKEGVARGVLTQTLGPWRRPVAYLSKKLDPVASGWPTCLKAIAAVALLLKDADKLTLGQNVLVIAPHNLESIVRQPPDRWMTNARMTHYQSLLLNERVSFAPPAILNPATLLPVESDDTPIHICSEILAEETGTRPDLRDQPLPGVPAWYTDGSSFIMDGRRQAGAAIVDNKRTVWASNLPEGTSAQKAELIALTQALRLAEGKSINIYTDSRYAFATAHVHGAIYKQRGWLTSAGKDIKNKEEILALLEAIHLPKRVAIIHCPGHQRGTDPVATGNRKADEAAKQAAQSTRILTETTKNAGKRTADGSEFEKRTADGSEFESPKKKAKVE

SEQ ID NO: 6617 - protein, 2091 aa, synthetic construct
MPAAKRVKLDGGDKKYSIGLDIGTNSVGWAVITDEYKVPSKKFKVLGNTDRHSIKKNLIGALLFDSGETAEATRLKRTARRRYTRRKNRICYLQEIFSNEMAKVDDSFFHRLEESFLVEEDKKHERHPIFGNIVDEVAYHEKYPTIYHLRKKLVDSTDKADLRLIYLALAHMIKFRGHFLIEGDLNPDNSDVDKLFIQLVQTYNQLFEENPINASGVDAKAILSARLSKSRRLENLIAQLPGEKKNGLFGNLIALSLGLTPNFKSNFDLAEDAKLQLSKDTYDDDLDNLLAQIGDQYADLFLAAKNLSDAILLSDILRVNTEITKAPLSASMIKRYDEHHQDLTLLKALVRQQLPEKYKEIFFDQSKNGYAGYIDGGASQEEFYKFIKPILEKMDGTEELLVKLNREDLLRKQRTFDNGSIPHQIHLGELHAILRRQEDFYPFLKDNREKIEKILTFRIPYYVGPLARGNSRFAWMTRKSEETITPWNFEEVVDKGASAQSFIERMTNFDKNLPNEKVLPKHSLLYEYFTVYNELTKVKYVTEGMRKPAFLSGEQKKAIVDLLFKTNRKVTVKQLKEDYFKKIECFDSVEISGVEDRFNASLGTYHDLLKIIKDKDFLDNEENEDILEDIVLTLTLFEDREMIEERLKTYAHLFDDKVMKQLKRRRYTGWGRLSRKLINGIRDKQSGKTILDFLKSDGFANRNFMQLIHDDSLTFKEDIQKAQVSGQGDSLHEHIANLAGSPAIKKGILQTVKVVDELVKVMGRHKPENIVIEMARENQTTQKGQKNSRERMKRIEEGIKELGSQILKEHPVENTQLQNEKLYLYYLQNGRDMYVDQELDINRLSDYDVDHIVPQSFLKDDSIDNKVLTRSDKARGKSDNVPSEEVVKKMKNYWRQLLNAKLITQRKFDNLTKAERGGLSELDKAGFIKRQLVETRQITKHVAQILDSRMNTKYDENDKLIREVKVITLKSKLVSDFRKDFQFYKVREINNYHHAHDAYLNAVVGTALIKKYPKLESEFVYGDYKVYDVRKMIAKSEQEIGKATAKYFFYSNIMNFFKTEITLANGEIRKRPLIETNGETGEIVWDKGRDFATVRKVLSMPQVNIVKKTEVQTGGFSKESILPKRNSDKLIARKKDWDPKKYGGFDSPTVAYSVLVVAKVEKGKSKKLKSVKELLGITIMERSSFEKNPIDFLEAKGYKEVKKDLIIKLPKYSLFELENGRKRMLASAGELQKGNELALPSKYVNFLYLASHYEKLKGSPEDNEQKQLFVEQHKHYLDEIIEQISEFSKRVILADANLDKVLSAYNKHRDKPIREQAENIIHLFTLTNLGAPAAFKYFDTTIDRKRYTSTKEVLDATLIHQSITGLYETRIDLSQLGGDGGGSSGGSGGTLGIEDEYRLHETSTEPDVSLGSTWLSDFPQAWAETGGMGLAVRQAPLIIPLKATSTPVSIQQYPMSHEARLGIKPHIQRLLDQGILVPCQSPWNTPLLPVKKPGTNDYRPVQDLREVNKRVEDIHPTVPNPYNLLSGLPPSHQWYTVLDLKDAFFCLRLHPTSQPLFAFEWRDPGMGISGQLTWTRLPQGFKNSPTLFNEALHRDLADFRIQHPDLILLQYVDDILLAATSELDCQQGTRALLQTLGDLGYRASAKKAQICQKQVKYLGYLLREGQRWLTEARKETVMGQPVPKTPRQLREFLGTAGFCRLWIPGFAEMAAPLYPLTKPGTLFSWGPDQQKAYQEIKQALLTAPALGLPDLTKPFELFVDEKQGYAKGVLTQKLGPWRRPVAYLSKKLDPVAAGWPPCLRMVAAIAVLTKDAGKLTMGQPLVILAPHAVEALVKQPPDRWLSNARMTHYQAMLLDTDRVQFGPVVALNPATLLPLPEEGAPHDCLEILAETHGTRPDLTDQPIPDADHTWYTDGSSFLQEGQRKAGAAVTTETEVIWAGALPAGTSAQRAELIALTQALKMAEGKRLNVYTDSRYAFATAHIHGEIYRRRGWLTSEGREIKNKSEILALLKALFLPKRLSIIHCLGHQKGDSAEARGNRLADQAAREAAIKTPPDTSTLLAGKRTADGSEFEKRTADGSEFESPKKKAKVE

SEQ ID NO: 6618 - protein, 2091 aa, synthetic construct
MPAAKRVKLDGGDKKYSIGLDIGTNSVGWAVITDEYKVPSKKFKVLGNTDRHSIKKNLIGALLFDSGETAEATRLKRTARRRYTRRKNRICYLQEIFSNEMAKVDDSFFHRLEESFLVEEDKKHERHPIFGNIVDEVAYHEKYPTIYHLRKKLVDSTDKADLRLIYLALAHMIKFRGHFLIEGDLNPDNSDVDKLFIQLVQTYNQLFEENPINASGVDAKAILSARLSKSRRLENLIAQLPGEKKNGLFGNLIALSLGLTPNFKSNFDLAEDAKLQLSKDTYDDDLDNLLAQIGDQYADLFLAAKNLSDAILLSDILRVNTEITKAPLSASMIKRYDEHHQDLTLLKALVRQQLPEKYKEIFFDQSKNGYAGYIDGGASQEEFYKFIKPILEKMDGTEELLVKLNREDLLRKQRTFDNGSIPHQIHLGELHAILRRQEDFYPFLKDNREKIEKILTFRIPYYVGPLARGNSRFAWMTRKSEETITPWNFEEVVDKGASAQSFIERMTNFDKNLPNEKVLPKHSLLYEYFTVYNELTKVKYVTEGMRKPAFLSGEQKKAIVDLLFKTNRKVTVKQLKEDYFKKIECFDSVEISGVEDRFNASLGTYHDLLKIIKDKDFLDNEENEDILEDIVLTLTLFEDREMIEERLKTYAHLFDDKVMKQLKRRRYTGWGRLSRKLINGIRDKQSGKTILDFLKSDGFANRNFMQLIHDDSLTFKEDIQKAQVSGQGDSLHEHIANLAGSPAIKKGILQTVKVVDELVKVMGRHKPENIVIEMARENQTTQKGQKNSRERMKRIEEGIKELGSQILKEHPVENTQLQNEKLYLYYLQNGRDMYVDQELDINRLSDYDVDHIVPQSFLKDDSIDNKVLTRSDKARGKSDNVPSEEVVKKMKNYWRQLLNAKLITQRKFDNLTKAERGGLSELDKAGFIKRQLVETRQITKHVAQILDSRMNTKYDENDKLIREVKVITLKSKLVSDFRKDFQFYKVREINNYHHAHDAYLNAVVGTALIKKYPKLESEFVYGDYKVYDVRKMIAKSEQEIGKATAKYFFYSNIMNFFKTEITLANGEIRKRPLIETNGETGEIVWDKGRDFATVRKVLSMPQVNIVKKTEVQTGGFSKESILPKRNSDKLIARKKDWDPKKYGGFDSPTVAYSVLVVAKVEKGKSKKLKSVKELLGITIMERSSFEKNPIDFLEAKGYKEVKKDLIIKLPKYSLFELENGRKRMLASAGELQKGNELALPSKYVNFLYLASHYEKLKGSPEDNEQKQLFVEQHKHYLDEIIEQISEFSKRVILADANLDKVLSAYNKHRDKPIREQAENIIHLFTLTNLGAPAAFKYFDTTIDRKRYTSTKEVLDATLIHQSITGLYETRIDLSQLGGDGGGSSGGSGGTLNIEDEYRLHETSKEPDVSLGSTWLSDFPQAWAETGGMGLAVRQAPLIIPLKATSTPVSIKQYPMSQEARLGIKPHIQRLLDQGILVPCQSPWNTPLLPVKKPGTNDYRPVQDLREVNKRVEDIHPTVPNPYNLLSGLPPSHQWYTVLDLKDAFFCLRLHPTSQPLFAFEWRDPEMGISGQLTWTRLPQGFKNSPTLFNEALHRDLAGFRIQHPDLILLQYVDDLLLAATSELDCQQGTRALLQTLGDLGYRASAKKAQICQKQVKYLGYLLKEGQRWLTEARKETVMGQPIPKTPRQLREFLGTAGFCRLWIPGFAEMAAPLYPLTKPGTLFNWGPDQQKAFQEIKQALLTAPALGLPDLTKPFELFVDEKQGYAKGVLTQKLGPWRRPVAYLSKKLDPVAAGWPPCLRMVAAIAVLTKDAGKLTMGQPLVILAPHAVEALVKQPPDRWLSNARMTHYQALLLDTDRVQFGPVVALNPATLLPLPEEGLQHDCLDILAEAHGTRSDLMDQPLPDADHTWYTDGSSFLQEGQRKAGAAVTTETEVIWARALPAGTSAQRAELIALTQALKMAEGKKLNVYTDSRYAFATAHIHGEIYRRRGWLTSEGKEIKNKDEILALLKALFLPKRLSIIHCPGHQKGNSAEARGNRMADQAAREVATRETPETSTLLAGKRTADGSEFEKRTADGSEFESPKKKAKVE

SEQ ID NO: 6619 - protein, 2089 aa, synthetic construct
MPAAKRVKLDGGDKKYSIGLDIGTNSVGWAVITDEYKVPSKKFKVLGNTDRHSIKKNLIGALLFDSGETAEATRLKRTARRRYTRRKNRICYLQEIFSNEMAKVDDSFFHRLEESFLVEEDKKHERHPIFGNIVDEVAYHEKYPTIYHLRKKLVDSTDKADLRLIYLALAHMIKFRGHFLIEGDLNPDNSDVDKLFIQLVQTYNQLFEENPINASGVDAKAILSARLSKSRRLENLIAQLPGEKKNGLFGNLIALSLGLTPNFKSNFDLAEDAKLQLSKDTYDDDLDNLLAQIGDQYADLFLAAKNLSDAILLSDILRVNTEITKAPLSASMIKRYDEHHQDLTLLKALVRQQLPEKYKEIFFDQSKNGYAGYIDGGASQEEFYKFIKPILEKMDGTEELLVKLNREDLLRKQRTFDNGSIPHQIHLGELHAILRRQEDFYPFLKDNREKIEKILTFRIPYYVGPLARGNSRFAWMTRKSEETITPWNFEEVVDKGASAQSFIERMTNFDKNLPNEKVLPKHSLLYEYFTVYNELTKVKYVTEGMRKPAFLSGEQKKAIVDLLFKTNRKVTVKQLKEDYFKKIECFDSVEISGVEDRFNASLGTYHDLLKIIKDKDFLDNEENEDILEDIVLTLTLFEDREMIEERLKTYAHLFDDKVMKQLKRRRYTGWGRLSRKLINGIRDKQSGKTILDFLKSDGFANRNFMQLIHDDSLTFKEDIQKAQVSGQGDSLHEHIANLAGSPAIKKGILQTVKVVDELVKVMGRHKPENIVIEMARENQTTQKGQKNSRERMKRIEEGIKELGSQILKEHPVENTQLQNEKLYLYYLQNGRDMYVDQELDINRLSDYDVDHIVPQSFLKDDSIDNKVLTRSDKARGKSDNVPSEEVVKKMKNYWRQLLNAKLITQRKFDNLTKAERGGLSELDKAGFIKRQLVETRQITKHVAQILDSRMNTKYDENDKLIREVKVITLKSKLVSDFRKDFQFYKVREINNYHHAHDAYLNAVVGTALIKKYPKLESEFVYGDYKVYDVRKMIAKSEQEIGKATAKYFFYSNIMNFFKTEITLANGEIRKRPLIETNGETGEIVWDKGRDFATVRKVLSMPQVNIVKKTEVQTGGFSKESILPKRNSDKLIARKKDWDPKKYGGFDSPTVAYSVLVVAKVEKGKSKKLKSVKELLGITIMERSSFEKNPIDFLEAKGYKEVKKDLIIKLPKYSLFELENGRKRMLASAGELQKGNELALPSKYVNFLYLASHYEKLKGSPEDNEQKQLFVEQHKHYLDEIIEQISEFSKRVILADANLDKVLSAYNKHRDKPIREQAENIIHLFTLTNLGAPAAFKYFDTTIDRKRYTSTKEVLDATLIHQSITGLYETRIDLSQLGGDGGGSSGGSGGVLNLEEEYRLHEKPVPSSIDPSWLQLFPTVWAERAGMGLANQVPPVVVELRSGASPVAVRQYPMSKEAREGIRPHIQRFLDLGVLVPCQSPWNTPLLPVKKPGTNDYRPVQDLREINKRVQDIHPTVPNPYNLLSSLPPSHTWYSVLDLKDAFFCLKLHPNSQPLFAFEWRDPEKGNTGQLTWTRLPQGFKNSPTLFNEALHRDLAPFRALNPQVVLLQYVDDLLVAAPTYRDCKEGTQKLLQELSKLGYRVSAKKAQLCQKEVTYLGYLLKEGKRWLTPARKATVMKIPPPTTPRQVREFLGTAGFCRLWIPGFASLAAPLYPLTKPSIPFIWTEEHQKAFDRIKEALLSAPALALPDLTKPFTLYVDERAGVARGVLTQTLGPWRRPVAYLSKKLDPVASGWPTCLKAVAAVALLLKDADKLTLGQNVTVIASHSLESIVRQPPDRWMTNARMTHYQSLLLNERVSFAPPAVLNPATLLPVESEATPVHRCSEILAEETGTRRDLKDQPLPGVPAWYTDGSSFIAEGKRRAGAAIVDGKRTVWASSLPEGTSAQKAELVALTQALRLAEGKDINIYTDSRYAFATAHIHGAIYKQRGWLTSAGKDIKNKEEILALLEAIHLPKRVAIIHCPGHQKGNDPVATGNRRADEAAKQAALSTRVLAETTKPAGKRTADGSEFEKRTADGSEFESPKKKAKVE

SEQ ID NO: 6620 - protein, 2091 aa, synthetic construct
MPAAKRVKLDGGDKKYSIGLDIGTNSVGWAVITDEYKVPSKKFKVLGNTDRHSIKKNLIGALLFDSGETAEATRLKRTARRRYTRRKNRICYLQEIFSNEMAKVDDSFFHRLEESFLVEEDKKHERHPIFGNIVDEVAYHEKYPTIYHLRKKLVDSTDKADLRLIYLALAHMIKFRGHFLIEGDLNPDNSDVDKLFIQLVQTYNQLFEENPINASGVDAKAILSARLSKSRRLENLIAQLPGEKKNGLFGNLIALSLGLTPNFKSNFDLAEDAKLQLSKDTYDDDLDNLLAQIGDQYADLFLAAKNLSDAILLSDILRVNTEITKAPLSASMIKRYDEHHQDLTLLKALVRQQLPEKYKEIFFDQSKNGYAGYIDGGASQEEFYKFIKPILEKMDGTEELLVKLNREDLLRKQRTFDNGSIPHQIHLGELHAILRRQEDFYPFLKDNREKIEKILTFRIPYYVGPLARGNSRFAWMTRKSEETITPWNFEEVVDKGASAQSFIERMTNFDKNLPNEKVLPKHSLLYEYFTVYNELTKVKYVTEGMRKPAFLSGEQKKAIVDLLFKTNRKVTVKQLKEDYFKKIECFDSVEISGVEDRFNASLGTYHDLLKIIKDKDFLDNEENEDILEDIVLTLTLFEDREMIEERLKTYAHLFDDKVMKQLKRRRYTGWGRLSRKLINGIRDKQSGKTILDFLKSDGFANRNFMQLIHDDSLTFKEDIQKAQVSGQGDSLHEHIANLAGSPAIKKGILQTVKVVDELVKVMGRHKPENIVIEMARENQTTQKGQKNSRERMKRIEEGIKELGSQILKEHPVENTQLQNEKLYLYYLQNGRDMYVDQELDINRLSDYDVDHIVPQSFLKDDSIDNKVLTRSDKARGKSDNVPSEEVVKKMKNYWRQLLNAKLITQRKFDNLTKAERGGLSELDKAGFIKRQLVETRQITKHVAQILDSRMNTKYDENDKLIREVKVITLKSKLVSDFRKDFQFYKVREINNYHHAHDAYLNAVVGTALIKKYPKLESEFVYGDYKVYDVRKMIAKSEQEIGKATAKYFFYSNIMNFFKTEITLANGEIRKRPLIETNGETGEIVWDKGRDFATVRKVLSMPQVNIVKKTEVQTGGFSKESILPKRNSDKLIARKKDWDPKKYGGFDSPTVAYSVLVVAKVEKGKSKKLKSVKELLGITIMERSSFEKNPIDFLEAKGYKEVKKDLIIKLPKYSLFELENGRKRMLASAGELQKGNELALPSKYVNFLYLASHYEKLKGSPEDNEQKQLFVEQHKHYLDEIIEQISEFSKRVILADANLDKVLSAYNKHRDKPIREQAENIIHLFTLTNLGAPAAFKYFDTTIDRKRYTSTKEVLDATLIHQSITGLYETRIDLSQLGGDGGGSSGGSGGTLNIEDEYRLHETSKEPDVPLGSTWLSDFPQAWAETGGMGLAVRQAPLIIPLKATSTPVSIKQYPMSQEARLGIKPHIQRLLDQGILVPCQSPWNTPLLPVKKPGTNDYRPVQDLREVNKRVEDIHPTVPNPYNLLSGLPPSHQWYTVLDLKDAFFCLRLHPTSQPLFAFEWRDPEMGISGQLTWTRLPQGFKNSPTLFNEALHRDLADFRIQHPDLILLQYVDDLLLAATSEQDCQRGTRALLQTLGNLGYRASAKKAQICQKQVKYLGYLLKEGQRWLTEARKETVMGQPTPKTPRQLREFLGTAGFCRLWIPGFAEMAAPLYPLTKPGTLFNWGPDQQKAYQEIKQALLTAPALGLPDLTKPFELFVDEKQGYAKGVLTQKLGPWRRPVAYLSKKLDPVAAGWPPCLRMVAAIAVLTKDAGKLTMGQPLVILAPHAVEALVKQPPDRWLSNARMTHYQAMLLDTDRVQFGPVVALNPATLLPLPEKEAPHDCLEILAETHGTRPDLTDQPIPDADYTWYTDGSSFLQEGQRRAGAAVTTETEVIWARALPAGTSAQRAELIALTQALKMAEGKKLNVYTDSRYAFATAHVHGEIYRRRGWLTSEGREIKNKNEILALLKALFLPKRLSIIHCPGHQKGNSAEARGNRMADQAAREAAMKAVLETSTLLAGKRTADGSEFEKRTADGSEFESPKKKAKVE

SEQ ID NO: 6621 - protein, 2095 aa, synthetic construct
MPAAKRVKLDGGDKKYSIGLDIGTNSVGWAVITDEYKVPSKKFKVLGNTDRHSIKKNLIGALLFDSGETAEATRLKRTARRRYTRRKNRICYLQEIFSNEMAKVDDSFFHRLEESFLVEEDKKHERHPIFGNIVDEVAYHEKYPTIYHLRKKLVDSTDKADLRLIYLALAHMIKFRGHFLIEGDLNPDNSDVDKLFIQLVQTYNQLFEENPINASGVDAKAILSARLSKSRRLENLIAQLPGEKKNGLFGNLIALSLGLTPNFKSNFDLAEDAKLQLSKDTYDDDLDNLLAQIGDQYADLFLAAKNLSDAILLSDILRVNTEITKAPLSASMIKRYDEHHQDLTLLKALVRQQLPEKYKEIFFDQSKNGYAGYIDGGASQEEFYKFIKPILEKMDGTEELLVKLNREDLLRKQRTFDNGSIPHQIHLGELHAILRRQEDFYPFLKDNREKIEKILTFRIPYYVGPLARGNSRFAWMTRKSEETITPWNFEEVVDKGASAQSFIERMTNFDKNLPNEKVLPKHSLLYEYFTVYNELTKVKYVTEGMRKPAFLSGEQKKAIVDLLFKTNRKVTVKQLKEDYFKKIECFDSVEISGVEDRFNASLGTYHDLLKIIKDKDFLDNEENEDILEDIVLTLTLFEDREMIEERLKTYAHLFDDKVMKQLKRRRYTGWGRLSRKLINGIRDKQSGKTILDFLKSDGFANRNFMQLIHDDSLTFKEDIQKAQVSGQGDSLHEHIANLAGSPAIKKGILQTVKVVDELVKVMGRHKPENIVIEMARENQTTQKGQKNSRERMKRIEEGIKELGSQILKEHPVENTQLQNEKLYLYYLQNGRDMYVDQELDINRLSDYDVDHIVPQSFLKDDSIDNKVLTRSDKARGKSDNVPSEEVVKKMKNYWRQLLNAKLITQRKFDNLTKAERGGLSELDKAGFIKRQLVETRQITKHVAQILDSRMNTKYDENDKLIREVKVITLKSKLVSDFRKDFQFYKVREINNYHHAHDAYLNAVVGTALIKKYPKLESEFVYGDYKVYDVRKMIAKSEQEIGKATAKYFFYSNIMNFFKTEITLANGEIRKRPLIETNGETGEIVWDKGRDFATVRKVLSMPQVNIVKKTEVQTGGFSKESILPKRNSDKLIARKKDWDPKKYGGFDSPTVAYSVLVVAKVEKGKSKKLKSVKELLGITIMERSSFEKNPIDFLEAKGYKEVKKDLIIKLPKYSLFELENGRKRMLASAGELQKGNELALPSKYVNFLYLASHYEKLKGSPEDNEQKQLFVEQHKHYLDEIIEQISEFSKRVILADANLDKVLSAYNKHRDKPIREQAENIIHLFTLTNLGAPAAFKYFDTTIDRKRYTSTKEVLDATLIHQSITGLYETRIDLSQLGGDGGGGSEAAAKGGTAPLEEEYRLFLEAPIQNVTLLEQWKREIPKVWAEINPPGLASTQAPIHVQLLSTALPVRVRQYPITLEAKRSLRETIRKFRAAGILRPVHSPWNTPLLPVRKSGTSEYRMVQDLREVNKRVETIHPTVPNPYTLLSLLPPDRIWYSVLDLKDAFFCIPLAPESQLIFAFEWADAEEGESGQLTWTRLPQGFKNSPTLFNEALNRDLQGFRLDHPSVSLLQYVDDLLIAADTQAACLSATRDLLMTLAELGYRVSGKKAQLCQEEVTYLGFKIHKGSRSLSNSRTQAILQIPVPKTKRQVREFLGTIGYCRLWIPGFAELAQPLYAATRPGNDPLVWGEKEEEAFQSLKLALTQPPALALPSLDKPFQLFVEETSGAAKGVLTQALGPWKRPVAYLSKRLDPVAAGWPRCLRAIAAAALLTREASKLTFGQDIEITSSHNLESLLRSPPDKWLTNARITQYQVLLLDPPRVRFKQTAALNPATLLPETDDTLPIHHCLDTLDSLTSTRPDLTDQPLAQAEATLFTDGSSYIRDGKRYAGAAVVTLDSVIWAEPLPIGTSAQKAELIALTKALEWSKDKSVNIYTDSRYAFATLHVHGMIYRERGWLTAGGKAIKNAPEILALLTAVWLPKRVAVMHCKGHQKDDAPTSTGNRRADEVAREVAIRPLSTQATISAGKRTADGSEFEKRTADGSEFESPKKKAKVE

SEQ ID NO: 6622 - protein, 2095 aa, synthetic construct
MPAAKRVKLDGGDKKYSIGLDIGTNSVGWAVITDEYKVPSKKFKVLGNTDRHSIKKNLIGALLFDSGETAEATRLKRTARRRYTRRKNRICYLQEIFSNEMAKVDDSFFHRLEESFLVEEDKKHERHPIFGNIVDEVAYHEKYPTIYHLRKKLVDSTDKADLRLIYLALAHMIKFRGHFLIEGDLNPDNSDVDKLFIQLVQTYNQLFEENPINASGVDAKAILSARLSKSRRLENLIAQLPGEKKNGLFGNLIALSLGLTPNFKSNFDLAEDAKLQLSKDTYDDDLDNLLAQIGDQYADLFLAAKNLSDAILLSDILRVNTEITKAPLSASMIKRYDEHHQDLTLLKALVRQQLPEKYKEIFFDQSKNGYAGYIDGGASQEEFYKFIKPILEKMDGTEELLVKLNREDLLRKQRTFDNGSIPHQIHLGELHAILRRQEDFYPFLKDNREKIEKILTFRIPYYVGPLARGNSRFAWMTRKSEETITPWNFEEVVDKGASAQSFIERMTNFDKNLPNEKVLPKHSLLYEYFTVYNELTKVKYVTEGMRKPAFLSGEQKKAIVDLLFKTNRKVTVKQLKEDYFKKIECFDSVEISGVEDRFNASLGTYHDLLKIIKDKDFLDNEENEDILEDIVLTLTLFEDREMIEERLKTYAHLFDDKVMKQLKRRRYTGWGRLSRKLINGIRDKQSGKTILDFLKSDGFANRNFMQLIHDDSLTFKEDIQKAQVSGQGDSLHEHIANLAGSPAIKKGILQTVKVVDELVKVMGRHKPENIVIEMARENQTTQKGQKNSRERMKRIEEGIKELGSQILKEHPVENTQLQNEKLYLYYLQNGRDMYVDQELDINRLSDYDVDHIVPQSFLKDDSIDNKVLTRSDKARGKSDNVPSEEVVKKMKNYWRQLLNAKLITQRKFDNLTKAERGGLSELDKAGFIKRQLVETRQITKHVAQILDSRMNTKYDENDKLIREVKVITLKSKLVSDFRKDFQFYKVREINNYHHAHDAYLNAVVGTALIKKYPKLESEFVYGDYKVYDVRKMIAKSEQEIGKATAKYFFYSNIMNFFKTEITLANGEIRKRPLIETNGETGEIVWDKGRDFATVRKVLSMPQVNIVKKTEVQTGGFSKESILPKRNSDKLIARKKDWDPKKYGGFDSPTVAYSVLVVAKVEKGKSKKLKSVKELLGITIMERSSFEKNPIDFLEAKGYKEVKKDLIIKLPKYSLFELENGRKRMLASAGELQKGNELALPSKYVNFLYLASHYEKLKGSPEDNEQKQLFVEQHKHYLDEIIEQISEFSKRVILADANLDKVLSAYNKHRDKPIREQAENIIHLFTLTNLGAPAAFKYFDTTIDRKRYTSTKEVLDATLIHQSITGLYETRIDLSQLGGDGGGGSEAAAKGGTAPLEEEYRLFLEAPIQNVTLLEQWKREIPKVWAEINPPGLASTQAPIHVQLLSTALPVRVRQYPITLEAKRSLRETIRKFRAAGILRPVHSPWNTPLLPVRKSGTSEYRMVQDLREVNKRVETIHPTVPNPYTLLSLLPPDRIWYSVLDLKDAFFCIPLAPESQLIFAFEWADAEEGESGQLTWTRLPQGFKNSPTLFNEALNRDLQGFRLDHPSVSLLQYVDDLLIAADTQAACLSATRDLLMTLAELGYRVSGKKAQLCQEEVTYLGFKIHKGSRSLSNSRTQAILQIPVPKTKRQVREFLGKIGYCRLFIPGFAELAQPLYAATRPGNDPLVWGEKEEEAFQSLKLALTQPPALALPSLDKPFQLFVEETSGAAKGVLTQALGPWKRPVAYLSKRLDPVAAGWPRCLRAIAAAALLTREASKLTFGQDIEITSSHNLESLLRSPPDKWLTNARITQYQVLLLDPPRVRFKQTAALNPATLLPETDDTLPIHHCLDTLDSLTSTRPDLTDQPLAQAEATLFTDGSSYIRDGKRYAGAAVVTLDSVIWAEPLPIGTSAQKAELIALTKALEWSKDKSVNIYTDSRYAFATLHVHGMIYRERGWLTAGGKAIKNAPEILALLTAVWLPKRVAVMHCKGHQKDDAPTSTGNRRADEVAREVAIRPLSTQATISAGKRTADGSEFEKRTADGSEFESPKKKAKVE

SEQ ID NO: 6623 - protein, 2092 aa, synthetic construct
MPAAKRVKLDGGDKKYSIGLDIGTNSVGWAVITDEYKVPSKKFKVLGNTDRHSIKKNLIGALLFDSGETAEATRLKRTARRRYTRRKNRICYLQEIFSNEMAKVDDSFFHRLEESFLVEEDKKHERHPIFGNIVDEVAYHEKYPTIYHLRKKLVDSTDKADLRLIYLALAHMIKFRGHFLIEGDLNPDNSDVDKLFIQLVQTYNQLFEENPINASGVDAKAILSARLSKSRRLENLIAQLPGEKKNGLFGNLIALSLGLTPNFKSNFDLAEDAKLQLSKDTYDDDLDNLLAQIGDQYADLFLAAKNLSDAILLSDILRVNTEITKAPLSASMIKRYDEHHQDLTLLKALVRQQLPEKYKEIFFDQSKNGYAGYIDGGASQEEFYKFIKPILEKMDGTEELLVKLNREDLLRKQRTFDNGSIPHQIHLGELHAILRRQEDFYPFLKDNREKIEKILTFRIPYYVGPLARGNSRFAWMTRKSEETITPWNFEEVVDKGASAQSFIERMTNFDKNLPNEKVLPKHSLLYEYFTVYNELTKVKYVTEGMRKPAFLSGEQKKAIVDLLFKTNRKVTVKQLKEDYFKKIECFDSVEISGVEDRFNASLGTYHDLLKIIKDKDFLDNEENEDILEDIVLTLTLFEDREMIEERLKTYAHLFDDKVMKQLKRRRYTGWGRLSRKLINGIRDKQSGKTILDFLKSDGFANRNFMQLIHDDSLTFKEDIQKAQVSGQGDSLHEHIANLAGSPAIKKGILQTVKVVDELVKVMGRHKPENIVIEMARENQTTQKGQKNSRERMKRIEEGIKELGSQILKEHPVENTQLQNEKLYLYYLQNGRDMYVDQELDINRLSDYDVDHIVPQSFLKDDSIDNKVLTRSDKARGKSDNVPSEEVVKKMKNYWRQLLNAKLITQRKFDNLTKAERGGLSELDKAGFIKRQLVETRQITKHVAQILDSRMNTKYDENDKLIREVKVITLKSKLVSDFRKDFQFYKVREINNYHHAHDAYLNAVVGTALIKKYPKLESEFVYGDYKVYDVRKMIAKSEQEIGKATAKYFFYSNIMNFFKTEITLANGEIRKRPLIETNGETGEIVWDKGRDFATVRKVLSMPQVNIVKKTEVQTGGFSKESILPKRNSDKLIARKKDWDPKKYGGFDSPTVAYSVLVVAKVEKGKSKKLKSVKELLGITIMERSSFEKNPIDFLEAKGYKEVKKDLIIKLPKYSLFELENGRKRMLASAGELQKGNELALPSKYVNFLYLASHYEKLKGSPEDNEQKQLFVEQHKHYLDEIIEQISEFSKRVILADANLDKVLSAYNKHRDKPIREQAENIIHLFTLTNLGAPAAFKYFDTTIDRKRYTSTKEVLDATLIHQSITGLYETRIDLSQLGGDGGGGSEAAAKGGTLQLEEEYRLFEPESTQKQEMDIWLKNFPQAWAETGGMGTAHCQAPVLIQLKATATPISIRQYPMPHEAYQGIKPHIRRMLDQGILKPCQSPWNTPLLPVKKPGTEDYRPVQDLREVNKRVEDIHPTVPNPYNLLSTLPPSHPWYTVLDLKDAFFCLRLHSESQLLFAFEWRDPEIGLSGQLTWTRLPQGFKNSPTLFNEALHSDLADFRVRYPALVLLQYVDDLLLAAATRTECLEGTKALLETLGNKGYRASAKKAQICLQEVTYLGYSLKDGQRWLTKARKEAILSIPVPKNSRQVREFLGTAGYCRLWIPGFAELAAPLYPLTRPGTLFQWGTEQQLAFEDIKKALLSSPALGLPDITKPFELFIDENSGFAKGVLVQKLGPWKRPVAYLSKKLDTVASGWPPCLRMVAAIAILVKDAGKLTLGQPLTILTSHPVEALVRQPPNKWLSNARMTHYQAMLLDAERVHFGPTVSLNPATLLPLPSGGNHHDCLQILAETHGTRPDLTDQPLPDADLTWYTDGSSFIRNGEREAGAAVTTESEVIWAAPLPPGTSAQRAELIALTQALKMAEGKKLTVYTDSRYAFATTHVHGEIYRRRGWLTSEGKEIKNKNEILALLEALFLPKRLSIIHCPGHQKGDSPQAKGNRLADDTAKKAATETHSSLTVLPAGKRTADGSEFEKRTADGSEFESPKKKAKVE

SEQ ID NO: 6624 - protein, 2124 aa, synthetic construct
MPAAKRVKLDGGDKKYSIGLDIGTNSVGWAVITDEYKVPSKKFKVLGNTDRHSIKKNLIGALLFDSGETAEATRLKRTARRRYTRRKNRICYLQEIFSNEMAKVDDSFFHRLEESFLVEEDKKHERHPIFGNIVDEVAYHEKYPTIYHLRKKLVDSTDKADLRLIYLALAHMIKFRGHFLIEGDLNPDNSDVDKLFIQLVQTYNQLFEENPINASGVDAKAILSARLSKSRRLENLIAQLPGEKKNGLFGNLIALSLGLTPNFKSNFDLAEDAKLQLSKDTYDDDLDNLLAQIGDQYADLFLAAKNLSDAILLSDILRVNTEITKAPLSASMIKRYDEHHQDLTLLKALVRQQLPEKYKEIFFDQSKNGYAGYIDGGASQEEFYKFIKPILEKMDGTEELLVKLNREDLLRKQRTFDNGSIPHQIHLGELHAILRRQEDFYPFLKDNREKIEKILTFRIPYYVGPLARGNSRFAWMTRKSEETITPWNFEEVVDKGASAQSFIERMTNFDKNLPNEKVLPKHSLLYEYFTVYNELTKVKYVTEGMRKPAFLSGEQKKAIVDLLFKTNRKVTVKQLKEDYFKKIECFDSVEISGVEDRFNASLGTYHDLLKIIKDKDFLDNEENEDILEDIVLTLTLFEDREMIEERLKTYAHLFDDKVMKQLKRRRYTGWGRLSRKLINGIRDKQSGKTILDFLKSDGFANRNFMQLIHDDSLTFKEDIQKAQVSGQGDSLHEHIANLAGSPAIKKGILQTVKVVDELVKVMGRHKPENIVIEMARENQTTQKGQKNSRERMKRIEEGIKELGSQILKEHPVENTQLQNEKLYLYYLQNGRDMYVDQELDINRLSDYDVDHIVPQSFLKDDSIDNKVLTRSDKARGKSDNVPSEEVVKKMKNYWRQLLNAKLITQRKFDNLTKAERGGLSELDKAGFIKRQLVETRQITKHVAQILDSRMNTKYDENDKLIREVKVITLKSKLVSDFRKDFQFYKVREINNYHHAHDAYLNAVVGTALIKKYPKLESEFVYGDYKVYDVRKMIAKSEQEIGKATAKYFFYSNIMNFFKTEITLANGEIRKRPLIETNGETGEIVWDKGRDFATVRKVLSMPQVNIVKKTEVQTGGFSKESILPKRNSDKLIARKKDWDPKKYGGFDSPTVAYSVLVVAKVEKGKSKKLKSVKELLGITIMERSSFEKNPIDFLEAKGYKEVKKDLIIKLPKYSLFELENGRKRMLASAGELQKGNELALPSKYVNFLYLASHYEKLKGSPEDNEQKQLFVEQHKHYLDEIIEQISEFSKRVILADANLDKVLSAYNKHRDKPIREQAENIIHLFTLTNLGAPAAFKYFDTTIDRKRYTSTKEVLDATLIHQSITGLYETRIDLSQLGGDGGGGSEAAAKGGLLGRDLLTKLKAQIQFSTEGPQVTWEDRPAMCLVLNLEEEYRLHEKPVPPSIDPSWLQLFPMVWAEKAGMGLANQVPPVVVELKSDASPVAVRQYPMSKEAREGIRPHIQRFLDLGILVPCQSPWNTPLLPVKKPGTNDYRPVQDLREVNKRVQDIHPTVPNPYNLLSSLPPSHTWYSVLDLKDAFFCLKLHPNSQPLFAFEWRDPEKGNTGQLTWTRLPQGFKNSPTLFNEALHRDLASFRALNPQVVMLQYVDDLLVAAPTYRDCKEGTRRLLQELSKLGYRVSAKKAQLCREEVTYLGYLLKGGKRWLTPARKATVMKIPTPTTPRQVREFLGTAGFCRLWIPGFASLAAPLYPLTRPKVPFTWTEAHQEAFGRIKEALLSAPALALPDLTKPFALYVDEKEGVARGVLTQTLGPWRRPVAYLSKKLDPVASGWPTCLKAIAAVALLLKDADKLTLGQNVLVIAPHNLESIVRQPPDRWMTNARMTHYQSLLLNERVSFAPPAILNPATLLPVESDDTPIHICSEILAEETGTRPDLRDQPLPGVPAWYTDGSSFIMDGRRQAGAAIVDNKRTVWASNLPEGTSAQKAELIALTQALRLAEGKSINIYTDSRYAFATAHVHGAIYKQRGWLTSAGKDIKNKEEILALLEAIHLPKRVAIIHCPGHQRGTDPVATGNRKADEAAKQAAQSTRILTETTKNAGKRTADGSEFEKRTADGSEFESPKKKAKVE

SEQ ID NO: 6625 - protein, 2215 aa, synthetic construct
MPAAKRVKLDGGDKKYSIGLDIGTNSVGWAVITDEYKVPSKKFKVLGNTDRHSIKKNLIGALLFDSGETAEATRLKRTARRRYTRRKNRICYLQEIFSNEMAKVDDSFFHRLEESFLVEEDKKHERHPIFGNIVDEVAYHEKYPTIYHLRKKLVDSTDKADLRLIYLALAHMIKFRGHFLIEGDLNPDNSDVDKLFIQLVQTYNQLFEENPINASGVDAKAILSARLSKSRRLENLIAQLPGEKKNGLFGNLIALSLGLTPNFKSNFDLAEDAKLQLSKDTYDDDLDNLLAQIGDQYADLFLAAKNLSDAILLSDILRVNTEITKAPLSASMIKRYDEHHQDLTLLKALVRQQLPEKYKEIFFDQSKNGYAGYIDGGASQEEFYKFIKPILEKMDGTEELLVKLNREDLLRKQRTFDNGSIPHQIHLGELHAILRRQEDFYPFLKDNREKIEKILTFRIPYYVGPLARGNSRFAWMTRKSEETITPWNFEEVVDKGASAQSFIERMTNFDKNLPNEKVLPKHSLLYEYFTVYNELTKVKYVTEGMRKPAFLSGEQKKAIVDLLFKTNRKVTVKQLKEDYFKKIECFDSVEISGVEDRFNASLGTYHDLLKIIKDKDFLDNEENEDILEDIVLTLTLFEDREMIEERLKTYAHLFDDKVMKQLKRRRYTGWGRLSRKLINGIRDKQSGKTILDFLKSDGFANRNFMQLIHDDSLTFKEDIQKAQVSGQGDSLHEHIANLAGSPAIKKGILQTVKVVDELVKVMGRHKPENIVIEMARENQTTQKGQKNSRERMKRIEEGIKELGSQILKEHPVENTQLQNEKLYLYYLQNGRDMYVDQELDINRLSDYDVDHIVPQSFLKDDSIDNKVLTRSDKARGKSDNVPSEEVVKKMKNYWRQLLNAKLITQRKFDNLTKAERGGLSELDKAGFIKRQLVETRQITKHVAQILDSRMNTKYDENDKLIREVKVITLKSKLVSDFRKDFQFYKVREINNYHHAHDAYLNAVVGTALIKKYPKLESEFVYGDYKVYDVRKMIAKSEQEIGKATAKYFFYSNIMNFFKTEITLANGEIRKRPLIETNGETGEIVWDKGRDFATVRKVLSMPQVNIVKKTEVQTGGFSKESILPKRNSDKLIARKKDWDPKKYGGFDSPTVAYSVLVVAKVEKGKSKKLKSVKELLGITIMERSSFEKNPIDFLEAKGYKEVKKDLIIKLPKYSLFELENGRKRMLASAGELQKGNELALPSKYVNFLYLASHYEKLKGSPEDNEQKQLFVEQHKHYLDEIIEQISEFSKRVILADANLDKVLSAYNKHRDKPIREQAENIIHLFTLTNLGAPAAFKYFDTTIDRKRYTSTKEVLDATLIHQSITGLYETRIDLSQLGGDGGGGSEAAAKGGTLGDQGSRGSDPLPEPRVTLTVEGIPTEFLVNTGAEHSVLTKPMGKMGSKRTVVAGATGSKVYPWTTKRLLKIGQKQVTHSFLVIPECPAPLLGRDLLTKLKAQIQFSTEGPQVTWEDRPAMCLVLNLEEEYRLHEKPVPPSIDPSWLQLFPMVWAEKAGMGLANQVPPVVVELKSDASPVAVRQYPMSKEAREGIRPHIQRFLDLGILVPCQSPWNTPLLPVKKPGTNDYRPVQDLREVNKRVQDIHPTVPNPYNLLSSLPPSHTWYSVLDLKDAFFCLKLHPNSQPLFAFEWRDPEKGNTGQLTWTRLPQGFKNSPTLFNEALHRDLASFRALNPQVVMLQYVDDLLVAAPTYRDCKEGTRRLLQELSKLGYRVSAKKAQLCREEVTYLGYLLKGGKRWLTPARKATVMKIPTPTTPRQVREFLGTAGFCRLWIPGFASLAAPLYPLTRPKVPFTWTEAHQEAFGRIKEALLSAPALALPDLTKPFALYVDEKEGVARGVLTQTLGPWRRPVAYLSKKLDPVASGWPTCLKAIAAVALLLKDADKLTLGQNVLVIAPHNLESIVRQPPDRWMTNARMTHYQSLLLNERVSFAPPAILNPATLLPVESDDTPIHICSEILAEETGTRPDLRDQPLPGVPAWYTDGSSFIMDGRRQAGAAIVDNKRTVWASNLPEGTSAQKAELIALTQALRLAEGKSINIYTDSRYAFATAHVHGAIYKQRGWLTSAGKDIKNKEEILALLEAIHLPKRVAIIHCPGHQRGTDPVATGNRKADEAAKQAAQSTRILTETTKNAGKRTADGSEFEKRTADGSEFESPKKKAKVE

SEQ ID NO: 6626 - protein, 2093 aa, synthetic construct
MPAAKRVKLDGGDKKYSIGLDIGTNSVGWAVITDEYKVPSKKFKVLGNTDRHSIKKNLIGALLFDSGETAEATRLKRTARRRYTRRKNRICYLQEIFSNEMAKVDDSFFHRLEESFLVEEDKKHERHPIFGNIVDEVAYHEKYPTIYHLRKKLVDSTDKADLRLIYLALAHMIKFRGHFLIEGDLNPDNSDVDKLFIQLVQTYNQLFEENPINASGVDAKAILSARLSKSRRLENLIAQLPGEKKNGLFGNLIALSLGLTPNFKSNFDLAEDAKLQLSKDTYDDDLDNLLAQIGDQYADLFLAAKNLSDAILLSDILRVNTEITKAPLSASMIKRYDEHHQDLTLLKALVRQQLPEKYKEIFFDQSKNGYAGYIDGGASQEEFYKFIKPILEKMDGTEELLVKLNREDLLRKQRTFDNGSIPHQIHLGELHAILRRQEDFYPFLKDNREKIEKILTFRIPYYVGPLARGNSRFAWMTRKSEETITPWNFEEVVDKGASAQSFIERMTNFDKNLPNEKVLPKHSLLYEYFTVYNELTKVKYVTEGMRKPAFLSGEQKKAIVDLLFKTNRKVTVKQLKEDYFKKIECFDSVEISGVEDRFNASLGTYHDLLKIIKDKDFLDNEENEDILEDIVLTLTLFEDREMIEERLKTYAHLFDDKVMKQLKRRRYTGWGRLSRKLINGIRDKQSGKTILDFLKSDGFANRNFMQLIHDDSLTFKEDIQKAQVSGQGDSLHEHIANLAGSPAIKKGILQTVKVVDELVKVMGRHKPENIVIEMARENQTTQKGQKNSRERMKRIEEGIKELGSQILKEHPVENTQLQNEKLYLYYLQNGRDMYVDQELDINRLSDYDVDHIVPQSFLKDDSIDNKVLTRSDKARGKSDNVPSEEVVKKMKNYWRQLLNAKLITQRKFDNLTKAERGGLSELDKAGFIKRQLVETRQITKHVAQILDSRMNTKYDENDKLIREVKVITLKSKLVSDFRKDFQFYKVREINNYHHAHDAYLNAVVGTALIKKYPKLESEFVYGDYKVYDVRKMIAKSEQEIGKATAKYFFYSNIMNFFKTEITLANGEIRKRPLIETNGETGEIVWDKGRDFATVRKVLSMPQVNIVKKTEVQTGGFSKESILPKRNSDKLIARKKDWDPKKYGGFDSPTVAYSVLVVAKVEKGKSKKLKSVKELLGITIMERSSFEKNPIDFLEAKGYKEVKKDLIIKLPKYSLFELENGRKRMLASAGELQKGNELALPSKYVNFLYLASHYEKLKGSPEDNEQKQLFVEQHKHYLDEIIEQISEFSKRVILADANLDKVLSAYNKHRDKPIREQAENIIHLFTLTNLGAPAAFKYFDTTIDRKRYTSTKEVLDATLIHQSITGLYETRIDLSQLGGDGGGGSEAAAKGGTLNIEDEYRLHETSKEPDVSLGSTWLSDFPQAWAETGGMGLAVRQAPLIIPLKATSTPVSIKQYPMSQEARLGIKPHIQRLLDQGILVPCQSPWNTPLLPVKKPGTNDYRPVQDLREVNKRVEDIHPTVPNPYNLLSGLPPSHQWYTVLDLKDAFFCLRLHPTSQPLFAFEWRDPEMGISGQLTWTRLPQGFKNSPTLFNEALHRDLAGFRIQHPDLILLQYVDDLLLAATSELDCQQGTRALLQTLGDLGYRASAKKAQICQKQVKYLGYLLKEGQRWLTEARKETVMGQPIPKTPRQLREFLGTAGFCRLWIPGFAEMAAPLYPLTKPGTLFNWGPDQQKAFQEIKQALLTAPALGLPDLTKPFELFVDEKQGYAKGVLTQKLGPWRRPVAYLSKKLDPVAAGWPPCLRMVAAIAVLTKDAGKLTMGQPLVILAPHAVEALVKQPPDRWLSNARMTHYQALLLDTDRVQFGPVVALNPATLLPLPEEGLQHDCLDILAEAHGTRSDLMDQPLPDADHTWYTDGSSFLQEGQRKAGAAVTTETEVIWARALPAGTSAQRAELIALTQALKMAEGKKLNVYTDSRYAFATAHIHGEIYRRRGWLTSEGKEIKNKDEILALLKALFLPKRLSIIHCPGHQKGNSAEARGNRMADQAAREVATRETPETSTLLAGKRTADGSEFEKRTADGSEFESPKKKAKVE

SEQ ID NO: 6627 - protein, 2093 aa, synthetic construct
MPAAKRVKLDGGDKKYSIGLDIGTNSVGWAVITDEYKVPSKKFKVLGNTDRHSIKKNLIGALLFDSGETAEATRLKRTARRRYTRRKNRICYLQEIFSNEMAKVDDSFFHRLEESFLVEEDKKHERHPIFGNIVDEVAYHEKYPTIYHLRKKLVDSTDKADLRLIYLALAHMIKFRGHFLIEGDLNPDNSDVDKLFIQLVQTYNQLFEENPINASGVDAKAILSARLSKSRRLENLIAQLPGEKKNGLFGNLIALSLGLTPNFKSNFDLAEDAKLQLSKDTYDDDLDNLLAQIGDQYADLFLAAKNLSDAILLSDILRVNTEITKAPLSASMIKRYDEHHQDLTLLKALVRQQLPEKYKEIFFDQSKNGYAGYIDGGASQEEFYKFIKPILEKMDGTEELLVKLNREDLLRKQRTFDNGSIPHQIHLGELHAILRRQEDFYPFLKDNREKIEKILTFRIPYYVGPLARGNSRFAWMTRKSEETITPWNFEEVVDKGASAQSFIERMTNFDKNLPNEKVLPKHSLLYEYFTVYNELTKVKYVTEGMRKPAFLSGEQKKAIVDLLFKTNRKVTVKQLKEDYFKKIECFDSVEISGVEDRFNASLGTYHDLLKIIKDKDFLDNEENEDILEDIVLTLTLFEDREMIEERLKTYAHLFDDKVMKQLKRRRYTGWGRLSRKLINGIRDKQSGKTILDFLKSDGFANRNFMQLIHDDSLTFKEDIQKAQVSGQGDSLHEHIANLAGSPAIKKGILQTVKVVDELVKVMGRHKPENIVIEMARENQTTQKGQKNSRERMKRIEEGIKELGSQILKEHPVENTQLQNEKLYLYYLQNGRDMYVDQELDINRLSDYDVDHIVPQSFLKDDSIDNKVLTRSDKARGKSDNVPSEEVVKKMKNYWRQLLNAKLITQRKFDNLTKAERGGLSELDKAGFIKRQLVETRQITKHVAQILDSRMNTKYDENDKLIREVKVITLKSKLVSDFRKDFQFYKVREINNYHHAHDAYLNAVVGTALIKKYPKLESEFVYGDYKVYDVRKMIAKSEQEIGKATAKYFFYSNIMNFFKTEITLANGEIRKRPLIETNGETGEIVWDKGRDFATVRKVLSMPQVNIVKKTEVQTGGFSKESILPKRNSDKLIARKKDWDPKKYGGFDSPTVAYSVLVVAKVEKGKSKKLKSVKELLGITIMERSSFEKNPIDFLEAKGYKEVKKDLIIKLPKYSLFELENGRKRMLASAGELQKGNELALPSKYVNFLYLASHYEKLKGSPEDNEQKQLFVEQHKHYLDEIIEQISEFSKRVILADANLDKVLSAYNKHRDKPIREQAENIIHLFTLTNLGAPAAFKYFDTTIDRKRYTSTKEVLDATLIHQSITGLYETRIDLSQLGGDGGGGSEAAAKGGTLNIEDEYRLHETSKGPDVPLGSTWLSDFPQAWAETGGMGLAVRQAPLIIPLKATSTPVSIKQYPMSQEARLGIKPHIQRLLDQGILVPCQSPWNTPLLPVKKPGTNDYRPVQDLREVNKRVEDIHPTVPNPYNLLSGLPPSHQWYTVLDLKDAFFCLRLHPTSQSLFAFEWRDPEMGISGQLTWTRLPQGFKNSPTLFNEALHRDLADFRIQHPDLILLQYVDDLLLAATSELDCQQGTRALLQTLGDLGYRASAKKAQICQKQVKYLGYLLKEGQRWLTEARKETVMGQPTPKTPRQLREFLGTAGFCRLWIPGFAEMAAPLYPLTKPGTLFEWGPDQQKAYQEIKQALLTAPALGLPDLTKPFELFVDEKQGYAKGVLTQKLGPWRRPVAYLSKKLDPVAAGWPPCLRMVAAIAVLTKDAGKLTMGQPLVILAPHAVEALVKQPPDRWLSNARMTHYQALLLDTDRVQFGPIVALNPATLLPLPEEGLQHDCLDILAEAHGTRPDLTDQPLPDADHTWYTDGSSFLQEGQRKAGAAVTTETEVVWAKALPAGTSAQRAELIALTQALKMAEGKKLNVYTDSRYAFATAHIHGEIYRRRGWLTSEGKEIKNKDEILALLKALFLPKRLSIIHCPGHQKGNRAEARGNRMADQAAREVATRETPETSTLLAGKRTADGSEFEKRTADGSEFESPKKKAKVE

SEQ ID NO: 6628 - protein, 2084 aa, synthetic construct
MPAAKRVKLDGGDKKYSIGLDIGTNSVGWAVITDEYKVPSKKFKVLGNTDRHSIKKNLIGALLFDSGETAEATRLKRTARRRYTRRKNRICYLQEIFSNEMAKVDDSFFHRLEESFLVEEDKKHERHPIFGNIVDEVAYHEKYPTIYHLRKKLVDSTDKADLRLIYLALAHMIKFRGHFLIEGDLNPDNSDVDKLFIQLVQTYNQLFEENPINASGVDAKAILSARLSKSRRLENLIAQLPGEKKNGLFGNLIALSLGLTPNFKSNFDLAEDAKLQLSKDTYDDDLDNLLAQIGDQYADLFLAAKNLSDAILLSDILRVNTEITKAPLSASMIKRYDEHHQDLTLLKALVRQQLPEKYKEIFFDQSKNGYAGYIDGGASQEEFYKFIKPILEKMDGTEELLVKLNREDLLRKQRTFDNGSIPHQIHLGELHAILRRQEDFYPFLKDNREKIEKILTFRIPYYVGPLARGNSRFAWMTRKSEETITPWNFEEVVDKGASAQSFIERMTNFDKNLPNEKVLPKHSLLYEYFTVYNELTKVKYVTEGMRKPAFLSGEQKKAIVDLLFKTNRKVTVKQLKEDYFKKIECFDSVEISGVEDRFNASLGTYHDLLKIIKDKDFLDNEENEDILEDIVLTLTLFEDREMIEERLKTYAHLFDDKVMKQLKRRRYTGWGRLSRKLINGIRDKQSGKTILDFLKSDGFANRNFMQLIHDDSLTFKEDIQKAQVSGQGDSLHEHIANLAGSPAIKKGILQTVKVVDELVKVMGRHKPENIVIEMARENQTTQKGQKNSRERMKRIEEGIKELGSQILKEHPVENTQLQNEKLYLYYLQNGRDMYVDQELDINRLSDYDVDHIVPQSFLKDDSIDNKVLTRSDKARGKSDNVPSEEVVKKMKNYWRQLLNAKLITQRKFDNLTKAERGGLSELDKAGFIKRQLVETRQITKHVAQILDSRMNTKYDENDKLIREVKVITLKSKLVSDFRKDFQFYKVREINNYHHAHDAYLNAVVGTALIKKYPKLESEFVYGDYKVYDVRKMIAKSEQEIGKATAKYFFYSNIMNFFKTEITLANGEIRKRPLIETNGETGEIVWDKGRDFATVRKVLSMPQVNIVKKTEVQTGGFSKESILPKRNSDKLIARKKDWDPKKYGGFDSPTVAYSVLVVAKVEKGKSKKLKSVKELLGITIMERSSFEKNPIDFLEAKGYKEVKKDLIIKLPKYSLFELENGRKRMLASAGELQKGNELALPSKYVNFLYLASHYEKLKGSPEDNEQKQLFVEQHKHYLDEIIEQISEFSKRVILADANLDKVLSAYNKHRDKPIREQAENIIHLFTLTNLGAPAAFKYFDTTIDRKRYTSTKEVLDATLIHQSITGLYETRIDLSQLGGDGGGGSEAAAKGGIPWLMKKPLQLTTLVPLQEYEERLLKQTMLTGSYKEKLQSLFLKYDALWQHWENQVGHRRIKPHHIATGTVNPRPQKQYPINPKAKASIQTVINDLLKQGVLIQQNSIMNTPVYPVPKPDGKWRMVLDYREVNKTIPLIAAQNQHSAGILSSIFRGKYKTTLDLSNGFWAHSITPESYWLTAFTWLGQQYCWTRLPQGFLNSPALFNADVVDLLKEVPNVQVYVDDIYISHDDPREHLEQLEKVFSLLLNAGYVVSLKKSEIAQHEVEFLGFNITKEGRGLTETFKQKLLNITPPRDLKQLQSILGLLNFARNFIPNFSELVKPLYNIIATAPGKYITWTTDNSQQLQNIISMLNSAENLEERNPEVRLIMKVNTSPSAGYIRFYNEFAKRPIMYLNYVYTKAEVKFTNTEKLLTTIHKGLIKALDLGMGQEILVYSPIVSMTKIQKTPLPERKALPIRWITWMSYLEDPRIQFHYDKTLPELQQVPTVTDDIIAKIKHPSEFSMVFYTDGSAIKHPNVNKSHNAGMGIAQVQFKPEFTVINTWSIPLGDHTAQLAEVAAVEFACKKALKIDGPVLIVTDSFYVAESVNKELPYWQSNGFFNNKKKPLKHVSKWKSIADCIQLKPDIIIIHEKGHQPTASTFHTEGNNLADKLATQGSYVVNAGKRTADGSEFEKRTADGSEFESPKKKAKVE

SEQ ID NO: 6629 - protein, 2091 aa, synthetic construct
MPAAKRVKLDGGDKKYSIGLDIGTNSVGWAVITDEYKVPSKKFKVLGNTDRHSIKKNLIGALLFDSGETAEATRLKRTARRRYTRRKNRICYLQEIFSNEMAKVDDSFFHRLEESFLVEEDKKHERHPIFGNIVDEVAYHEKYPTIYHLRKKLVDSTDKADLRLIYLALAHMIKFRGHFLIEGDLNPDNSDVDKLFIQLVQTYNQLFEENPINASGVDAKAILSARLSKSRRLENLIAQLPGEKKNGLFGNLIALSLGLTPNFKSNFDLAEDAKLQLSKDTYDDDLDNLLAQIGDQYADLFLAAKNLSDAILLSDILRVNTEITKAPLSASMIKRYDEHHQDLTLLKALVRQQLPEKYKEIFFDQSKNGYAGYIDGGASQEEFYKFIKPILEKMDGTEELLVKLNREDLLRKQRTFDNGSIPHQIHLGELHAILRRQEDFYPFLKDNREKIEKILTFRIPYYVGPLARGNSRFAWMTRKSEETITPWNFEEVVDKGASAQSFIERMTNFDKNLPNEKVLPKHSLLYEYFTVYNELTKVKYVTEGMRKPAFLSGEQKKAIVDLLFKTNRKVTVKQLKEDYFKKIECFDSVEISGVEDRFNASLGTYHDLLKIIKDKDFLDNEENEDILEDIVLTLTLFEDREMIEERLKTYAHLFDDKVMKQLKRRRYTGWGRLSRKLINGIRDKQSGKTILDFLKSDGFANRNFMQLIHDDSLTFKEDIQKAQVSGQGDSLHEHIANLAGSPAIKKGILQTVKVVDELVKVMGRHKPENIVIEMARENQTTQKGQKNSRERMKRIEEGIKELGSQILKEHPVENTQLQNEKLYLYYLQNGRDMYVDQELDINRLSDYDVDHIVPQSFLKDDSIDNKVLTRSDKARGKSDNVPSEEVVKKMKNYWRQLLNAKLITQRKFDNLTKAERGGLSELDKAGFIKRQLVETRQITKHVAQILDSRMNTKYDENDKLIREVKVITLKSKLVSDFRKDFQFYKVREINNYHHAHDAYLNAVVGTALIKKYPKLESEFVYGDYKVYDVRKMIAKSEQEIGKATAKYFFYSNIMNFFKTEITLANGEIRKRPLIETNGETGEIVWDKGRDFATVRKVLSMPQVNIVKKTEVQTGGFSKESILPKRNSDKLIARKKDWDPKKYGGFDSPTVAYSVLVVAKVEKGKSKKLKSVKELLGITIMERSSFEKNPIDFLEAKGYKEVKKDLIIKLPKYSLFELENGRKRMLASAGELQKGNELALPSKYVNFLYLASHYEKLKGSPEDNEQKQLFVEQHKHYLDEIIEQISEFSKRVILADANLDKVLSAYNKHRDKPIREQAENIIHLFTLTNLGAPAAFKYFDTTIDRKRYTSTKEVLDATLIHQSITGLYETRIDLSQLGGDGGGGSEAAAKGGVLNLEEEYRLHEKPVPSSIDPSWLQLFPTVWAERAGMGLANQVPPVVVELRSGASPVAVRQYPMSKEAREGIRPHIQRFLDLGVLVPCQSPWNTPLLPVKKPGTNDYRPVQDLREINKRVQDIHPTVPNPYNLLSSLPPSHTWYSVLDLKDAFFCLKLHPNSQPLFAFEWRDPEKGNTGQLTWTRLPQGFKNSPTLFNEALHRDLAPFRALNPQVVLLQYVDDLLVAAPTYRDCKEGTQKLLQELSKLGYRVSAKKAQLCQKEVTYLGYLLKEGKRWLTPARKATVMKIPPPTTPRQVREFLGKAGFCRLFIPGFASLAAPLYPLTKPSIPFIWTEEHQKAFDRIKEALLSAPALALPDLTKPFTLYVDERAGVARGVLTQTLGPWRRPVAYLSKKLDPVASGWPTCLKAVAAVALLLKDADKLTLGQNVTVIASHSLESIVRQPPDRWMTNARMTHYQSLLLNERVSFAPPAVLNPATLLPVESEATPVHRCSEILAEETGTRRDLKDQPLPGVPAWYTDGSSFIAEGKRRAGAAIVDGKRTVWASSLPEGTSAQKAELVALTQALRLAEGKDINIYTDSRYAFATAHIHGAIYKQRGWLTSAGKDIKNKEEILALLEAIHLPKRVAIIHCPGHQKGNDPVATGNRRADEAAKQAALSTRVLAETTKPAGKRTADGSEFEKRTADGSEFESPKKKAKVE

SEQ ID NO: 6630 - protein, 2092 aa, synthetic construct
MPAAKRVKLDGGDKKYSIGLDIGTNSVGWAVITDEYKVPSKKFKVLGNTDRHSIKKNLIGALLFDSGETAEATRLKRTARRRYTRRKNRICYLQEIFSNEMAKVDDSFFHRLEESFLVEEDKKHERHPIFGNIVDEVAYHEKYPTIYHLRKKLVDSTDKADLRLIYLALAHMIKFRGHFLIEGDLNPDNSDVDKLFIQLVQTYNQLFEENPINASGVDAKAILSARLSKSRRLENLIAQLPGEKKNGLFGNLIALSLGLTPNFKSNFDLAEDAKLQLSKDTYDDDLDNLLAQIGDQYADLFLAAKNLSDAILLSDILRVNTEITKAPLSASMIKRYDEHHQDLTLLKALVRQQLPEKYKEIFFDQSKNGYAGYIDGGASQEEFYKFIKPILEKMDGTEELLVKLNREDLLRKQRTFDNGSIPHQIHLGELHAILRRQEDFYPFLKDNREKIEKILTFRIPYYVGPLARGNSRFAWMTRKSEETITPWNFEEVVDKGASAQSFIERMTNFDKNLPNEKVLPKHSLLYEYFTVYNELTKVKYVTEGMRKPAFLSGEQKKAIVDLLFKTNRKVTVKQLKEDYFKKIECFDSVEISGVEDRFNASLGTYHDLLKIIKDKDFLDNEENEDILEDIVLTLTLFEDREMIEERLKTYAHLFDDKVMKQLKRRRYTGWGRLSRKLINGIRDKQSGKTILDFLKSDGFANRNFMQLIHDDSLTFKEDIQKAQVSGQGDSLHEHIANLAGSPAIKKGILQTVKVVDELVKVMGRHKPENIVIEMARENQTTQKGQKNSRERMKRIEEGIKELGSQILKEHPVENTQLQNEKLYLYYLQNGRDMYVDQELDINRLSDYDVDHIVPQSFLKDDSIDNKVLTRSDKARGKSDNVPSEEVVKKMKNYWRQLLNAKLITQRKFDNLTKAERGGLSELDKAGFIKRQLVETRQITKHVAQILDSRMNTKYDENDKLIREVKVITLKSKLVSDFRKDFQFYKVREINNYHHAHDAYLNAVVGTALIKKYPKLESEFVYGDYKVYDVRKMIAKSEQEIGKATAKYFFYSNIMNFFKTEITLANGEIRKRPLIETNGETGEIVWDKGRDFATVRKVLSMPQVNIVKKTEVQTGGFSKESILPKRNSDKLIARKKDWDPKKYGGFDSPTVAYSVLVVAKVEKGKSKKLKSVKELLGITIMERSSFEKNPIDFLEAKGYKEVKKDLIIKLPKYSLFELENGRKRMLASAGELQKGNELALPSKYVNFLYLASHYEKLKGSPEDNEQKQLFVEQHKHYLDEIIEQISEFSKRVILADANLDKVLSAYNKHRDKPIREQAENIIHLFTLTNLGAPAAFKYFDTTIDRKRYTSTKEVLDATLIHQSITGLYETRIDLSQLGGDGGEAAAKGGSGGTLQLEEEYRLFEPESTQKQEMDIWLKNFPQAWAETGGMGTAHCQAPVLIQLKATATPISIRQYPMPHEAYQGIKPHIRRMLDQGILKPCQSPWNTPLLPVKKPGTEDYRPVQDLREVNKRVEDIHPTVPNPYNLLSTLPPSHPWYTVLDLKDAFFCLRLHSESQLLFAFEWRDPEIGLSGQLTWTRLPQGFKNSPTLFNEALHSDLADFRVRYPALVLLQYVDDLLLAAATRTECLEGTKALLETLGNKGYRASAKKAQICLQEVTYLGYSLKDGQRWLTKARKEAILSIPVPKNSRQVREFLGKAGYCRLFIPGFAELAAPLYPLTRPGTLFQWGTEQQLAFEDIKKALLSSPALGLPDITKPFELFIDENSGFAKGVLVQKLGPWKRPVAYLSKKLDTVASGWPPCLRMVAAIAILVKDAGKLTLGQPLTILTSHPVEALVRQPPNKWLSNARMTHYQAMLLDAERVHFGPTVSLNPATLLPLPSGGNHHDCLQILAETHGTRPDLTDQPLPDADLTWYTDGSSFIRNGEREAGAAVTTESEVIWAAPLPPGTSAQRAELIALTQALKMAEGKKLTVYTDSRYAFATTHVHGEIYRRRGWLTSEGKEIKNKNEILALLEALFLPKRLSIIHCPGHQKGDSPQAKGNRLADDTAKKAATETHSSLTVLPAGKRTADGSEFEKRTADGSEFESPKKKAKVE

SEQ ID NO: 6631 - protein, 2091 aa, synthetic construct
MPAAKRVKLDGGDKKYSIGLDIGTNSVGWAVITDEYKVPSKKFKVLGNTDRHSIKKNLIGALLFDSGETAEATRLKRTARRRYTRRKNRICYLQEIFSNEMAKVDDSFFHRLEESFLVEEDKKHERHPIFGNIVDEVAYHEKYPTIYHLRKKLVDSTDKADLRLIYLALAHMIKFRGHFLIEGDLNPDNSDVDKLFIQLVQTYNQLFEENPINASGVDAKAILSARLSKSRRLENLIAQLPGEKKNGLFGNLIALSLGLTPNFKSNFDLAEDAKLQLSKDTYDDDLDNLLAQIGDQYADLFLAAKNLSDAILLSDILRVNTEITKAPLSASMIKRYDEHHQDLTLLKALVRQQLPEKYKEIFFDQSKNGYAGYIDGGASQEEFYKFIKPILEKMDGTEELLVKLNREDLLRKQRTFDNGSIPHQIHLGELHAILRRQEDFYPFLKDNREKIEKILTFRIPYYVGPLARGNSRFAWMTRKSEETITPWNFEEVVDKGASAQSFIERMTNFDKNLPNEKVLPKHSLLYEYFTVYNELTKVKYVTEGMRKPAFLSGEQKKAIVDLLFKTNRKVTVKQLKEDYFKKIECFDSVEISGVEDRFNASLGTYHDLLKIIKDKDFLDNEENEDILEDIVLTLTLFEDREMIEERLKTYAHLFDDKVMKQLKRRRYTGWGRLSRKLINGIRDKQSGKTILDFLKSDGFANRNFMQLIHDDSLTFKEDIQKAQVSGQGDSLHEHIANLAGSPAIKKGILQTVKVVDELVKVMGRHKPENIVIEMARENQTTQKGQKNSRERMKRIEEGIKELGSQILKEHPVENTQLQNEKLYLYYLQNGRDMYVDQELDINRLSDYDVDHIVPQSFLKDDSIDNKVLTRSDKARGKSDNVPSEEVVKKMKNYWRQLLNAKLITQRKFDNLTKAERGGLSELDKAGFIKRQLVETRQITKHVAQILDSRMNTKYDENDKLIREVKVITLKSKLVSDFRKDFQFYKVREINNYHHAHDAYLNAVVGTALIKKYPKLESEFVYGDYKVYDVRKMIAKSEQEIGKATAKYFFYSNIMNFFKTEITLANGEIRKRPLIETNGETGEIVWDKGRDFATVRKVLSMPQVNIVKKTEVQTGGFSKESILPKRNSDKLIARKKDWDPKKYGGFDSPTVAYSVLVVAKVEKGKSKKLKSVKELLGITIMERSSFEKNPIDFLEAKGYKEVKKDLIIKLPKYSLFELENGRKRMLASAGELQKGNELALPSKYVNFLYLASHYEKLKGSPEDNEQKQLFVEQHKHYLDEIIEQISEFSKRVILADANLDKVLSAYNKHRDKPIREQAENIIHLFTLTNLGAPAAFKYFDTTIDRKRYTSTKEVLDATLIHQSITGLYETRIDLSQLGGDGGEAAAKGGSGGVLNLEEEYRLHEKPVPSSIDPSWLQLFPTVWAERAGMGLANQVPPVVVELRSGASPVAVRQYPMSKEAREGIRPHIQKFLDLGVLVPCRSPWNTPLLPVKKPGTNDYRPVQDLREINKRVQDIHPTVPNPYNLLSSLPPSYTWYSVLDLKDAFFCLRLHPNSQPLFAFEWKDPEKGNTGQLTWTRLPQGFKNSPTLFNEALHRDLAPFRALNPQVVLLQYVDDLLVAAPTYEDCKKGTQKLLQELSKLGYRVSAKKAQLCQREVTYLGYLLKEGKRWLTPARKATVMKIPVPTTPRQVREFLGKAGFCRLFIPGFASLAAPLYPLTKPSIPFIWTEEHQQAFDHIKKALLSAPALALPDLTKPFTLYIDERAGVARGVLTQTLGPWRRPVAYLSKKLDPVASGWPTCLKAVAAVALLLKDADKLTLGQNVTVIASHSLESIVRQPPDRWMTNARMTHYQSLLLNERVSFAPPAVLNPATLLPVESEATPVHRCSEILAEETGTRRDLEDQPLPGVPTWYTDGSSFITEGKRRAGAPIVDGKRTVWASSLPEGTSAQKAELVALTQALRLAEGKNINIYTDSRYAFATAHIHGAIYKQRGWLTSAGKDIKNKEEILALLEAIHLPRRVAIIHCPGHQRGSNPVATGNRRADEAAKQAALSTRVLAGTTKPAGKRTADGSEFEKRTADGSEFESPKKKAKVE

SEQ ID NO: 6632 - protein, 2093 aa, synthetic construct
MPAAKRVKLDGGDKKYSIGLDIGTNSVGWAVITDEYKVPSKKFKVLGNTDRHSIKKNLIGALLFDSGETAEATRLKRTARRRYTRRKNRICYLQEIFSNEMAKVDDSFFHRLEESFLVEEDKKHERHPIFGNIVDEVAYHEKYPTIYHLRKKLVDSTDKADLRLIYLALAHMIKFRGHFLIEGDLNPDNSDVDKLFIQLVQTYNQLFEENPINASGVDAKAILSARLSKSRRLENLIAQLPGEKKNGLFGNLIALSLGLTPNFKSNFDLAEDAKLQLSKDTYDDDLDNLLAQIGDQYADLFLAAKNLSDAILLSDILRVNTEITKAPLSASMIKRYDEHHQDLTLLKALVRQQLPEKYKEIFFDQSKNGYAGYIDGGASQEEFYKFIKPILEKMDGTEELLVKLNREDLLRKQRTFDNGSIPHQIHLGELHAILRRQEDFYPFLKDNREKIEKILTFRIPYYVGPLARGNSRFAWMTRKSEETITPWNFEEVVDKGASAQSFIERMTNFDKNLPNEKVLPKHSLLYEYFTVYNELTKVKYVTEGMRKPAFLSGEQKKAIVDLLFKTNRKVTVKQLKEDYFKKIECFDSVEISGVEDRFNASLGTYHDLLKIIKDKDFLDNEENEDILEDIVLTLTLFEDREMIEERLKTYAHLFDDKVMKQLKRRRYTGWGRLSRKLINGIRDKQSGKTILDFLKSDGFANRNFMQLIHDDSLTFKEDIQKAQVSGQGDSLHEHIANLAGSPAIKKGILQTVKVVDELVKVMGRHKPENIVIEMARENQTTQKGQKNSRERMKRIEEGIKELGSQILKEHPVENTQLQNEKLYLYYLQNGRDMYVDQELDINRLSDYDVDHIVPQSFLKDDSIDNKVLTRSDKARGKSDNVPSEEVVKKMKNYWRQLLNAKLITQRKFDNLTKAERGGLSELDKAGFIKRQLVETRQITKHVAQILDSRMNTKYDENDKLIREVKVITLKSKLVSDFRKDFQFYKVREINNYHHAHDAYLNAVVGTALIKKYPKLESEFVYGDYKVYDVRKMIAKSEQEIGKATAKYFFYSNIMNFFKTEITLANGEIRKRPLIETNGETGEIVWDKGRDFATVRKVLSMPQVNIVKKTEVQTGGFSKESILPKRNSDKLIARKKDWDPKKYGGFDSPTVAYSVLVVAKVEKGKSKKLKSVKELLGITIMERSSFEKNPIDFLEAKGYKEVKKDLIIKLPKYSLFELENGRKRMLASAGELQKGNELALPSKYVNFLYLASHYEKLKGSPEDNEQKQLFVEQHKHYLDEIIEQISEFSKRVILADANLDKVLSAYNKHRDKPIREQAENIIHLFTLTNLGAPAAFKYFDTTIDRKRYTSTKEVLDATLIHQSITGLYETRIDLSQLGGDGGEAAAKGGSGGTLGIEDEYRLHETSTEPDVSLGSTWLSDFPQAWAETGGMGLAVRQAPLIIPLKATSTPVSIQQYPMSHEARLGIKPHIQRLLDQGILVPCQSPWNTPLLPVKKPGTNDYRPVQDLREVNKRVEDIHPTVPNPYNLLSGLPPSHQWYTVLDLKDAFFCLRLHPTSQPLFAFEWRDPGMGISGQLTWTRLPQGFKNSPTLFNEALHRDLADFRIQHPDLILLQYVDDILLAATSELDCQQGTRALLQTLGDLGYRASAKKAQICQKQVKYLGYLLREGQRWLTEARKETVMGQPVPKTPRQLREFLGTAGFCRLWIPGFAEMAAPLYPLTKPGTLFSWGPDQQKAYQEIKQALLTAPALGLPDLTKPFELFVDEKQGYAKGVLTQKLGPWRRPVAYLSKKLDPVAAGWPPCLRMVAAIAVLTKDAGKLTMGQPLVILAPHAVEALVKQPPDRWLSNARMTHYQAMLLDTDRVQFGPVVALNPATLLPLPEEGAPHDCLEILAETHGTRPDLTDQPIPDADHTWYTDGSSFLQEGQRKAGAAVTTETEVIWAGALPAGTSAQRAELIALTQALKMAEGKRLNVYTDSRYAFATAHIHGEIYRRRGWLTSEGREIKNKSEILALLKALFLPKRLSIIHCLGHQKGDSAEARGNRLADQAAREAAIKTPPDTSTLLAGKRTADGSEFEKRTADGSEFESPKKKAKVE

SEQ ID NO: 6633 - protein, 2093 aa, synthetic construct
MPAAKRVKLDGGDKKYSIGLDIGTNSVGWAVITDEYKVPSKKFKVLGNTDRHSIKKNLIGALLFDSGETAEATRLKRTARRRYTRRKNRICYLQEIFSNEMAKVDDSFFHRLEESFLVEEDKKHERHPIFGNIVDEVAYHEKYPTIYHLRKKLVDSTDKADLRLIYLALAHMIKFRGHFLIEGDLNPDNSDVDKLFIQLVQTYNQLFEENPINASGVDAKAILSARLSKSRRLENLIAQLPGEKKNGLFGNLIALSLGLTPNFKSNFDLAEDAKLQLSKDTYDDDLDNLLAQIGDQYADLFLAAKNLSDAILLSDILRVNTEITKAPLSASMIKRYDEHHQDLTLLKALVRQQLPEKYKEIFFDQSKNGYAGYIDGGASQEEFYKFIKPILEKMDGTEELLVKLNREDLLRKQRTFDNGSIPHQIHLGELHAILRRQEDFYPFLKDNREKIEKILTFRIPYYVGPLARGNSRFAWMTRKSEETITPWNFEEVVDKGASAQSFIERMTNFDKNLPNEKVLPKHSLLYEYFTVYNELTKVKYVTEGMRKPAFLSGEQKKAIVDLLFKTNRKVTVKQLKEDYFKKIECFDSVEISGVEDRFNASLGTYHDLLKIIKDKDFLDNEENEDILEDIVLTLTLFEDREMIEERLKTYAHLFDDKVMKQLKRRRYTGWGRLSRKLINGIRDKQSGKTILDFLKSDGFANRNFMQLIHDDSLTFKEDIQKAQVSGQGDSLHEHIANLAGSPAIKKGILQTVKVVDELVKVMGRHKPENIVIEMARENQTTQKGQKNSRERMKRIEEGIKELGSQILKEHPVENTQLQNEKLYLYYLQNGRDMYVDQELDINRLSDYDVDHIVPQSFLKDDSIDNKVLTRSDKARGKSDNVPSEEVVKKMKNYWRQLLNAKLITQRKFDNLTKAERGGLSELDKAGFIKRQLVETRQITKHVAQILDSRMNTKYDENDKLIREVKVITLKSKLVSDFRKDFQFYKVREINNYHHAHDAYLNAVVGTALIKKYPKLESEFVYGDYKVYDVRKMIAKSEQEIGKATAKYFFYSNIMNFFKTEITLANGEIRKRPLIETNGETGEIVWDKGRDFATVRKVLSMPQVNIVKKTEVQTGGFSKESILPKRNSDKLIARKKDWDPKKYGGFDSPTVAYSVLVVAKVEKGKSKKLKSVKELLGITIMERSSFEKNPIDFLEAKGYKEVKKDLIIKLPKYSLFELENGRKRMLASAGELQKGNELALPSKYVNFLYLASHYEKLKGSPEDNEQKQLFVEQHKHYLDEIIEQISEFSKRVILADANLDKVLSAYNKHRDKPIREQAENIIHLFTLTNLGAPAAFKYFDTTIDRKRYTSTKEVLDATLIHQSITGLYETRIDLSQLGGDGGEAAAKGGSGGTLGIEDEYRLHETSTEPDVSLGSTWLSDFPQAWAETGGMGLAVRQAPLIIPLKATSTPVSIQQYPMSHEARLGIKPHIQRLLDQGILVPCQSPWNTPLLPVKKPGTNDYRPVQDLREVNKRVEDIHPTVPNPYNLLSGLPPSHQWYTVLDLKDAFFCLRLHPTSQPLFAFEWRDPGMGISGQLTWTRLPQGFKNSPTLFDEALHRDLADFRIQHPDLILLQYVDDILLAATSELDCQQGTRALLQTLGDLGYRASAKKAQICQKQVKYLGYLLREGQRWLTEARKETVMGQPVPKTPRQLREFLGTAGFCRLWIPGFAEMAAPLYPLTKTGTLFSWGPDQQKAYQEIKQALLTAPALGLPDLTKPFELFVDEKQGYAKGVLTQKLGPWRRPVAYLSKKLDPVAAGWPPCLRMVAAIAVLTKDAGKLTMGQPLVILAPHAVEALVKQPPDRWLSNARMTHYQAMLLDTDRVQFGPVVALNPATLLPLPEEGAPHDCLEILAETHGTRPDLTDQPIPDADHTWYTDGSSFLQEGQRKAGAAVTTETEVIWAGALPAGTSAQRAELIALTQALKMAEGKRLNVYTDSRYAFATAHIHGEIYRRRGLLTSEGREIKNKSEILALLKALFLPKRLSIIHCLGHQKGDSAEARGNRLADQAAREAAIKTPPDTSTLLAGKRTADGSEFEKRTADGSEFESPKKKAKVE

SEQ ID NO: 6634 - protein, 2093 aa, synthetic construct; identical to SEQ ID NO: 6632

SEQ ID NO: 6635 - protein, 2087 aa, synthetic construct
MPAAKRVKLDGGDKKYSIGLDIGTNSVGWAVITDEYKVPSKKFKVLGNTDRHSIKKNLIGALLFDSGETAEATRLKRTARRRYTRRKNRICYLQEIFSNEMAKVDDSFFHRLEESFLVEEDKKHERHPIFGNIVDEVAYHEKYPTIYHLRKKLVDSTDKADLRLIYLALAHMIKFRGHFLIEGDLNPDNSDVDKLFIQLVQTYNQLFEENPINASGVDAKAILSARLSKSRRLENLIAQLPGEKKNGLFGNLIALSLGLTPNFKSNFDLAEDAKLQLSKDTYDDDLDNLLAQIGDQYADLFLAAKNLSDAILLSDILRVNTEITKAPLSASMIKRYDEHHQDLTLLKALVRQQLPEKYKEIFFDQSKNGYAGYIDGGASQEEFYKFIKPILEKMDGTEELLVKLNREDLLRKQRTFDNGSIPHQIHLGELHAILRRQEDFYPFLKDNREKIEKILTFRIPYYVGPLARGNSRFAWMTRKSEETITPWNFEEVVDKGASAQSFIERMTNFDKNLPNEKVLPKHSLLYEYFTVYNELTKVKYVTEGMRKPAFLSGEQKKAIVDLLFKTNRKVTVKQLKEDYFKKIECFDSVEISGVEDRFNASLGTYHDLLKIIKDKDFLDNEENEDILEDIVLTLTLFEDREMIEERLKTYAHLFDDKVMKQLKRRRYTGWGRLSRKLINGIRDKQSGKTILDFLKSDGFANRNFMQLIHDDSLTFKEDIQKAQVSGQGDSLHEHIANLAGSPAIKKGILQTVKVVDELVKVMGRHKPENIVIEMARENQTTQKGQKNSRERMKRIEEGIKELGSQILKEHPVENTQLQNEKLYLYYLQNGRDMYVDQELDINRLSDYDVDHIVPQSFLKDDSIDNKVLTRSDKARGKSDNVPSEEVVKKMKNYWRQLLNAKLITQRKFDNLTKAERGGLSELDKAGFIKRQLVETRQITKHVAQILDSRMNTKYDENDKLIREVKVITLKSKLVSDFRKDFQFYKVREINNYHHAHDAYLNAVVGTALIKKYPKLESEFVYGDYKVYDVRKMIAKSEQEIGKATAKYFFYSNIMNFFKTEITLANGEIRKRPLIETNGETGEIVWDKGRDFATVRKVLSMPQVNIVKKTEVQTGGFSKESILPKRNSDKLIARKKDWDPKKYGGFDSPTVAYSVLVVAKVEKGKSKKLKSVKELLGITIMERSSFEKNPIDFLEAKGYKEVKKDLIIKLPKYSLFELENGRKRMLASAGELQKGNELALPSKYVNFLYLASHYEKLKGSPEDNEQKQLFVEQHKHYLDEIIEQISEFSKRVILADANLDKVLSAYNKHRDKPIREQAENIIHLFTLTNLGAPAAFKYFDTTIDRKRYTSTKEVLDATLIHQSITGLYETRIDLSQLGGDGGEAAAKGGSGGTLQLDDEYRLYSPLVKPDQNIQFWLEQFPQAWAETAGMGLAKQVPPQVIQLKASATPVSVRQYPLSKEAQEGIRPHVQRLIQQGILVPVQSPWNTPLLPVRKPGTNDYRPVQDLREVNKRVQDIHPTVPNPYNLLCALPPQRSWYTVLDLKDAFFCLRLHPTSQPLFAFEWRDPGTGRTGQLTWTRLPQGFKNSPTIFDEALHRDLANFRIQHPQVTLLQYVDDLLLAGATKQDCLEGTKALLLELSDLGYRASAKKAQICRREVTYLGYSLRDGQRWLTEARKKTVVQIPAPTTAKQVREFLGTAGFCRLWIPGFATLAAPLYPLTKEKGEFSWAPEHQKAFDAIKKALLSAPALALPDVTKPFTLYVDERKGVARGVLTQTLGPWRRPVAYLSKKLDPVASGWPVCLKAIAAVAILVKDADKLTLGQNITVIAPHALENIVRQPPDRWMTNARMTHYQSLLLTERVTFAPPAALNPATLLPEETDEPVTHDCHQLLIEETGVRKDLTDIPLTGEVLTWFTDGSSYVVEGKRMAGAAVVDGTRTIWASSLPEGTSAQKAELMALTQALRLAEGKSINIYTDSRYAFATAHVHGAIYKQRGLLTSAGREIKNKEEILSLLEALHLPKRLAIIHCPGHQKAKDPISRGNQMADRVAKQAAQGVNLLAGKRTADGSEFEKRTADGSEFESPKKKAKVE

SEQ ID NO: 6636 - protein, 2087 aa, synthetic construct; identical to SEQ ID NO: 6635

SEQ ID NO: 6637 - protein, 2084 aa, synthetic construct
MPAAKRVKLDGGDKKYSIGLDIGTNSVGWAVITDEYKVPSKKFKVLGNTDRHSIKKNLIGALLFDSGETAEATRLKRTARRRYTRRKNRICYLQEIFSNEMAKVDDSFFHRLEESFLVEEDKKHERHPIFGNIVDEVAYHEKYPTIYHLRKKLVDSTDKADLRLIYLALAHMIKFRGHFLIEGDLNPDNSDVDKLFIQLVQTYNQLFEENPINASGVDAKAILSARLSKSRRLENLIAQLPGEKKNGLFGNLIALSLGLTPNFKSNFDLAEDAKLQLSKDTYDDDLDNLLAQIGDQYADLFLAAKNLSDAILLSDILRVNTEITKAPLSASMIKRYDEHHQDLTLLKALVRQQLPEKYKEIFFDQSKNGYAGYIDGGASQEEFYKFIKPILEKMDGTEELLVKLNREDLLRKQRTFDNGSIPHQIHLGELHAILRRQEDFYPFLKDNREKIEKILTFRIPYYVGPLARGNSRFAWMTRKSEETITPWNFEEVVDKGASAQSFIERMTNFDKNLPNEKVLPKHSLLYEYFTVYNELTKVKYVTEGMRKPAFLSGEQKKAIVDLLFKTNRKVTVKQLKEDYFKKIECFDSVEISGVEDRFNASLGTYHDLLKIIKDKDFLDNEENEDILEDIVLTLTLFEDREMIEERLKTYAHLFDDKVMKQLKRRRYTGWGRLSRKLINGIRDKQSGKTILDFLKSDGFANRNFMQLIHDDSLTFKEDIQKAQVSGQGDSLHEHIANLAGSPAIKKGILQTVKVVDELVKVMGRHKPENIVIEMARENQTTQKGQKNSRERMKRIEEGIKELGSQILKEHPVENTQLQNEKLYLYYLQNGRDMYVDQELDINRLSDYDVDHIVPQSFLKDDSIDNKVLTRSDKARGKSDNVPSEEVVKKMKNYWRQLLNAKLITQRKFDNLTKAERGGLSELDKAGFIKRQLVETRQITKHVAQILDSRMNTKYDENDKLIREVKVITLKSKLVSDFRKDFQFYKVREINNYHHAHDAYLNAVVGTALIKKYPKLESEFVYGDYKVYDVRKMIAKSEQEIGKATAKYFFYSNIMNFFKTEITLANGEIRKRPLIETNGETGEIVWDKGRDFATVRKVLSMPQVNIVKKTEVQTGGFSKESILPKRNSDKLIARKKDWDPKKYGGFDSPTVAYSVLVVAKVEKGKSKKLKSVKELLGITIMERSSFEKNPIDFLEAKGYKEVKKDLIIKLPKYSLFELENGRKRMLASAGELQKGNELALPSKYVNFLYLASHYEKLKGSPEDNEQKQLFVEQHKHYLDEIIEQISEFSKRVILADANLDKVLSAYNKHRDKPIREQAENIIHLFTLTNLGAPAAFKYFDTTIDRKRYTSTKEVLDATLIHQSITGLYETRIDLSQLGGDGGEAAAKGGSGGIPWLMKKPLQLTTLVPLQEYEERLLKQTMLTGSYKEKLQSLFLKYDALWQHWENQVGHRRIKPHHIATGTVNPRPQKQYPINPKAKASIQTVINDLLKQGVLIQQNSIMNTPVYPVPKPDGKWRMVLDYREVNKTIPLIAAQNQHSAGILSSIFRGKYKTTLDLSNGFWAHSITPESYWLTAFTWLGQQYCWTRLPQGFLNSPALFNADVVDLLKEVPNVQVYVDDIYISHDDPREHLEQLEKVFSLLLNAGYVVSLKKSEIAQHEVEFLGFNITKEGRGLTETFKQKLLNITPPRDLKQLQSILGLLNFARNFIPNFSELVKPLYNIIATAPGKYITWTTDNSQQLQNIISMLNSAENLEERNPEVRLIMKVNTSPSAGYIRFYNEFAKRPIMYLNYVYTKAEVKFTNTEKLLTTIHKGLIKALDLGMGQEILVYSPIVSMTKIQKTPLPERKALPIRWITWMSYLEDPRIQFHYDKTLPELQQVPTVTDDIIAKIKHPSEFSMVFYTDGSAIKHPNVNKSHNAGMGIAQVQFKPEFTVINTWSIPLGDHTAQLAEVAAVEFACKKALKIDGPVLIVTDSFYVAESVNKELPYWQSNGFFNNKKKPLKHVSKWKSIADCIQLKPDIIIIHEKGHQPTASTFHTEGNNLADKLATQGSYVVNAGKRTADGSEFEKRTADGSEFESPKKKAKVE

SEQ ID NO: 6638 - protein, 2084 aa, synthetic construct
MPAAKRVKLDGGDKKYSIGLDIGTNSVGWAVITDEYKVPSKKFKVLGNTDRHSIKKNLIGALLFDSGETAEATRLKRTARRRYTRRKNRICYLQEIFSNEMAKVDDSFFHRLEESFLVEEDKKHERHPIFGNIVDEVAYHEKYPTIYHLRKKLVDSTDKADLRLIYLALAHMIKFRGHFLIEGDLNPDNSDVDKLFIQLVQTYNQLFEENPINASGVDAKAILSARLSKSRRLENLIAQLPGEKKNGLFGNLIALSLGLTPNFKSNFDLAEDAKLQLSKDTYDDDLDNLLAQIGDQYADLFLAAKNLSDAILLSDILRVNTEITKAPLSASMIKRYDEHHQDLTLLKALVRQQLPEKYKEIFFDQSKNGYAGYIDGGASQEEFYKFIKPILEKMDGTEELLVKLNREDLLRKQRTFDNGSIPHQIHLGELHAILRRQEDFYPFLKDNREKIEKILTFRIPYYVGPLARGNSRFAWMTRKSEETITPWNFEEVVDKGASAQSFIERMTNFDKNLPNEKVLPKHSLLYEYFTVYNELTKVKYVTEGMRKPAFLSGEQKKAIVDLLFKTNRKVTVKQLKEDYFKKIECFDSVEISGVEDRFNASLGTYHDLLKIIKDKDFLDNEENEDILEDIVLTLTLFEDREMIEERLKTYAHLFDDKVMKQLKRRRYTGWGRLSRKLINGIRDKQSGKTILDFLKSDGFANRNFMQLIHDDSLTFKEDIQKAQVSGQGDSLHEHIANLAGSPAIKKGILQTVKVVDELVKVMGRHKPENIVIEMARENQTTQKGQKNSRERMKRIEEGIKELGSQILKEHPVENTQLQNEKLYLYYLQNGRDMYVDQELDINRLSDYDVDHIVPQSFLKDDSIDNKVLTRSDKARGKSDNVPSEEVVKKMKNYWRQLLNAKLITQRKFDNLTKAERGGLSELDKAGFIKRQLVETRQITKHVAQILDSRMNTKYDENDKLIREVKVITLKSKLVSDFRKDFQFYKVREINNYHHAHDAYLNAVVGTALIKKYPKLESEFVYGDYKVYDVRKMIAKSEQEIGKATAKYFFYSNIMNFFKTEITLANGEIRKRPLIETNGETGEIVWDKGRDFATVRKVLSMPQVNIVKKTEVQTGGFSKESILPKRNSDKLIARKKDWDPKKYGGFDSPTVAYSVLVVAKVEKGKSKKLKSVKELLGITIMERSSFEKNPIDFLEAKGYKEVKKDLIIKLPKYSLFELENGRKRMLASAGELQKGNELALPSKYVNFLYLASHYEKLKGSPEDNEQKQLFVEQHKHYLDEIIEQISEFSKRVILADANLDKVLSAYNKHRDKPIREQAENIIHLFTLTNLGAPAAFKYFDTTIDRKRYTSTKEVLDATLIHQSITGLYETRIDLSQLGGDGGEAAAKGGSGGIPWLMKKPLQLTTLVPLQEYEERLLKQTMLTGSYKEKLQSLFLKYDALWQHWENQVGHRRIKPHHIATGTVNPRPQKQYPINPKAKASIQTVINDLLKQGVLIQQNSIMNTPVYPVPKPDGKWRMVLDYREVNKTIPLIAAQNQHSAGILSSIFRGKYKTTLDLSNGFWAHSITPESYWLTAFTWLGQQYCWTRLPQGFLNSPALFNADVVDLLKEVPNVQVYVDDIYISHDDPREHLEQLEKVFSLLLNAGYVVSLKKSEIAQHEVEFLGFNITKEGRGLTETFKQKLLNITPPRDLKQLQSILGKLNFARNFIPNFSELVKPLYNIIATAPGKYITWTTDNSQQLQNIISMLNSAENLEERNPEVRLIMKVNTSPSAGYIRFYNEFAKRPIMYLNYVYTKAEVKFTNTEKLLTTIHKGLIKALDLGMGQEILVYSPIVSMTKIQKTPLPERKALPIRWITWMSYLEDPRIQFHYDKTLPELQQVPTVTDDIIAKIKHPSEFSMVFYTDGSAIKHPNVNKSHNAGMGIAQVQFKPEFTVINTWSIPLGDHTAQLAEVAAVEFACKKALKIDGPVLIVTDSFYVAESVNKELPYWQSNGFFNNKKKPLKHVSKWKSIADCIQLKPDIIIIHEKGHQPTASTFHTEGNNLADKLATQGSYVVNAGKRTADGSEFEKRTADGSEFESPKKKAKVE

SEQ ID NO: 6639 - protein, 2093 aa, synthetic construct
MPAAKRVKLDGGDKKYSIGLDIGTNSVGWAVITDEYKVPSKKFKVLGNTDRHSIKKNLIGALLFDSGETAEATRLKRTARRRYTRRKNRICYLQEIFSNEMAKVDDSFFHRLEESFLVEEDKKHERHPIFGNIVDEVAYHEKYPTIYHLRKKLVDSTDKADLRLIYLALAHMIKFRGHFLIEGDLNPDNSDVDKLFIQLVQTYNQLFEENPINASGVDAKAILSARLSKSRRLENLIAQLPGEKKNGLFGNLIALSLGLTPNFKSNFDLAEDAKLQLSKDTYDDDLDNLLAQIGDQYADLFLAAKNLSDAILLSDILRVNTEITKAPLSASMIKRYDEHHQDLTLLKALVRQQLPEKYKEIFFDQSKNGYAGYIDGGASQEEFYKFIKPILEKMDGTEELLVKLNREDLLRKQRTFDNGSIPHQIHLGELHAILRRQEDFYPFLKDNREKIEKILTFRIPYYVGPLARGNSRFAWMTRKSEETITPWNFEEVVDKGASAQSFIERMTNFDKNLPNEKVLPKHSLLYEYFTVYNELTKVKYVTEGMRKPAFLSGEQKKAIVDLLFKTNRKVTVKQLKEDYFKKIECFDSVEISGVEDRFNASLGTYHDLLKIIKDKDFLDNEENEDILEDIVLTLTLFEDREMIEERLKTYAHLFDDKVMKQLKRRRYTGWGRLSRKLINGIRDKQSGKTILDFLKSDGFANRNFMQLIHDDSLTFKEDIQKAQVSGQGDSLHEHIANLAGSPAIKKGILQTVKVVDELVKVMGRHKPENIVIEMARENQTTQKGQKNSRERMKRIEEGIKELGSQILKEHPVENTQLQNEKLYLYYLQNGRDMYVDQELDINRLSDYDVDHIVPQSFLKDDSIDNKVLTRSDKARGKSDNVPSEEVVKKMKNYWRQLLNAKLITQRKFDNLTKAERGGLSELDKAGFIKRQLVETRQITKHVAQILDSRMNTKYDENDKLIREVKVITLKSKLVSDFRKDFQFYKVREINNYHHAHDAYLNAVVGTALIKKYPKLESEFVYGDYKVYDVRKMIAKSEQEIGKATAKYFFYSNIMNFFKTEITLANGEIRKRPLIETNGETGEIVWDKGRDFATVRKVLSMPQVNIVKKTEVQTGGFSKESILPKRNSDKLIARKKDWDPKKYGGFDSPTVAYSVLVVAKVEKGKSKKLKSVKELLGITIMERSSFEKNPIDFLEAKGYKEVKKDLIIKLPKYSLFELENGRKRMLASAGELQKGNELALPSKYVNFLYLASHYEKLKGSPEDNEQKQLFVEQHKHYLDEIIEQISEFSKRVILADANLDKVLSAYNKHRDKPIREQAENIIHLFTLTNLGAPAAFKYFDTTIDRKRYTSTKEVLDATLIHQSITGLYETRIDLSQLGGDGGEAAAKGGSGGTLNIEDEYRLHETSKEPDVPLGSTWLSDFPQAWAETGGMGLAVRQAPLIIPLKATSTPVSIKQYPMSQEARLGIKPHIQRLLDQGILVPCQSPWNTPLLPVKKPGTNDYRPVQDLREVNKRVEDIHPTVPNPYNLLSGLPPSHQWYTVLDLKDAFFCLRLHPTSQPLFAFEWRDPEMGISGQLTWTRLPQGFKNSPTLFNEALHRDLADFRIQHPDLILLQYVDDLLLAATSEQDCQRGTRALLQTLGNLGYRASAKKAQICQKQVKYLGYLLKEGQRWLTEARKETVMGQPTPKTPRQLREFLGTAGFCRLWIPGFAEMAAPLYPLTKPGTLFNWGPDQQKAYQEIKQALLTAPALGLPDLTKPFELFVDEKQGYAKGVLTQKLGPWRRPVAYLSKKLDPVAAGWPPCLRMVAAIAVLTKDAGKLTMGQPLVILAPHAVEALVKQPPDRWLSNARMTHYQAMLLDTDRVQFGPVVALNPATLLPLPEKEAPHDCLEILAETHGTRPDLTDQPIPDADYTWYTDGSSFLQEGQRRAGAAVTTETEVIWARALPAGTSAQRAELIALTQALKMAEGKKLNVYTDSRYAFATAHVHGEIYRRRGWLTSEGREIKNKNEILALLKALFLPKRLSIIHCPGHQKGNSAEARGNRMADQAAREAAMKAVLETSTLLAGKRTADGSEFEKRTADGSEFESPKKKAKVE

SEQ ID NO: 6640 - protein, 2097 aa, synthetic construct
MPAAKRVKLDGGDKKYSIGLDIGTNSVGWAVITDEYKVPSKKFKVLGNTDRHSIKKNLIGALLFDSGETAEATRLKRTARRRYTRRKNRICYLQEIFSNEMAKVDDSFFHRLEESFLVEEDKKHERHPIFGNIVDEVAYHEKYPTIYHLRKKLVDSTDKADLRLIYLALAHMIKFRGHFLIEGDLNPDNSDVDKLFIQLVQTYNQLFEENPINASGVDAKAILSARLSKSRRLENLIAQLPGEKKNGLFGNLIALSLGLTPNFKSNFDLAEDAKLQLSKDTYDDDLDNLLAQIGDQYADLFLAAKNLSDAILLSDILRVNTEITKAPLSASMIKRYDEHHQDLTLLKALVRQQLPEKYKEIFFDQSKNGYAGYIDGGASQEEFYKFIKPILEKMDGTEELLVKLNREDLLRKQRTFDNGSIPHQIHLGELHAILRRQEDFYPFLKDNREKIEKILTFRIPYYVGPLARGNSRFAWMTRKSEETITPWNFEEVVDKGASAQSFIERMTNFDKNLPNEKVLPKHSLLYEYFTVYNELTKVKYVTEGMRKPAFLSGEQKKAIVDLLFKTNRKVTVKQLKEDYFKKIECFDSVEISGVEDRFNASLGTYHDLLKIIKDKDFLDNEENEDILEDIVLTLTLFEDREMIEERLKTYAHLFDDKVMKQLKRRRYTGWGRLSRKLINGIRDKQSGKTILDFLKSDGFANRNFMQLIHDDSLTFKEDIQKAQVSGQGDSLHEHIANLAGSPAIKKGILQTVKVVDELVKVMGRHKPENIVIEMARENQTTQKGQKNSRERMKRIEEGIKELGSQILKEHPVENTQLQNEKLYLYYLQNGRDMYVDQELDINRLSDYDVDHIVPQSFLKDDSIDNKVLTRSDKARGKSDNVPSEEVVKKMKNYWRQLLNAKLITQRKFDNLTKAERGGLSELDKAGFIKRQLVETRQITKHVAQILDSRMNTKYDENDKLIREVKVITLKSKLVSDFRKDFQFYKVREINNYHHAHDAYLNAVVGTALIKKYPKLESEFVYGDYKVYDVRKMIAKSEQEIGKATAKYFFYSNIMNFFKTEITLANGEIRKRPLIETNGETGEIVWDKGRDFATVRKVLSMPQVNIVKKTEVQTGGFSKESILPKRNSDKLIARKKDWDPKKYGGFDSPTVAYSVLVVAKVEKGKSKKLKSVKELLGITIMERSSFEKNPIDFLEAKGYKEVKKDLIIKLPKYSLFELENGRKRMLASAGELQKGNELALPSKYVNFLYLASHYEKLKGSPEDNEQKQLFVEQHKHYLDEIIEQISEFSKRVILADANLDKVLSAYNKHRDKPIREQAENIIHLFTLTNLGAPAAFKYFDTTIDRKRYTSTKEVLDATLIHQSITGLYETRIDLSQLGGDGGGGSPAPGGTVSLQDEHRLFDIPVTTSLPDVWLQDFPQAWAETGGLGRAKCQAPIIIDLKPTAVPVSIKQYPMSLEAHMGIRQHIIKFLELGVLRPCRSPWNTPLLPVKKPGTQDYRPVQDLREINKRTVDIHPTVPNPYNLLSTLKPDYSWYTVLDLKDAFFCLPLAPQSQELFAFEWKDPERGISGQLTWTRLPQGFKNSPTLFNEALHRDLTDFRTQHPEVTLLQYVDDLLLAAPTKKACTQGTRHLLQELGEKGYRASAKKAQICQTKVTYLGYILSEGKRWLTPGRIETVARIPPPRNPREVREFLGTAGFCRLWIPGFAELAAPLYALTKPSTPFTWQTEHQLAFEALKKALLSAPALGLPDTSKPFTLFLDERQGIAKGVLTQKLGPWKRPVAYLSKKLDPVAAGWPPCLRIMAATAMLVKDSAKLTLGQPLTVITPHTLEAIVRQPPDRWITNARLTHYQALLLDTDRVQFGPPVTLNPATLLPVPENQPSPHDCRQVLAETHGTREDLKDQELPDADHTWYTDGSSYLDSGTRRAGAAVVDGHNTIWAQSLPPGTSAQKAELIALTKALELSKGKKANIYTDSRYAFATAHTHGSIYERRGWLTSEGKEIKNKAEIIALLKALFLPQEVAIIHCPGHQKGQDPVAVGNRQADRVARQAAMAEVLTLATEPDNTSHITAGKRTADGSEFEKRTADGSEFESPKKKAKVE

SEQ ID NO: 6641 - protein, 2168 aa, synthetic construct
MPAAKRVKLDGGDKKYSIGLDIGTNSVGWAVITDEYKVPSKKFKVLGNTDRHSIKKNLIGALLFDSGETAEATRLKRTARRRYTRRKNRICYLQEIFSNEMAKVDDSFFHRLEESFLVEEDKKHERHPIFGNIVDEVAYHEKYPTIYHLRKKLVDSTDKADLRLIYLALAHMIKFRGHFLIEGDLNPDNSDVDKLFIQLVQTYNQLFEENPINASGVDAKAILSARLSKSRRLENLIAQLPGEKKNGLFGNLIALSLGLTPNFKSNFDLAEDAKLQLSKDTYDDDLDNLLAQIGDQYADLFLAAKNLSDAILLSDILRVNTEITKAPLSASMIKRYDEHHQDLTLLKALVRQQLPEKYKEIFFDQSKNGYAGYIDGGASQEEFYKFIKPILEKMDGTEELLVKLNREDLLRKQRTFDNGSIPHQIHLGELHAILRRQEDFYPFLKDNREKIEKILTFRIPYYVGPLARGNSRFAWMTRKSEETITPWNFEEVVDKGASAQSFIERMTNFDKNLPNEKVLPKHSLLYEYFTVYNELTKVKYVTEGMRKPAFLSGEQKKAIVDLLFKTNRKVTVKQLKEDYFKKIECFDSVEISGVEDRFNASLGTYHDLLKIIKDKDFLDNEENEDILEDIVLTLTLFEDREMIEERLKTYAHLFDDKVMKQLKRRRYTGWGRLSRKLINGIRDKQSGKTILDFLKSDGFANRNFMQLIHDDSLTFKEDIQKAQVSGQGDSLHEHIANLAGSPAIKKGILQTVKVVDELVKVMGRHKPENIVIEMARENQTTQKGQKNSRERMKRIEEGIKELGSQILKEHPVENTQLQNEKLYLYYLQNGRDMYVDQELDINRLSDYDVDHIVPQSFLKDDSIDNKVLTRSDKARGKSDNVPSEEVVKKMKNYWRQLLNAKLITQRKFDNLTKAERGGLSELDKAGFIKRQLVETRQITKHVAQILDSRMNTKYDENDKLIREVKVITLKSKLVSDFRKDFQFYKVREINNYHHAHDAYLNAVVGTALIKKYPKLESEFVYGDYKVYDVRKMIAKSEQEIGKATAKYFFYSNIMNFFKTEITLANGEIRKRPLIETNGETGEIVWDKGRDFATVRKVLSMPQVNIVKKTEVQTGGFSKESILPKRNSDKLIARKKDWDPKKYGGFDSPTVAYSVLVVAKVEKGKSKKLKSVKELLGITIMERSSFEKNPIDFLEAKGYKEVKKDLIIKLPKYSLFELENGRKRMLASAGELQKGNELALPSKYVNFLYLASHYEKLKGSPEDNEQKQLFVEQHKHYLDEIIEQISEFSKRVILADANLDKVLSAYNKHRDKPIREQAENIIHLFTLTNLGAPAAFKYFDTTIDRKRYTSTKEVLDATLIHQSITGLYETRIDLSQLGGDGGGGSPAPGGMDLLKPLTVERKGVKIKGYWNSQADITCVPKDLLQGEEPVRQQNVTTIHGTQEGDVYYVNLKIDGRRINTEVIGTTLDYAIITPGDVPWILKKPLELTIKLDLEEQQGTLLNNSILSKKGKEELKQLFEKYSALWQSWENQVGHRRIRPHKIATGTVKPTPQKQYHINPKAKPDIQIVINDLLKQGVLIQKESTMNTPVYPVPKPNGRWRMVLDYRAVNKVTPLIAVQNQHSYGILGSLFKGRYKTTIDLSNGFWAHPIVPEDYWITAFTWQGKQYCWTVLPQGFLNSPGLFNGDVVDLLQGIPNVEVYVDDVYISHDSEKEHLEYLDILFNRLKEAGYIISLKKSNIANSIVDFLGFQITNEGRGLTDTFKEKLENITAPTTLKQLQSILGLLNFARNFIPDFTELIAPLYALIPKSPKNYVPWQIEHSTTLETLITKLNGAEYLQGRKGDKTLIMKVNASYTTGYIRYYNEGEKKPISYVSIVFSKTELKFTELEKLLTTVHKGLLKALDLSMGQNIHVYSPIVSMQNIQKTPQTAKKALASRWLSWLSYLEDPRIRFFYDPQMPALKDLPAVDTGKDNKKHPSNFQHIFYTDGSAITSPTKEGHLNAGMGIVYFINKDGNLQKQQEWSISLGNHTAQFAEIAAFEFALKKCLPLGGNILVVTDSNYVAKAYNEELDVWASNGFVNNRKKPLKHISKWKSVADLKRLRPDVVVTHEPGHQKLDSSPHAYGNNLADQLATQASFKVHAGKRTADGSEFEKRTADGSEFESPKKKAKVE

SEQ ID NO: 6642 - protein, 2090 aa, synthetic construct
MPAAKRVKLDGGDKKYSIGLDIGTNSVGWAVITDEYKVPSKKFKVLGNTDRHSIKKNLIGALLFDSGETAEATRLKRTARRRYTRRKNRICYLQEIFSNEMAKVDDSFFHRLEESFLVEEDKKHERHPIFGNIVDEVAYHEKYPTIYHLRKKLVDSTDKADLRLIYLALAHMIKFRGHFLIEGDLNPDNSDVDKLFIQLVQTYNQLFEENPINASGVDAKAILSARLSKSRRLENLIAQLPGEKKNGLFGNLIALSLGLTPNFKSNFDLAEDAKLQLSKDTYDDDLDNLLAQIGDQYADLFLAAKNLSDAILLSDILRVNTEITKAPLSASMIKRYDEHHQDLTLLKALVRQQLPEKYKEIFFDQSKNGYAGYIDGGASQEEFYKFIKPILEKMDGTEELLVKLNREDLLRKQRTFDNGSIPHQIHLGELHAILRRQEDFYPFLKDNREKIEKILTFRIPYYVGPLARGNSRFAWMTRKSEETITPWNFEEVVDKGASAQSFIERMTNFDKNLPNEKVLPKHSLLYEYFTVYNELTKVKYVTEGMRKPAFLSGEQKKAIVDLLFKTNRKVTVKQLKEDYFKKIECFDSVEISGVEDRFNASLGTYHDLLKIIKDKDFLDNEENEDILEDIVLTLTLFEDREMIEERLKTYAHLFDDKVMKQLKRRRYTGWGRLSRKLINGIRDKQSGKTILDFLKSDGFANRNFMQLIHDDSLTFKEDIQKAQVSGQGDSLHEHIANLAGSPAIKKGILQTVKVVDELVKVMGRHKPENIVIEMARENQTTQKGQKNSRERMKRIEEGIKELGSQILKEHPVENTQLQNEKLYLYYLQNGRDMYVDQELDINRLSDYDVDHIVPQSFLKDDSIDNKVLTRSDKARGKSDNVPSEEVVKKMKNYWRQLLNAKLITQRKFDNLTKAERGGLSELDKAGFIKRQLVETRQITKHVAQILDSRMNTKYDENDKLIREVKVITLKSKLVSDFRKDFQFYKVREINNYHHAHDAYLNAVVGTALIKKYPKLESEFVYGDYKVYDVRKMIAKSEQEIGKATAKYFFYSNIMNFFKTEITLANGEIRKRPLIETNGETGEIVWDKGRDFATVRKVLSMPQVNIVKKTEVQTGGFSKESILPKRNSDKLIARKKDWDPKKYGGFDSPTVAYSVLVVAKVEKGKSKKLKSVKELLGITIMERSSFEKNPIDFLEAKGYKEVKKDLIIKLPKYSLFELENGRKRMLASAGELQKGNELALPSKYVNFLYLASHYEKLKGSPEDNEQKQLFVEQHKHYLDEIIEQISEFSKRVILADANLDKVLSAYNKHRDKPIREQAENIIHLFTLTNLGAPAAFKYFDTTIDRKRYTSTKEVLDATLIHQSITGLYETRIDLSQLGGDGGGGSPAPGGTLQLEEEYRLFEPESTQKQEMDIWLKNFPQAWAETGGMGTAHCQAPVLIQLKATATPISIRQYPMPHEAYQGIKPHIRRMLDQGILKPCQSPWNTPLLPVKKPGTEDYRPVQDLREVNKRVEDIHPTVPNPYNLLSTLPPSHPWYTVLDLKDAFFCLRLHSESQLLFAFEWRDPEIGLSGQLTWTRLPQGFKNSPTLFNEALHSDLADFRVRYPALVLLQYVDDLLLAAATRTECLEGTKALLETLGNKGYRASAKKAQICLQEVTYLGYSLKDGQRWLTKARKEAILSIPVPKNSRQVREFLGKAGYCRLFIPGFAELAAPLYPLTRPGTLFQWGTEQQLAFEDIKKALLSSPALGLPDITKPFELFIDENSGFAKGVLVQKLGPWKRPVAYLSKKLDTVASGWPPCLRMVAAIAILVKDAGKLTLGQPLTILTSHPVEALVRQPPNKWLSNARMTHYQAMLLDAERVHFGPTVSLNPATLLPLPSGGNHHDCLQILAETHGTRPDLTDQPLPDADLTWYTDGSSFIRNGEREAGAAVTTESEVIWAAPLPPGTSAQRAELIALTQALKMAEGKKLTVYTDSRYAFATTHVHGEIYRRRGWLTSEGKEIKNKNEILALLEALFLPKRLSIIHCPGHQKGDSPQAKGNRLADDTAKKAATETHSSLTVLPAGKRTADGSEFEKRTADGSEFESPKKKAKVE

SEQ ID NO: 6643 - protein, 2171 aa, synthetic construct
MPAAKRVKLDGGDKKYSIGLDIGTNSVGWAVITDEYKVPSKKFKVLGNTDRHSIKKNLIGALLFDSGETAEATRLKRTARRRYTRRKNRICYLQEIFSNEMAKVDDSFFHRLEESFLVEEDKKHERHPIFGNIVDEVAYHEKYPTIYHLRKKLVDSTDKADLRLIYLALAHMIKFRGHFLIEGDLNPDNSDVDKLFIQLVQTYNQLFEENPINASGVDAKAILSARLSKSRRLENLIAQLPGEKKNGLFGNLIALSLGLTPNFKSNFDLAEDAKLQLSKDTYDDDLDNLLAQIGDQYADLFLAAKNLSDAILLSDILRVNTEITKAPLSASMIKRYDEHHQDLTLLKALVRQQLPEKYKEIFFDQSKNGYAGYIDGGASQEEFYKFIKPILEKMDGTEELLVKLNREDLLRKQRTFDNGSIPHQIHLGELHAILRRQEDFYPFLKDNREKIEKILTFRIPYYVGPLARGNSRFAWMTRKSEETITPWNFEEVVDKGASAQSFIERMTNFDKNLPNEKVLPKHSLLYEYFTVYNELTKVKYVTEGMRKPAFLSGEQKKAIVDLLFKTNRKVTVKQLKEDYFKKIECFDSVEISGVEDRFNASLGTYHDLLKIIKDKDFLDNEENEDILEDIVLTLTLFEDREMIEERLKTYAHLFDDKVMKQLKRRRYTGWGRLSRKLINGIRDKQSGKTILDFLKSDGFANRNFMQLIHDDSLTFKEDIQKAQVSGQGDSLHEHIANLAGSPAIKKGILQTVKVVDELVKVMGRHKPENIVIEMARENQTTQKGQKNSRERMKRIEEGIKELGSQILKEHPVENTQLQNEKLYLYYLQNGRDMYVDQELDINRLSDYDVDHIVPQSFLKDDSIDNKVLTRSDKARGKSDNVPSEEVVKKMKNYWRQLLNAKLITQRKFDNLTKAERGGLSELDKAGFIKRQLVETRQITKHVAQILDSRMNTKYDENDKLIREVKVITLKSKLVSDFRKDFQFYKVREINNYHHAHDAYLNAVVGTALIKKYPKLESEFVYGDYKVYDVRKMIAKSEQEIGKATAKYFFYSNIMNFFKTEITLANGEIRKRPLIETNGETGEIVWDKGRDFATVRKVLSMPQVNIVKKTEVQTGGFSKESILPKRNSDKLIARKKDWDPKKYGGFDSPTVAYSVLVVAKVEKGKSKKLKSVKELLGITIMERSSFEKNPIDFLEAKGYKEVKKDLIIKLPKYSLFELENGRKRMLASAGELQKGNELALPSKYVNFLYLASHYEKLKGSPEDNEQKQLFVEQHKHYLDEIIEQISEFSKRVILADANLDKVLSAYNKHRDKPIREQAENIIHLFTLTNLGAPAAFKYFDTTIDRKRYTSTKEVLDATLIHQSITGLYETRIDLSQLGGDGGGGSPAPGGMNPLQLLQPLPAEIKGTKLLAHWNSGATITCIPESFLEDEQPIKKTLIKTIHGEKQQNVYYVTFKVKGRKVEAEVIASPYEYILLSPTDVPWLTQQPLQLTILVPLQEYQEKILSKTALPEDQKQQLKTLFVKYDNLWQHWENQVGHRKIRPHNIATGDYPPRPQKQYPINPKAKPSIQIVIDDLLKQGVLTPQNSTMNTPVYPVPKPDGRWRMVLDYREVNKTIPLTAAQNQHSAGILATIVRQKYKTTLDLANGFWAHPITPESYWLTAFTWQGKQYCWTRLPQGFLNSPALFNADVVDLLKEIPNVQVYVDDIYLSHDDPKEHVQQLEKVFQILLQAGYVVSLKKSEIGQKTVEFLGFNITKEGRGLTDTFKTKLLNITPPKDLKQLQSILGKLNFARNFIPNFAELVQPLYNLIAPAKGKYIEWSEENTKQLNMVIEALNTASNLEERLPEQRLVIKVNTSPSAGYVRYYNETGKKPIMYLNYVFSKAELKFSMLEKLLTTMHKALIKAMDLAMGQEILVYSPIVSMTKIQKTPLPERKALPIRWITWMTYLEDPRIQFHYDKTLPELKHIPDVYTSSQSPVKHPSQYEGVFYTDGSAIKSPDPTKSNNAGMGIVHATYKPEYQVLNQWSIPLGNHTAQMAEIAAVEFACKKALKIPGPVLVITDSFYVAESANKELPYWKSNGFVNNKKKPLKHISKWKSIAECLSMKPDITIQHEKGISLQIPVFILKGNALADKLATQGSYVVNAGKRTADGSEFEKRTADGSEFESPKKKAKVE

SEQ ID NO: 6644 - protein, 2089 aa, synthetic construct
MPAAKRVKLDGGDKKYSIGLDIGTNSVGWAVITDEYKVPSKKFKVLGNTDRHSIKKNLIGALLFDSGETAEATRLKRTARRRYTRRKNRICYLQEIFSNEMAKVDDSFFHRLEESFLVEEDKKHERHPIFGNIVDEVAYHEKYPTIYHLRKKLVDSTDKADLRLIYLALAHMIKFRGHFLIEGDLNPDNSDVDKLFIQLVQTYNQLFEENPINASGVDAKAILSARLSKSRRLENLIAQLPGEKKNGLFGNLIALSLGLTPNFKSNFDLAEDAKLQLSKDTYDDDLDNLLAQIGDQYADLFLAAKNLSDAILLSDILRVNTEITKAPLSASMIKRYDEHHQDLTLLKALVRQQLPEKYKEIFFDQSKNGYAGYIDGGASQEEFYKFIKPILEKMDGTEELLVKLNREDLLRKQRTFDNGSIPHQIHLGELHAILRRQEDFYPFLKDNREKIEKILTFRIPYYVGPLARGNSRFAWMTRKSEETITPWNFEEVVDKGASAQSFIERMTNFDKNLPNEKVLPKHSLLYEYFTVYNELTKVKYVTEGMRKPAFLSGEQKKAIVDLLFKTNRKVTVKQLKEDYFKKIECFDSVEISGVEDRFNASLGTYHDLLKIIKDKDFLDNEENEDILEDIVLTLTLFEDREMIEERLKTYAHLFDDKVMKQLKRRRYTGWGRLSRKLINGIRDKQSGKTILDFLKSDGFANRNFMQLIHDDSLTFKEDIQKAQVSGQGDSLHEHIANLAGSPAIKKGILQTVKVVDELVKVMGRHKPENIVIEMARENQTTQKGQKNSRERMKRIEEGIKELGSQILKEHPVENTQLQNEKLYLYYLQNGRDMYVDQELDINRLSDYDVDHIVPQSFLKDDSIDNKVLTRSDKARGKSDNVPSEEVVKKMKNYWRQLLNAKLITQRKFDNLTKAERGGLSELDKAGFIKRQLVETRQITKHVAQILDSRMNTKYDENDKLIREVKVITLKSKLVSDFRKDFQFYKVREINNYHHAHDAYLNAVVGTALIKKYPKLESEFVYGDYKVYDVRKMIAKSEQEIGKATAKYFFYSNIMNFFKTEITLANGEIRKRPLIETNGETGEIVWDKGRDFATVRKVLSMPQVNIVKKTEVQTGGFSKESILPKRNSDKLIARKKDWDPKKYGGFDSPTVAYSVLVVAKVEKGKSKKLKSVKELLGITIMERSSFEKNPIDFLEAKGYKEVKKDLIIKLPKYSLFELENGRKRMLASAGELQKGNELALPSKYVNFLYLASHYEKLKGSPEDNEQKQLFVEQHKHYLDEIIEQISEFSKRVILADANLDKVLSAYNKHRDKPIREQAENIIHLFTLTNLGAPAAFKYFDTTIDRKRYTSTKEVLDATLIHQSITGLYETRIDLSQLGGDGGGGSPAPGGVLNLEEEYRLHEKPVPSSIDPSWLQLFPTVWAERAGMGLANQVPPVVVELRSGASPVAVRQYPMSKEAREGIRPHIQKFLDLGVLVPCRSPWNTPLLPVKKPGTNDYRPVQDLREINKRVQDIHPTVPNPYNLLSSLPPSYTWYSVLDLKDAFFCLRLHPNSQPLFAFEWKDPEKGNTGQLTWTRLPQGFKNSPTLFNEALHRDLAPFRALNPQVVLLQYVDDLLVAAPTYEDCKKGTQKLLQELSKLGYRVSAKKAQLCQREVTYLGYLLKEGKRWLTPARKATVMKIPVPTTPRQVREFLGTAGFCRLWIPGFASLAAPLYPLTKPSIPFIWTEEHQQAFDHIKKALLSAPALALPDLTKPFTLYIDERAGVARGVLTQTLGPWRRPVAYLSKKLDPVASGWPTCLKAVAAVALLLKDADKLTLGQNVTVIASHSLESIVRQPPDRWMTNARMTHYQSLLLNERVSFAPPAVLNPATLLPVESEATPVHRCSEILAEETGTRRDLEDQPLPGVPTWYTDGSSFITEGKRRAGAPIVDGKRTVWASSLPEGTSAQKAELVALTQALRLAEGKNINIYTDSRYAFATAHIHGAIYKQRGWLTSAGKDIKNKEEILALLEAIHLPRRVAIIHCPGHQRGSNPVATGNRRADEAAKQAALSTRVLAGTTKPAGKRTADGSEFEKRTADGSEFESPKKKAKVE

SEQ ID NO: 6645 - protein, 2213 aa, synthetic construct
MPAAKRVKLDGGDKKYSIGLDIGTNSVGWAVITDEYKVPSKKFKVLGNTDRHSIKKNLIGALLFDSGETAEATRLKRTARRRYTRRKNRICYLQEIFSNEMAKVDDSFFHRLEESFLVEEDKKHERHPIFGNIVDEVAYHEKYPTIYHLRKKLVDSTDKADLRLIYLALAHMIKFRGHFLIEGDLNPDNSDVDKLFIQLVQTYNQLFEENPINASGVDAKAILSARLSKSRRLENLIAQLPGEKKNGLFGNLIALSLGLTPNFKSNFDLAEDAKLQLSKDTYDDDLDNLLAQIGDQYADLFLAAKNLSDAILLSDILRVNTEITKAPLSASMIKRYDEHHQDLTLLKALVRQQLPEKYKEIFFDQSKNGYAGYIDGGASQEEFYKFIKPILEKMDGTEELLVKLNREDLLRKQRTFDNGSIPHQIHLGELHAILRRQEDFYPFLKDNREKIEKILTFRIPYYVGPLARGNSRFAWMTRKSEETITPWNFEEVVDKGASAQSFIERMTNFDKNLPNEKVLPKHSLLYEYFTVYNELTKVKYVTEGMRKPAFLSGEQKKAIVDLLFKTNRKVTVKQLKEDYFKKIECFDSVEISGVEDRFNASLGTYHDLLKIIKDKDFLDNEENEDILEDIVLTLTLFEDREMIEERLKTYAHLFDDKVMKQLKRRRYTGWGRLSRKLINGIRDKQSGKTILDFLKSDGFANRNFMQLIHDDSLTFKEDIQKAQVSGQGDSLHEHIANLAGSPAIKKGILQTVKVVDELVKVMGRHKPENIVIEMARENQTTQKGQKNSRERMKRIEEGIKELGSQILKEHPVENTQLQNEKLYLYYLQNGRDMYVDQELDINRLSDYDVDHIVPQSFLKDDSIDNKVLTRSDKARGKSDNVPSEEVVKKMKNYWRQLLNAKLITQRKFDNLTKAERGGLSELDKAGFIKRQLVETRQITKHVAQILDSRMNTKYDENDKLIREVKVITLKSKLVSDFRKDFQFYKVREINNYHHAHDAYLNAVVGTALIKKYPKLESEFVYGDYKVYDVRKMIAKSEQEIGKATAKYFFYSNIMNFFKTEITLANGEIRKRPLIETNGETGEIVWDKGRDFATVRKVLSMPQVNIVKKTEVQTGGFSKESILPKRNSDKLIARKKDWDPKKYGGFDSPTVAYSVLVVAKVEKGKSKKLKSVKELLGITIMERSSFEKNPIDFLEAKGYKEVKKDLIIKLPKYSLFELENGRKRMLASAGELQKGNELALPSKYVNFLYLASHYEKLKGSPEDNEQKQLFVEQHKHYLDEIIEQISEFSKRVILADANLDKVLSAYNKHRDKPIREQAENIIHLFTLTNLGAPAAFKYFDTTIDRKRYTSTKEVLDATLIHQSITGLYETRIDLSQLGGDGGGGSPAPGGTLGDQGSRGSDPLPEPRVTLTVEGIPTEFLVNTGAEHSVLTKPMGKMGSKRTVVAGATGSKVYPWTTKRLLKIGQKQVTHSFLVIPECPAPLLGRDLLTKLKAQIQFSTEGPQVTWEDRPAMCLVLNLEEEYRLHEKPVPPSIDPSWLQLFPMVWAEKAGMGLANQVPPVVVELKSDASPVAVRQYPMSKEAREGIRPHIQRFLDLGILVPCQSPWNTPLLPVKKPGTNDYRPVQDLREVNKRVQDIHPTVPNPYNLLSSLPPSHTWYSVLDLKDAFFCLKLHPNSQPLFAFEWRDPEKGNTGQLTWTRLPQGFKNSPTLFNEALHRDLASFRALNPQVVMLQYVDDLLVAAPTYRDCKEGTRRLLQELSKLGYRVSAKKAQLCREEVTYLGYLLKGGKRWLTPARKATVMKIPTPTTPRQVREFLGTAGFCRLWIPGFASLAAPLYPLTRPKVPFTWTEAHQEAFGRIKEALLSAPALALPDLTKPFALYVDEKEGVARGVLTQTLGPWRRPVAYLSKKLDPVASGWPTCLKAIAAVALLLKDADKLTLGQNVLVIAPHNLESIVRQPPDRWMTNARMTHYQSLLLNERVSFAPPAILNPATLLPVESDDTPIHICSEILAEETGTRPDLRDQPLPGVPAWYTDGSSFIMDGRRQAGAAIVDNKRTVWASNLPEGTSAQKAELIALTQALRLAEGKSINIYTDSRYAFATAHVHGAIYKQRGWLTSAGKDIKNKEEILALLEAIHLPKRVAIIHCPGHQRGTDPVATGNRKADEAAKQAAQSTRILTETTKNAGKRTADGSEFEKRTADGSEFESPKKKAKVE

SEQ ID NO: 6646 - protein, 2213 aa, synthetic construct
MPAAKRVKLDGGDKKYSIGLDIGTNSVGWAVITDEYKVPSKKFKVLGNTDRHSIKKNLIGALLFDSGETAEATRLKRTARRRYTRRKNRICYLQEIFSNEMAKVDDSFFHRLEESFLVEEDKKHERHPIFGNIVDEVAYHEKYPTIYHLRKKLVDSTDKADLRLIYLALAHMIKFRGHFLIEGDLNPDNSDVDKLFIQLVQTYNQLFEENPINASGVDAKAILSARLSKSRRLENLIAQLPGEKKNGLFGNLIALSLGLTPNFKSNFDLAEDAKLQLSKDTYDDDLDNLLAQIGDQYADLFLAAKNLSDAILLSDILRVNTEITKAPLSASMIKRYDEHHQDLTLLKALVRQQLPEKYKEIFFDQSKNGYAGYIDGGASQEEFYKFIKPILEKMDGTEELLVKLNREDLLRKQRTFDNGSIPHQIHLGELHAILRRQEDFYPFLKDNREKIEKILTFRIPYYVGPLARGNSRFAWMTRKSEETITPWNFEEVVDKGASAQSFIERMTNFDKNLPNEKVLPKHSLLYEYFTVYNELTKVKYVTEGMRKPAFLSGEQKKAIVDLLFKTNRKVTVKQLKEDYFKKIECFDSVEISGVEDRFNASLGTYHDLLKIIKDKDFLDNEENEDILEDIVLTLTLFEDREMIEERLKTYAHLFDDKVMKQLKRRRYTGWGRLSRKLINGIRDKQSGKTILDFLKSDGFANRNFMQLIHDDSLTFKEDIQKAQVSGQGDSLHEHIANLAGSPAIKKGILQTVKVVDELVKVMGRHKPENIVIEMARENQTTQKGQKNSRERMKRIEEGIKELGSQILKEHPVENTQLQNEKLYLYYLQNGRDMYVDQELDINRLSDYDVDHIVPQSFLKDDSIDNKVLTRSDKARGKSDNVPSEEVVKKMKNYWRQLLNAKLITQRKFDNLTKAERGGLSELDKAGFIKRQLVETRQITKHVAQILDSRMNTKYDENDKLIREVKVITLKSKLVSDFRKDFQFYKVREINNYHHAHDAYLNAVVGTALIKKYPKLESEFVYGDYKVYDVRKMIAKSEQEIGKATAKYFFYSNIMNFFKTEITLANGEIRKRPLIETNGETGEIVWDKGRDFATVRKVLSMPQVNIVKKTEVQTGGFSKESILPKRNSDKLIARKKDWDPKKYGGFDSPTVAYSVLVVAKVEKGKSKKLKSVKELLGITIMERSSFEKNPIDFLEAKGYKEVKKDLIIKLPKYSLFELENGRKRMLASAGELQKGNELALPSKYVNFLYLASHYEKLKGSPEDNEQKQLFVEQHKHYLDEIIEQISEFSKRVILADANLDKVLSAYNKHRDKPIREQAENIIHLFTLTNLGAPAAFKYFDTTIDRKRYTSTKEVLDATLIHQSITGLYETRIDLSQLGGDGGGGSPAPGGTLGDQGSRGSDPLPEPRVTLTVEGIPTEFLVNTGAEHSVLTKPMGKMGSKRTVVAGATGSKVYPWTTKRLLKIGQKQVTHSFLVIPECPAPLLGRDLLTKLKAQIQFSTEGPQVTWEDRPAMCLVLNLEEEYRLHEKPVPPSIDPSWLQLFPMVWAEKAGMGLANQVPPVVVELKSDASPVAVRQYPMSKEAREGIRPHIQRFLDLGILVPCQSPWNTPLLPVKKPGTNDYRPVQDLREVNKRVQDIHPTVPNPYNLLSSLPPSHTWYSVLDLKDAFFCLKLHPNSQPLFAFEWRDPEKGNTGQLTWTRLPQGFKNSPTLFNEALHRDLASFRALNPQVVMLQYVDDLLVAAPTYRDCKEGTRRLLQELSKLGYRVSAKKAQLCREEVTYLGYLLKGGKRWLTPARKATVMKIPTPTTPRQVREFLGKAGFCRLFIPGFASLAAPLYPLTRPKVPFTWTEAHQEAFGRIKEALLSAPALALPDLTKPFALYVDEKEGVARGVLTQTLGPWRRPVAYLSKKLDPVASGWPTCLKAIAAVALLLKDADKLTLGQNVLVIAPHNLESIVRQPPDRWMTNARMTHYQSLLLNERVSFAPPAILNPATLLPVESDDTPIHICSEILAEETGTRPDLRDQPLPGVPAWYTDGSSFIMDGRRQAGAAIVDNKRTVWASNLPEGTSAQKAELIALTQALRLAEGKSINIYTDSRYAFATAHVHGAIYKQRGWLTSAGKDIKNKEEILALLEAIHLPKRVAIIHCPGHQRGTDPVATGNRKADEAAKQAAQSTRILTETTKNAGKRTADGSEFEKRTADGSEFESPKKKAKVE

SEQ ID NO: 6647 - protein, 2091 aa, synthetic construct
MPAAKRVKLDGGDKKYSIGLDIGTNSVGWAVITDEYKVPSKKFKVLGNTDRHSIKKNLIGALLFDSGETAEATRLKRTARRRYTRRKNRICYLQEIFSNEMAKVDDSFFHRLEESFLVEEDKKHERHPIFGNIVDEVAYHEKYPTIYHLRKKLVDSTDKADLRLIYLALAHMIKFRGHFLIEGDLNPDNSDVDKLFIQLVQTYNQLFEENPINASGVDAKAILSARLSKSRRLENLIAQLPGEKKNGLFGNLIALSLGLTPNFKSNFDLAEDAKLQLSKDTYDDDLDNLLAQIGDQYADLFLAAKNLSDAILLSDILRVNTEITKAPLSASMIKRYDEHHQDLTLLKALVRQQLPEKYKEIFFDQSKNGYAGYIDGGASQEEFYKFIKPILEKMDGTEELLVKLNREDLLRKQRTFDNGSIPHQIHLGELHAILRRQEDFYPFLKDNREKIEKILTFRIPYYVGPLARGNSRFAWMTRKSEETITPWNFEEVVDKGASAQSFIERMTNFDKNLPNEKVLPKHSLLYEYFTVYNELTKVKYVTEGMRKPAFLSGEQKKAIVDLLFKTNRKVTVKQLKEDYFKKIECFDSVEISGVEDRFNASLGTYHDLLKIIKDKDFLDNEENEDILEDIVLTLTLFEDREMIEERLKTYAHLFDDKVMKQLKRRRYTGWGRLSRKLINGIRDKQSGKTILDFLKSDGFANRNFMQLIHDDSLTFKEDIQKAQVSGQGDSLHEHIANLAGSPAIKKGILQTVKVVDELVKVMGRHKPENIVIEMARENQTTQKGQKNSRERMKRIEEGIKELGSQILKEHPVENTQLQNEKLYLYYLQNGRDMYVDQELDINRLSDYDVDHIVPQSFLKDDSIDNKVLTRSDKARGKSDNVPSEEVVKKMKNYWRQLLNAKLITQRKFDNLTKAERGGLSELDKAGFIKRQLVETRQITKHVAQILDSRMNTKYDENDKLIREVKVITLKSKLVSDFRKDFQFYKVREINNYHHAHDAYLNAVVGTALIKKYPKLESEFVYGDYKVYDVRKMIAKSEQEIGKATAKYFFYSNIMNFFKTEITLANGEIRKRPLIETNGETGEIVWDKGRDFATVRKVLSMPQVNIVKKTEVQTGGFSKESILPKRNSDKLIARKKDWDPKKYGGFDSPTVAYSVLVVAKVEKGKSKKLKSVKELLGITIMERSSFEKNPIDFLEAKGYKEVKKDLIIKLPKYSLFELENGRKRMLASAGELQKGNELALPSKYVNFLYLASHYEKLKGSPEDNEQKQLFVEQHKHYLDEIIEQISEFSKRVILADANLDKVLSAYNKHRDKPIREQAENIIHLFTLTNLGAPAAFKYFDTTIDRKRYTSTKEVLDATLIHQSITGLYETRIDLSQLGGDGGGGSPAPGGTLNIEDEYRLHETSKEPDVSLGSTWLSDFPQAWAETGGMGLAVRQAPLIIPLKATSTPVSIKQYPMSQEARLGIKPHIQRLLDQGILVPCQSPWNTPLLPVKKPGTNDYRPVQDLREVNKRVEDIHPTVPNPYNLLSGLPPSHQWYTVLDLKDAFFCLRLHPTSQPLFAFEWRDPEMGISGQLTWTRLPQGFKNSPTLFNEALHRDLAGFRIQHPDLILLQYVDDLLLAATSELDCQQGTRALLQTLGDLGYRASAKKAQICQKQVKYLGYLLKEGQRWLTEARKETVMGQPIPKTPRQLREFLGTAGFCRLWIPGFAEMAAPLYPLTKPGTLFNWGPDQQKAFQEIKQALLTAPALGLPDLTKPFELFVDEKQGYAKGVLTQKLGPWRRPVAYLSKKLDPVAAGWPPCLRMVAAIAVLTKDAGKLTMGQPLVILAPHAVEALVKQPPDRWLSNARMTHYQALLLDTDRVQFGPVVALNPATLLPLPEEGLQHDCLDILAEAHGTRSDLMDQPLPDADHTWYTDGSSFLQEGQRKAGAAVTTETEVIWARALPAGTSAQRAELIALTQALKMAEGKKLNVYTDSRYAFATAHIHGEIYRRRGWLTSEGKEIKNKDEILALLKALFLPKRLSIIHCPGHQKGNSAEARGNRMADQAAREVATRETPETSTLLAGKRTADGSEFEKRTADGSEFESPKKKAKVE

SEQ ID NO: 6648 - protein, 2091 aa, synthetic construct
MPAAKRVKLDGGDKKYSIGLDIGTNSVGWAVITDEYKVPSKKFKVLGNTDRHSIKKNLIGALLFDSGETAEATRLKRTARRRYTRRKNRICYLQEIFSNEMAKVDDSFFHRLEESFLVEEDKKHERHPIFGNIVDEVAYHEKYPTIYHLRKKLVDSTDKADLRLIYLALAHMIKFRGHFLIEGDLNPDNSDVDKLFIQLVQTYNQLFEENPINASGVDAKAILSARLSKSRRLENLIAQLPGEKKNGLFGNLIALSLGLTPNFKSNFDLAEDAKLQLSKDTYDDDLDNLLAQIGDQYADLFLAAKNLSDAILLSDILRVNTEITKAPLSASMIKRYDEHHQDLTLLKALVRQQLPEKYKEIFFDQSKNGYAGYIDGGASQEEFYKFIKPILEKMDGTEELLVKLNREDLLRKQRTFDNGSIPHQIHLGELHAILRRQEDFYPFLKDNREKIEKILTFRIPYYVGPLARGNSRFAWMTRKSEETITPWNFEEVVDKGASAQSFIERMTNFDKNLPNEKVLPKHSLLYEYFTVYNELTKVKYVTEGMRKPAFLSGEQKKAIVDLLFKTNRKVTVKQLKEDYFKKIECFDSVEISGVEDRFNASLGTYHDLLKIIKDKDFLDNEENEDILEDIVLTLTLFEDREMIEERLKTYAHLFDDKVMKQLKRRRYTGWGRLSRKLINGIRDKQSGKTILDFLKSDGFANRNFMQLIHDDSLTFKEDIQKAQVSGQGDSLHEHIANLAGSPAIKKGILQTVKVVDELVKVMGRHKPENIVIEMARENQTTQKGQKNSRERMKRIEEGIKELGSQILKEHPVENTQLQNEKLYLYYLQNGRDMYVDQELDINRLSDYDVDHIVPQSFLKDDSIDNKVLTRSDKARGKSDNVPSEEVVKKMKNYWRQLLNAKLITQRKFDNLTKAERGGLSELDKAGFIKRQLVETRQITKHVAQILDSRMNTKYDENDKLIREVKVITLKSKLVSDFRKDFQFYKVREINNYHHAHDAYLNAVVGTALIKKYPKLESEFVYGDYKVYDVRKMIAKSEQEIGKATAKYFFYSNIMNFFKTEITLANGEIRKRPLIETNGETGEIVWDKGRDFATVRKVLSMPQVNIVKKTEVQTGGFSKESILPKRNSDKLIARKKDWDPKKYGGFDSPTVAYSVLVVAKVEKGKSKKLKSVKELLGITIMERSSFEKNPIDFLEAKGYKEVKKDLIIKLPKYSLFELENGRKRMLASAGELQKGNELALPSKYVNFLYLASHYEKLKGSPEDNEQKQLFVEQHKHYLDEIIEQISEFSKRVILADANLDKVLSAYNKHRDKPIREQAENIIHLFTLTNLGAPAAFKYFDTTIDRKRYTSTKEVLDATLIHQSITGLYETRIDLSQLGGDGGGGSPAPGGTLNIEDEYRLHETSKGPDVPLGSTWLSDFPQAWAETGGMGLAVRQAPLIIPLKATSTPVSIKQYPMSQEARLGIKPHIQRLLDQGILVPCQSPWNTPLLPVKKPGTNDYRPVQDLREVNKRVEDIHPTVPNPYNLLSGLPPSHQWYTVLDLKDAFFCLRLHPTSQSLFAFEWRDPEMGISGQLTWTRLPQGFKNSPTLFNEALHRDLADFRIQHPDLILLQYVDDLLLAATSELDCQQGTRALLQTLGDLGYRASAKKAQICQKQVKYLGYLLKEGQRWLTEARKETVMGQPTPKTPRQLREFLGKAGFCRLFIPGFAEMAAPLYPLTKPGTLFEWGPDQQKAYQEIKQALLTAPALGLPDLTKPFELFVDEKQGYAKGVLTQKLGPWRRPVAYLSKKLDPVAAGWPPCLRMVAAIAVLTKDAGKLTMGQPLVILAPHAVEALVKQPPDRWLSNARMTHYQALLLDTDRVQFGPIVALNPATLLPLPEEGLQHDCLDILAEAHGTRPDLTDQPLPDADHTWYTDGSSFLQEGQRKAGAAVTTETEVVWAKALPAGTSAQRAELIALTQALKMAEGKKLNVYTDSRYAFATAHIHGEIYRRRGWLTSEGKEIKNKDEILALLKALFLPKRLSIIHCPGHQKGNRAEARGNRMADQAAREVATRETPETSTLLAGKRTADGSEFEKRTADGSEFESPKKKAKVE

SEQ ID NO: 6649 - protein, 2082 aa, synthetic construct
MPAAKRVKLDGGDKKYSIGLDIGTNSVGWAVITDEYKVPSKKFKVLGNTDRHSIKKNLIGALLFDSGETAEATRLKRTARRRYTRRKNRICYLQEIFSNEMAKVDDSFFHRLEESFLVEEDKKHERHPIFGNIVDEVAYHEKYPTIYHLRKKLVDSTDKADLRLIYLALAHMIKFRGHFLIEGDLNPDNSDVDKLFIQLVQTYNQLFEENPINASGVDAKAILSARLSKSRRLENLIAQLPGEKKNGLFGNLIALSLGLTPNFKSNFDLAEDAKLQLSKDTYDDDLDNLLAQIGDQYADLFLAAKNLSDAILLSDILRVNTEITKAPLSASMIKRYDEHHQDLTLLKALVRQQLPEKYKEIFFDQSKNGYAGYIDGGASQEEFYKFIKPILEKMDGTEELLVKLNREDLLRKQRTFDNGSIPHQIHLGELHAILRRQEDFYPFLKDNREKIEKILTFRIPYYVGPLARGNSRFAWMTRKSEETITPWNFEEVVDKGASAQSFIERMTNFDKNLPNEKVLPKHSLLYEYFTVYNELTKVKYVTEGMRKPAFLSGEQKKAIVDLLFKTNRKVTVKQLKEDYFKKIECFDSVEISGVEDRFNASLGTYHDLLKIIKDKDFLDNEENEDILEDIVLTLTLFEDREMIEERLKTYAHLFDDKVMKQLKRRRYTGWGRLSRKLINGIRDKQSGKTILDFLKSDGFANRNFMQLIHDDSLTFKEDIQKAQVSGQGDSLHEHIANLAGSPAIKKGILQTVKVVDELVKVMGRHKPENIVIEMARENQTTQKGQKNSRERMKRIEEGIKELGSQILKEHPVENTQLQNEKLYLYYLQNGRDMYVDQELDINRLSDYDVDHIVPQSFLKDDSIDNKVLTRSDKARGKSDNVPSEEVVKKMKNYWRQLLNAKLITQRKFDNLTKAERGGLSELDKAGFIKRQLVETRQITKHVAQILDSRMNTKYDENDKLIREVKVITLKSKLVSDFRKDFQFYKVREINNYHHAHDAYLNAVVGTALIKKYPKLESEFVYGDYKVYDVRKMIAKSEQEIGKATAKYFFYSNIMNFFKTEITLANGEIRKRPLIETNGETGEIVWDKGRDFATVRKVLSMPQVNIVKKTEVQTGGFSKESILPKRNSDKLIARKKDWDPKKYGGFDSPTVAYSVLVVAKVEKGKSKKLKSVKELLGITIMERSSFEKNPIDFLEAKGYKEVKKDLIIKLPKYSLFELENGRKRMLASAGELQKGNELALPSKYVNFLYLASHYEKLKGSPEDNEQKQLFVEQHKHYLDEIIEQISEFSKRVILADANLDKVLSAYNKHRDKPIREQAENIIHLFTLTNLGAPAAFKYFDTTIDRKRYTSTKEVLDATLIHQSITGLYETRIDLSQLGGDGGGGSPAPGGIPWLMKKPLQLTTLVPLQEYEERLLKQTMLTGSYKEKLQSLFLKYDALWQHWENQVGHRRIKPHHIATGTVNPRPQKQYPINPKAKASIQTVINDLLKQGVLIQQNSIMNTPVYPVPKPDGKWRMVLDYREVNKTIPLIAAQNQHSAGILSSIFRGKYKTTLDLSNGFWAHSITPESYWLTAFTWLGQQYCWTRLPQGFLNSPALFNADVVDLLKEVPNVQVYVDDIYISHDDPREHLEQLEKVFSLLLNAGYVVSLKKSEIAQHEVEFLGFNITKEGRGLTETFKQKLLNITPPRDLKQLQSILGKLNFARNFIPNFSELVKPLYNIIATAPGKYITWTTDNSQQLQNIISMLNSAENLEERNPEVRLIMKVNTSPSAGYIRFYNEFAKRPIMYLNYVYTKAEVKFTNTEKLLTTIHKGLIKALDLGMGQEILVYSPIVSMTKIQKTPLPERKALPIRWITWMSYLEDPRIQFHYDKTLPELQQVPTVTDDIIAKIKHPSEFSMVFYTDGSAIKHPNVNKSHNAGMGIAQVQFKPEFTVINTWSIPLGDHTAQLAEVAAVEFACKKALKIDGPVLIVTDSFYVAESVNKELPYWQSNGFFNNKKKPLKHVSKWKSIADCIQLKPDIIIIHEKGHQPTASTFHTEGNNLADKLATQGSYVVNAGKRTADGSEFEKRTADGSEFESPKKKAKVE

SEQ ID NO: 6650 - protein, 2089 aa, synthetic construct
MPAAKRVKLDGGDKKYSIGLDIGTNSVGWAVITDEYKVPSKKFKVLGNTDRHSIKKNLIGALLFDSGETAEATRLKRTARRRYTRRKNRICYLQEIFSNEMAKVDDSFFHRLEESFLVEEDKKHERHPIFGNIVDEVAYHEKYPTIYHLRKKLVDSTDKADLRLIYLALAHMIKFRGHFLIEGDLNPDNSDVDKLFIQLVQTYNQLFEENPINASGVDAKAILSARLSKSRRLENLIAQLPGEKKNGLFGNLIALSLGLTPNFKSNFDLAEDAKLQLSKDTYDDDLDNLLAQIGDQYADLFLAAKNLSDAILLSDILRVNTEITKAPLSASMIKRYDEHHQDLTLLKALVRQQLPEKYKEIFFDQSKNGYAGYIDGGASQEEFYKFIKPILEKMDGTEELLVKLNREDLLRKQRTFDNGSIPHQIHLGELHAILRRQEDFYPFLKDNREKIEKILTFRIPYYVGPLARGNSRFAWMTRKSEETITPWNFEEVVDKGASAQSFIERMTNFDKNLPNEKVLPKHSLLYEYFTVYNELTKVKYVTEGMRKPAFLSGEQKKAIVDLLFKTNRKVTVKQLKEDYFKKIECFDSVEISGVEDRFNASLGTYHDLLKIIKDKDFLDNEENEDILEDIVLTLTLFEDREMIEERLKTYAHLFDDKVMKQLKRRRYTGWGRLSRKLINGIRDKQSGKTILDFLKSDGFANRNFMQLIHDDSLTFKEDIQKAQVSGQGDSLHEHIANLAGSPAIKKGILQTVKVVDELVKVMGRHKPENIVIEMARENQTTQKGQKNSRERMKRIEEGIKELGSQILKEHPVENTQLQNEKLYLYYLQNGRDMYVDQELDINRLSDYDVDHIVPQSFLKDDSIDNKVLTRSDKARGKSDNVPSEEVVKKMKNYWRQLLNAKLITQRKFDNLTKAERGGLSELDKAGFIKRQLVETRQITKHVAQILDSRMNTKYDENDKLIREVKVITLKSKLVSDFRKDFQFYKVREINNYHHAHDAYLNAVVGTALIKKYPKLESEFVYGDYKVYDVRKMIAKSEQEIGKATAKYFFYSNIMNFFKTEITLANGEIRKRPLIETNGETGEIVWDKGRDFATVRKVLSMPQVNIVKKTEVQTGGFSKESILPKRNSDKLIARKKDWDPKKYGGFDSPTVAYSVLVVAKVEKGKSKKLKSVKELLGITIMERSSFEKNPIDFLEAKGYKEVKKDLIIKLPKYSLFELENGRKRMLASAGELQKGNELALPSKYVNFLYLASHYEKLKGSPEDNEQKQLFVEQHKHYLDEIIEQISEFSKRVILADANLDKVLSAYNKHRDKPIREQAENIIHLFTLTNLGAPAAFKYFDTTIDRKRYTSTKEVLDATLIHQSITGLYETRIDLSQLGGDGGGGSPAPGGVLNLEEEYRLHEKPVPSSIDPSWLQLFPTVWAERAGMGLANQVPPVVVELRSGASPVAVRQYPMSKEAREGIRPHIQRFLDLGVLVPCQSPWNTPLLPVKKPGTNDYRPVQDLREINKRVQDIHPTVPNPYNLLSSLPPSHTWYSVLDLKDAFFCLKLHPNSQPLFAFEWRDPEKGNTGQLTWTRLPQGFKNSPTLFNEALHRDLAPFRALNPQVVLLQYVDDLLVAAPTYRDCKEGTQKLLQELSKLGYRVSAKKAQLCQKEVTYLGYLLKEGKRWLTPARKATVMKIPPPTTPRQVREFLGKAGFCRLFIPGFASLAAPLYPLTKPSIPFIWTEEHQKAFDRIKEALLSAPALALPDLTKPFTLYVDERAGVARGVLTQTLGPWRRPVAYLSKKLDPVASGWPTCLKAVAAVALLLKDADKLTLGQNVTVIASHSLESIVRQPPDRWMTNARMTHYQSLLLNERVSFAPPAVLNPATLLPVESEATPVHRCSEILAEETGTRRDLKDQPLPGVPAWYTDGSSFIAEGKRRAGAAIVDGKRTVWASSLPEGTSAQKAELVALTQALRLAEGKDINIYTDSRYAFATAHIHGAIYKQRGWLTSAGKDIKNKEEILALLEAIHLPKRVAIIHCPGHQKGNDPVATGNRRADEAAKQAALSTRVLAETTKPAGKRTADGSEFEKRTADGSEFESPKKKAKVE

SEQ ID NO: 6651 - protein, 2093 aa, synthetic construct
MPAAKRVKLDGGDKKYSIGLDIGTNSVGWAVITDEYKVPSKKFKVLGNTDRHSIKKNLIGALLFDSGETAEATRLKRTARRRYTRRKNRICYLQEIFSNEMAKVDDSFFHRLEESFLVEEDKKHERHPIFGNIVDEVAYHEKYPTIYHLRKKLVDSTDKADLRLIYLALAHMIKFRGHFLIEGDLNPDNSDVDKLFIQLVQTYNQLFEENPINASGVDAKAILSARLSKSRRLENLIAQLPGEKKNGLFGNLIALSLGLTPNFKSNFDLAEDAKLQLSKDTYDDDLDNLLAQIGDQYADLFLAAKNLSDAILLSDILRVNTEITKAPLSASMIKRYDEHHQDLTLLKALVRQQLPEKYKEIFFDQSKNGYAGYIDGGASQEEFYKFIKPILEKMDGTEELLVKLNREDLLRKQRTFDNGSIPHQIHLGELHAILRRQEDFYPFLKDNREKIEKILTFRIPYYVGPLARGNSRFAWMTRKSEETITPWNFEEVVDKGASAQSFIERMTNFDKNLPNEKVLPKHSLLYEYFTVYNELTKVKYVTEGMRKPAFLSGEQKKAIVDLLFKTNRKVTVKQLKEDYFKKIECFDSVEISGVEDRFNASLGTYHDLLKIIKDKDFLDNEENEDILEDIVLTLTLFEDREMIEERLKTYAHLFDDKVMKQLKRRRYTGWGRLSRKLINGIRDKQSGKTILDFLKSDGFANRNFMQLIHDDSLTFKEDIQKAQVSGQGDSLHEHIANLAGSPAIKKGILQTVKVVDELVKVMGRHKPENIVIEMARENQTTQKGQKNSRERMKRIEEGIKELGSQILKEHPVENTQLQNEKLYLYYLQNGRDMYVDQELDINRLSDYDVDHIVPQSFLKDDSIDNKVLTRSDKARGKSDNVPSEEVVKKMKNYWRQLLNAKLITQRKFDNLTKAERGGLSELDKAGFIKRQLVETRQITKHVAQILDSRMNTKYDENDKLIREVKVITLKSKLVSDFRKDFQFYKVREINNYHHAHDAYLNAVVGTALIKKYPKLESEFVYGDYKVYDVRKMIAKSEQEIGKATAKYFFYSNIMNFFKTEITLANGEIRKRPLIETNGETGEIVWDKGRDFATVRKVLSMPQVNIVKKTEVQTGGFSKESILPKRNSDKLIARKKDWDPKKYGGFDSPTVAYSVLVVAKVEKGKSKKLKSVKELLGITIMERSSFEKNPIDFLEAKGYKEVKKDLIIKLPKYSLFELENGRKRMLASAGELQKGNELALPSKYVNFLYLASHYEKLKGSPEDNEQKQLFVEQHKHYLDEIIEQISEFSKRVILADANLDKVLSAYNKHRDKPIREQAENIIHLFTLTNLGAPAAFKYFDTTIDRKRYTSTKEVLDATLIHQSITGLYETRIDLSQLGGDGGPAPGGSGGTAPLEEEYRLFLEAPIQNVTLLEQWKREIPKVWAEINPPGLASTQAPIHVQLLSTALPVRVRQYPITLEAKRSLRETIRKFRAAGILRPVHSPWNTPLLPVRKSGTSEYRMVQDLREVNKRVETIHPTVPNPYTLLSLLPPDRIWYSVLDLKDAFFCIPLAPESQLIFAFEWADAEEGESGQLTWTRLPQGFKNSPTLFNEALNRDLQGFRLDHPSVSLLQYVDDLLIAADTQAACLSATRDLLMTLAELGYRVSGKKAQLCQEEVTYLGFKIHKGSRSLSNSRTQAILQIPVPKTKRQVREFLGTIGYCRLWIPGFAELAQPLYAATRPGNDPLVWGEKEEEAFQSLKLALTQPPALALPSLDKPFQLFVEETSGAAKGVLTQALGPWKRPVAYLSKRLDPVAAGWPRCLRAIAAAALLTREASKLTFGQDIEITSSHNLESLLRSPPDKWLTNARITQYQVLLLDPPRVRFKQTAALNPATLLPETDDTLPIHHCLDTLDSLTSTRPDLTDQPLAQAEATLFTDGSSYIRDGKRYAGAAVVTLDSVIWAEPLPIGTSAQKAELIALTKALEWSKDKSVNIYTDSRYAFATLHVHGMIYRERGWLTAGGKAIKNAPEILALLTAVWLPKRVAVMHCKGHQKDDAPTSTGNRRADEVAREVAIRPLSTQATISAGKRTADGSEFEKRTADGSEFESPKKKAKVE

SEQ ID NO: 6652 - protein, 2093 aa, synthetic construct
MPAAKRVKLDGGDKKYSIGLDIGTNSVGWAVITDEYKVPSKKFKVLGNTDRHSIKKNLIGALLFDSGETAEATRLKRTARRRYTRRKNRICYLQEIFSNEMAKVDDSFFHRLEESFLVEEDKKHERHPIFGNIVDEVAYHEKYPTIYHLRKKLVDSTDKADLRLIYLALAHMIKFRGHFLIEGDLNPDNSDVDKLFIQLVQTYNQLFEENPINASGVDAKAILSARLSKSRRLENLIAQLPGEKKNGLFGNLIALSLGLTPNFKSNFDLAEDAKLQLSKDTYDDDLDNLLAQIGDQYADLFLAAKNLSDAILLSDILRVNTEITKAPLSASMIKRYDEHHQDLTLLKALVRQQLPEKYKEIFFDQSKNGYAGYIDGGASQEEFYKFIKPILEKMDGTEELLVKLNREDLLRKQRTFDNGSIPHQIHLGELHAILRRQEDFYPFLKDNREKIEKILTFRIPYYVGPLARGNSRFAWMTRKSEETITPWNFEEVVDKGASAQSFIERMTNFDKNLPNEKVLPKHSLLYEYFTVYNELTKVKYVTEGMRKPAFLSGEQKKAIVDLLFKTNRKVTVKQLKEDYFKKIECFDSVEISGVEDRFNASLGTYHDLLKIIKDKDFLDNEENEDILEDIVLTLTLFEDREMIEERLKTYAHLFDDKVMKQLKRRRYTGWGRLSRKLINGIRDKQSGKTILDFLKSDGFANRNFMQLIHDDSLTFKEDIQKAQVSGQGDSLHEHIANLAGSPAIKKGILQTVKVVDELVKVMGRHKPENIVIEMARENQTTQKGQKNSRERMKRIEEGIKELGSQILKEHPVENTQLQNEKLYLYYLQNGRDMYVDQELDINRLSDYDVDHIVPQSFLKDDSIDNKVLTRSDKARGKSDNVPSEEVVKKMKNYWRQLLNAKLITQRKFDNLTKAERGGLSELDKAGFIKRQLVETRQITKHVAQILDSRMNTKYDENDKLIREVKVITLKSKLVSDFRKDFQFYKVREINNYHHAHDAYLNAVVGTALIKKYPKLESEFVYGDYKVYDVRKMIAKSEQEIGKATAKYFFYSNIMNFFKTEITLANGEIRKRPLIETNGETGEIVWDKGRDFATVRKVLSMPQVNIVKKTEVQTGGFSKESILPKRNSDKLIARKKDWDPKKYGGFDSPTVAYSVLVVAKVEKGKSKKLKSVKELLGITIMERSSFEKNPIDFLEAKGYKEVKKDLIIKLPKYSLFELENGRKRMLASAGELQKGNELALPSKYVNFLYLASHYEKLKGSPEDNEQKQLFVEQHKHYLDEIIEQISEFSKRVILADANLDKVLSAYNKHRDKPIREQAENIIHLFTLTNLGAPAAFKYFDTTIDRKRYTSTKEVLDATLIHQSITGLYETRIDLSQLGGDGGPAPGGSGGTAPLEEEYRLFLEAPIQNVTLLEQWKREIPKVWAEINPPGLASTQAPIHVQLLSTALPVRVRQYPITLEAKRSLRETIRKFRAAGILRPVHSPWNTPLLPVRKSGTSEYRMVQDLREVNKRVETIHPTVPNPYTLLSLLPPDRIWYSVLDLKDAFFCIPLAPESQLIFAFEWADAEEGESGQLTWTRLPQGFKNSPTLFNEALNRDLQGFRLDHPSVSLLQYVDDLLIAADTQAACLSATRDLLMTLAELGYRVSGKKAQLCQEEVTYLGFKIHKGSRSLSNSRTQAILQIPVPKTKRQVREFLGKIGYCRLFIPGFAELAQPLYAATRPGNDPLVWGEKEEEAFQSLKLALTQPPALALPSLDKPFQLFVEETSGAAKGVLTQALGPWKRPVAYLSKRLDPVAAGWPRCLRAIAAAALLTREASKLTFGQDIEITSSHNLESLLRSPPDKWLTNARITQYQVLLLDPPRVRFKQTAALNPATLLPETDDTLPIHHCLDTLDSLTSTRPDLTDQPLAQAEATLFTDGSSYIRDGKRYAGAAVVTLDSVIWAEPLPIGTSAQKAELIALTKALEWSKDKSVNIYTDSRYAFATLHVHGMIYRERGWLTAGGKAIKNAPEILALLTAVWLPKRVAVMHCKGHQKDDAPTSTGNRRADEVAREVAIRPLSTQATISAGKRTADGSEFEKRTADGSEFESPKKKAKVE

SEQ ID NO: 6653 - protein, 2089 aa, synthetic construct
MPAAKRVKLDGGDKKYSIGLDIGTNSVGWAVITDEYKVPSKKFKVLGNTDRHSIKKNLIGALLFDSGETAEATRLKRTARRRYTRRKNRICYLQEIFSNEMAKVDDSFFHRLEESFLVEEDKKHERHPIFGNIVDEVAYHEKYPTIYHLRKKLVDSTDKADLRLIYLALAHMIKFRGHFLIEGDLNPDNSDVDKLFIQLVQTYNQLFEENPINASGVDAKAILSARLSKSRRLENLIAQLPGEKKNGLFGNLIALSLGLTPNFKSNFDLAEDAKLQLSKDTYDDDLDNLLAQIGDQYADLFLAAKNLSDAILLSDILRVNTEITKAPLSASMIKRYDEHHQDLTLLKALVRQQLPEKYKEIFFDQSKNGYAGYIDGGASQEEFYKFIKPILEKMDGTEELLVKLNREDLLRKQRTFDNGSIPHQIHLGELHAILRRQEDFYPFLKDNREKIEKILTFRIPYYVGPLARGNSRFAWMTRKSEETITPWNFEEVVDKGASAQSFIERMTNFDKNLPNEKVLPKHSLLYEYFTVYNELTKVKYVTEGMRKPAFLSGEQKKAIVDLLFKTNRKVTVKQLKEDYFKKIECFDSVEISGVEDRFNASLGTYHDLLKIIKDKDFLDNEENEDILEDIVLTLTLFEDREMIEERLKTYAHLFDDKVMKQLKRRRYTGWGRLSRKLINGIRDKQSGKTILDFLKSDGFANRNFMQLIHDDSLTFKEDIQKAQVSGQGDSLHEHIANLAGSPAIKKGILQTVKVVDELVKVMGRHKPENIVIEMARENQTTQKGQKNSRERMKRIEEGIKELGSQILKEHPVENTQLQNEKLYLYYLQNGRDMYVDQELDINRLSDYDVDHIVPQSFLKDDSIDNKVLTRSDKARGKSDNVPSEEVVKKMKNYWRQLLNAKLITQRKFDNLTKAERGGLSELDKAGFIKRQLVETRQITKHVAQILDSRMNTKYDENDKLIREVKVITLKSKLVSDFRKDFQFYKVREINNYHHAHDAYLNAVVGTALIKKYPKLESEFVYGDYKVYDVRKMIAKSEQEIGKATAKYFFYSNIMNFFKTEITLANGEIRKRPLIETNGETGEIVWDKGRDFATVRKVLSMPQVNIVKKTEVQTGGFSKESILPKRNSDKLIARKKDWDPKKYGGFDSPTVAYSVLVVAKVEKGKSKKLKSVKELLGITIMERSSFEKNPIDFLEAKGYKEVKKDLIIKLPKYSLFELENGRKRMLASAGELQKGNELALPSKYVNFLYLASHYEKLKGSPEDNEQKQLFVEQHKHYLDEIIEQISEFSKRVILADANLDKVLSAYNKHRDKPIREQAENIIHLFTLTNLGAPAAFKYFDTTIDRKRYTSTKEVLDATLIHQSITGLYETRIDLSQLGGDGGPAPGGSGGVLNLEEEYRLHEKPVPSSIDPSWLQLFPTVWAERAGMGLANQVPPVVVELRSGASPVAVRQYPMSKEAREGIRPHIQKFLDLGVLVPCRSPWNTPLLPVKKPGTNDYRPVQDLREINKRVQDIHPTVPNPYNLLSSLPPSYTWYSVLDLKDAFFCLRLHPNSQPLFAFEWKDPEKGNTGQLTWTRLPQGFKNSPTLFDEALHRDLAPFRALNPQVVLLQYVDDLLVAAPTYEDCKKGTQKLLQELSKLGYRVSAKKAQLCQREVTYLGYLLKEGKRWLTPARKATVMKIPVPTTPRQVREFLGTAGFCRLWIPGFASLAAPLYPLTKESIPFIWTEEHQQAFDHIKKALLSAPALALPDLTKPFTLYIDERAGVARGVLTQTLGPWRRPVAYLSKKLDPVASGWPTCLKAVAAVALLLKDADKLTLGQNVTVIASHSLESIVRQPPDRWMTNARMTHYQSLLLNERVSFAPPAVLNPATLLPVESEATPVHRCSEILAEETGTRRDLEDQPLPGVPTWYTDGSSFITEGKRRAGAPIVDGKRTVWASSLPEGTSAQKAELVALTQALRLAEGKNINIYTDSRYAFATAHIHGAIYKQRGLLTSAGKDIKNKEEILALLEAIHLPRRVAIIHCPGHQRGSNPVATGNRRADEAAKQAALSTRVLAGTTKPAGKRTADGSEFEKRTADGSEFESPKKKAKVE

SEQ ID NO: 6654 - protein, 2213 aa, synthetic construct
MPAAKRVKLDGGDKKYSIGLDIGTNSVGWAVITDEYKVPSKKFKVLGNTDRHSIKKNLIGALLFDSGETAEATRLKRTARRRYTRRKNRICYLQEIFSNEMAKVDDSFFHRLEESFLVEEDKKHERHPIFGNIVDEVAYHEKYPTIYHLRKKLVDSTDKADLRLIYLALAHMIKFRGHFLIEGDLNPDNSDVDKLFIQLVQTYNQLFEENPINASGVDAKAILSARLSKSRRLENLIAQLPGEKKNGLFGNLIALSLGLTPNFKSNFDLAEDAKLQLSKDTYDDDLDNLLAQIGDQYADLFLAAKNLSDAILLSDILRVNTEITKAPLSASMIKRYDEHHQDLTLLKALVRQQLPEKYKEIFFDQSKNGYAGYIDGGASQEEFYKFIKPILEKMDGTEELLVKLNREDLLRKQRTFDNGSIPHQIHLGELHAILRRQEDFYPFLKDNREKIEKILTFRIPYYVGPLARGNSRFAWMTRKSEETITPWNFEEVVDKGASAQSFIERMTNFDKNLPNEKVLPKHSLLYEYFTVYNELTKVKYVTEGMRKPAFLSGEQKKAIVDLLFKTNRKVTVKQLKEDYFKKIECFDSVEISGVEDRFNASLGTYHDLLKIIKDKDFLDNEENEDILEDIVLTLTLFEDREMIEERLKTYAHLFDDKVMKQLKRRRYTGWGRLSRKLINGIRDKQSGKTILDFLKSDGFANRNFMQLIHDDSLTFKEDIQKAQVSGQGDSLHEHIANLAGSPAIKKGILQTVKVVDELVKVMGRHKPENIVIEMARENQTTQKGQKNSRERMKRIEEGIKELGSQILKEHPVENTQLQNEKLYLYYLQNGRDMYVDQELDINRLSDYDVDHIVPQSFLKDDSIDNKVLTRSDKARGKSDNVPSEEVVKKMKNYWRQLLNAKLITQRKFDNLTKAERGGLSELDKAGFIKRQLVETRQITKHVAQILDSRMNTKYDENDKLIREVKVITLKSKLVSDFRKDFQFYKVREINNYHHAHDAYLNAVVGTALIKKYPKLESEFVYGDYKVYDVRKMIAKSEQEIGKATAKYFFYSNIMNFFKTEITLANGEIRKRPLIETNGETGEIVWDKGRDFATVRKVLSMPQVNIVKKTEVQTGGFSKESILPKRNSDKLIARKKDWDPKKYGGFDSPTVAYSVLVVAKVEKGKSKKLKSVKELLGITIMERSSFEKNPIDFLEAKGYKEVKKDLIIKLPKYSLFELENGRKRMLASAGELQKGNELALPSKYVNFLYLASHYEKLKGSPEDNEQKQLFVEQHKHYLDEIIEQISEFSKRVILADANLDKVLSAYNKHRDKPIREQAENIIHLFTLTNLGAPAAFKYFDTTIDRKRYTSTKEVLDATLIHQSITGLYETRIDLSQLGGDGGPAPGGSGGTLGDQGSRGSDPLPEPRVTLTVEGIPTEFLVNTGAEHSVLTKPMGKMGSKRTVVAGATGSKVYPWTTKRLLKIGQKQVTHSFLVIPECPAPLLGRDLLTKLKAQIQFSTEGPQVTWEDRPAMCLVLNLEEEYRLHEKPVPPSIDPSWLQLFPMVWAEKAGMGLANQVPPVVVELKSDASPVAVRQYPMSKEAREGIRPHIQRFLDLGILVPCQSPWNTPLLPVKKPGTNDYRPVQDLREVNKRVQDIHPTVPNPYNLLSSLPPSHTWYSVLDLKDAFFCLKLHPNSQPLFAFEWRDPEKGNTGQLTWTRLPQGFKNSPTLFNEALHRDLASFRALNPQVVMLQYVDDLLVAAPTYRDCKEGTRRLLQELSKLGYRVSAKKAQLCREEVTYLGYLLKGGKRWLTPARKATVMKIPTPTTPRQVREFLGTAGFCRLWIPGFASLAAPLYPLTRPKVPFTWTEAHQEAFGRIKEALLSAPALALPDLTKPFALYVDEKEGVARGVLTQTLGPWRRPVAYLSKKLDPVASGWPTCLKAIAAVALLLKDADKLTLGQNVLVIAPHNLESIVRQPPDRWMTNARMTHYQSLLLNERVSFAPPAILNPATLLPVESDDTPIHICSEILAEETGTRPDLRDQPLPGVPAWYTDGSSFIMDGRRQAGAAIVDNKRTVWASNLPEGTSAQKAELIALTQALRLAEGKSINIYTDSRYAFATAHVHGAIYKQRGWLTSAGKDIKNKEEILALLEAIHLPKRVAIIHCPGHQRGTDPVATGNRKADEAAKQAAQSTRILTETTKNAGKRTADGSEFEKRTADGSEFESPKKKAKVE

SEQ ID NO: 6655 - protein, 2091 aa, synthetic construct
MPAAKRVKLDGGDKKYSIGLDIGTNSVGWAVITDEYKVPSKKFKVLGNTDRHSIKKNLIGALLFDSGETAEATRLKRTARRRYTRRKNRICYLQEIFSNEMAKVDDSFFHRLEESFLVEEDKKHERHPIFGNIVDEVAYHEKYPTIYHLRKKLVDSTDKADLRLIYLALAHMIKFRGHFLIEGDLNPDNSDVDKLFIQLVQTYNQLFEENPINASGVDAKAILSARLSKSRRLENLIAQLPGEKKNGLFGNLIALSLGLTPNFKSNFDLAEDAKLQLSKDTYDDDLDNLLAQIGDQYADLFLAAKNLSDAILLSDILRVNTEITKAPLSASMIKRYDEHHQDLTLLKALVRQQLPEKYKEIFFDQSKNGYAGYIDGGASQEEFYKFIKPILEKMDGTEELLVKLNREDLLRKQRTFDNGSIPHQIHLGELHAILRRQEDFYPFLKDNREKIEKILTFRIPYYVGPLARGNSRFAWMTRKSEETITPWNFEEVVDKGASAQSFIERMTNFDKNLPNEKVLPKHSLLYEYFTVYNELTKVKYVTEGMRKPAFLSGEQKKAIVDLLFKTNRKVTVKQLKEDYFKKIECFDSVEISGVEDRFNASLGTYHDLLKIIKDKDFLDNEENEDILEDIVLTLTLFEDREMIEERLKTYAHLFDDKVMKQLKRRRYTGWGRLSRKLINGIRDKQSGKTILDFLKSDGFANRNFMQLIHDDSLTFKEDIQKAQVSGQGDSLHEHIANLAGSPAIKKGILQTVKVVDELVKVMGRHKPENIVIEMARENQTTQKGQKNSRERMKRIEEGIKELGSQILKEHPVENTQLQNEKLYLYYLQNGRDMYVDQELDINRLSDYDVDHIVPQSFLKDDSIDNKVLTRSDKARGKSDNVPSEEVVKKMKNYWRQLLNAKLITQRKFDNLTKAERGGLSELDKAGFIKRQLVETRQITKHVAQILDSRMNTKYDENDKLIREVKVITLKSKLVSDFRKDFQFYKVREINNYHHAHDAYLNAVVGTALIKKYPKLESEFVYGDYKVYDVRKMIAKSEQEIGKATAKYFFYSNIMNFFKTEITLANGEIRKRPLIETNGETGEIVWDKGRDFATVRKVLSMPQVNIVKKTEVQTGGFSKESILPKRNSDKLIARKKDWDPKKYGGFDSPTVAYSVLVVAKVEKGKSKKLKSVKELLGITIMERSSFEKNPIDFLEAKGYKEVKKDLIIKLPKYSLFELENGRKRMLASAGELQKGNELALPSKYVNFLYLASHYEKLKGSPEDNEQKQLFVEQHKHYLDEIIEQISEFSKRVILADANLDKVLSAYNKHRDKPIREQAENIIHLFTLTNLGAPAAFKYFDTTIDRKRYTSTKEVLDATLIHQSITGLYETRIDLSQLGGDGGPAPGGSGGTLNLEDEYRLYETSAEPEVSPGSTWLSDFPQAWAETGGMGLAVRQAPLIIPLKATSTPVSIKQYPMSQEAKLGIKPHIQRLLDQGILVPCQSPWNTPLLPVKKPGTNDYRPVQDLREVNKRVEDIHPTVPNPYNLLSGLPPSHRWYTVLDLKDAFFCLRLHPTSQPLFAFEWRDPGMGISGQLTWTRLPQGFKNSPTLFNEALHRDLADFRIQHPDLILLQYVDDILLAATSELDCQQGTRALLLTLGNLGYRASAKKAQLCQKQVKYLGYLLKEGQRWLTEARKETVMGQPTPKTPRQLREFLGKAGFCRLFIPGFAEMAAPLYPLTKPGTLFNWGPDQQKAYQEIKQALLTAPALGLPDLTKPFELFVDEKQGYAKGVLTQKLGPWRRPVAYLSKKLDPVAAGWPPCLRMVAAIAVLRKDAGKLTMGQPLVILAPHAVEALVKQPPDRWLSNARMTHYQAMLLDTDRVQFGPVVALNPATLLPLPEEGAPHDCLEILAETHGTRPDLTDQPIPDADHTWYTDGSSFLQEGQRKAGAAVTTETEVIWARALPAGTSAQRAELIALTQALKMAEGKRLNVYTDSRYAFATAHIHGEIYRRRGWLTSEGREIKNKSEILALLKALFLPKRLSIIHCLGHQKGDSAEARGNRLADQAAREAAIKTPPDTSTLLAGKRTADGSEFEKRTADGSEFESPKKKAKVE

SEQ ID NO: 6656 - protein, 2082 aa, synthetic construct
MPAAKRVKLDGGDKKYSIGLDIGTNSVGWAVITDEYKVPSKKFKVLGNTDRHSIKKNLIGALLFDSGETAEATRLKRTARRRYTRRKNRICYLQEIFSNEMAKVDDSFFHRLEESFLVEEDKKHERHPIFGNIVDEVAYHEKYPTIYHLRKKLVDSTDKADLRLIYLALAHMIKFRGHFLIEGDLNPDNSDVDKLFIQLVQTYNQLFEENPINASGVDAKAILSARLSKSRRLENLIAQLPGEKKNGLFGNLIALSLGLTPNFKSNFDLAEDAKLQLSKDTYDDDLDNLLAQIGDQYADLFLAAKNLSDAILLSDILRVNTEITKAPLSASMIKRYDEHHQDLTLLKALVRQQLPEKYKEIFFDQSKNGYAGYIDGGASQEEFYKFIKPILEKMDGTEELLVKLNREDLLRKQRTFDNGSIPHQIHLGELHAILRRQEDFYPFLKDNREKIEKILTFRIPYYVGPLARGNSRFAWMTRKSEETITPWNFEEVVDKGASAQSFIERMTNFDKNLPNEKVLPKHSLLYEYFTVYNELTKVKYVTEGMRKPAFLSGEQKKAIVDLLFKTNRKVTVKQLKEDYFKKIECFDSVEISGVEDRFNASLGTYHDLLKIIKDKDFLDNEENEDILEDIVLTLTLFEDREMIEERLKTYAHLFDDKVMKQLKRRRYTGWGRLSRKLINGIRDKQSGKTILDFLKSDGFANRNFMQLIHDDSLTFKEDIQKAQVSGQGDSLHEHIANLAGSPAIKKGILQTVKVVDELVKVMGRHKPENIVIEMARENQTTQKGQKNSRERMKRIEEGIKELGSQILKEHPVENTQLQNEKLYLYYLQNGRDMYVDQELDINRLSDYDVDHIVPQSFLKDDSIDNKVLTRSDKARGKSDNVPSEEVVKKMKNYWRQLLNAKLITQRKFDNLTKAERGGLSELDKAGFIKRQLVETRQITKHVAQILDSRMNTKYDENDKLIREVKVITLKSKLVSDFRKDFQFYKVREINNYHHAHDAYLNAVVGTALIKKYPKLESEFVYGDYKVYDVRKMIAKSEQEIGKATAKYFFYSNIMNFFKTEITLANGEIRKRPLIETNGETGEIVWDKGRDFATVRKVLSMPQVNIVKKTEVQTGGFSKESILPKRNSDKLIARKKDWDPKKYGGFDSPTVAYSVLVVAKVEKGKSKKLKSVKELLGITIMERSSFEKNPIDFLEAKGYKEVKKDLIIKLPKYSLFELENGRKRMLASAGELQKGNELALPSKYVNFLYLASHYEKLKGSPEDNEQKQLFVEQHKHYLDEIIEQISEFSKRVILADANLDKVLSAYNKHRDKPIREQAENIIHLFTLTNLGAPAAFKYFDTTIDRKRYTSTKEVLDATLIHQSITGLYETRIDLSQLGGDGGPAPGGSGGIPWLMKKPLQLTTLVPLQEYEERLLKQTMLTGSYKEKLQSLFLKYDALWQHWENQVGHRRIKPHHIATGTVNPRPQKQYPINPKAKASIQTVINDLLKQGVLIQQNSIMNTPVYPVPKPDGKWRMVLDYREVNKTIPLIAAQNQHSAGILSSIFRGKYKTTLDLSNGFWAHSITPESYWLTAFTWLGQQYCWTRLPQGFLNSPALFNADVVDLLKEVPNVQVYVDDIYISHDDPREHLEQLEKVFSLLLNAGYVVSLKKSEIAQHEVEFLGFNITKEGRGLTETFKQKLLNITPPRDLKQLQSILGKLNFARNFIPNFSELVKPLYNIIATAPGKYITWTTDNSQQLQNIISMLNSAENLEERNPEVRLIMKVNTSPSAGYIRFYNEFAKRPIMYLNYVYTKAEVKFTNTEKLLTTIHKGLIKALDLGMGQEILVYSPIVSMTKIQKTPLPERKALPIRWITWMSYLEDPRIQFHYDKTLPELQQVPTVTDDIIAKIKHPSEFSMVFYTDGSAIKHPNVNKSHNAGMGIAQVQFKPEFTVINTWSIPLGDHTAQLAEVAAVEFACKKALKIDGPVLIVTDSFYVAESVNKELPYWQSNGFFNNKKKPLKHVSKWKSIADCIQLKPDIIIIHEKGHQPTASTFHTEGNNLADKLATQGSYVVNAGKRTADGSEFEKRTADGSEFESPKKKAKVE

SEQ ID NO: 6657 - protein, 2089 aa, synthetic construct
MPAAKRVKLDGGDKKYSIGLDIGTNSVGWAVITDEYKVPSKKFKVLGNTDRHSIKKNLIGALLFDSGETAEATRLKRTARRRYTRRKNRICYLQEIFSNEMAKVDDSFFHRLEESFLVEEDKKHERHPIFGNIVDEVAYHEKYPTIYHLRKKLVDSTDKADLRLIYLALAHMIKFRGHFLIEGDLNPDNSDVDKLFIQLVQTYNQLFEENPINASGVDAKAILSARLSKSRRLENLIAQLPGEKKNGLFGNLIALSLGLTPNFKSNFDLAEDAKLQLSKDTYDDDLDNLLAQIGDQYADLFLAAKNLSDAILLSDILRVNTEITKAPLSASMIKRYDEHHQDLTLLKALVRQQLPEKYKEIFFDQSKNGYAGYIDGGASQEEFYKFIKPILEKMDGTEELLVKLNREDLLRKQRTFDNGSIPHQIHLGELHAILRRQEDFYPFLKDNREKIEKILTFRIPYYVGPLARGNSRFAWMTRKSEETITPWNFEEVVDKGASAQSFIERMTNFDKNLPNEKVLPKHSLLYEYFTVYNELTKVKYVTEGMRKPAFLSGEQKKAIVDLLFKTNRKVTVKQLKEDYFKKIECFDSVEISGVEDRFNASLGTYHDLLKIIKDKDFLDNEENEDILEDIVLTLTLFEDREMIEERLKTYAHLFDDKVMKQLKRRRYTGWGRLSRKLINGIRDKQSGKTILDFLKSDGFANRNFMQLIHDDSLTFKEDIQKAQVSGQGDSLHEHIANLAGSPAIKKGILQTVKVVDELVKVMGRHKPENIVIEMARENQTTQKGQKNSRERMKRIEEGIKELGSQILKEHPVENTQLQNEKLYLYYLQNGRDMYVDQELDINRLSDYDVDHIVPQSFLKDDSIDNKVLTRSDKARGKSDNVPSEEVVKKMKNYWRQLLNAKLITQRKFDNLTKAERGGLSELDKAGFIKRQLVETRQITKHVAQILDSRMNTKYDENDKLIREVKVITLKSKLVSDFRKDFQFYKVREINNYHHAHDAYLNAVVGTALIKKYPKLESEFVYGDYKVYDVRKMIAKSEQEIGKATAKYFFYSNIMNFFKTEITLANGEIRKRPLIETNGETGEIVWDKGRDFATVRKVLSMPQVNIVKKTEVQTGGFSKESILPKRNSDKLIARKKDWDPKKYGGFDSPTVAYSVLVVAKVEKGKSKKLKSVKELLGITIMERSSFEKNPIDFLEAKGYKEVKKDLIIKLPKYSLFELENGRKRMLASAGELQKGNELALPSKYVNFLYLASHYEKLKGSPEDNEQKQLFVEQHKHYLDEIIEQISEFSKRVILADANLDKVLSAYNKHRDKPIREQAENIIHLFTLTNLGAPAAFKYFDTTIDRKRYTSTKEVLDATLIHQSITGLYETRIDLSQLGGDGGPAPGGSGGVLNLEEEYRLHEKPVPSSIDPSWLQLFPTVWAERAGMGLANQVPPVVVELRSGASPVAVRQYPMSKEAREGIRPHIQRFLDLGVLVPCQSPWNTPLLPVKKPGTNDYRPVQDLREINKRVQDIHPTVPNPYNLLSSLPPSHTWYSVLDLKDAFFCLKLHPNSQPLFAFEWRDPEKGNTGQLTWTRLPQGFKNSPTLFNEALHRDLAPFRALNPQVVLLQYVDDLLVAAPTYRDCKEGTQKLLQELSKLGYRVSAKKAQLCQKEVTYLGYLLKEGKRWLTPARKATVMKIPPPTTPRQVREFLGTAGFCRLWIPGFASLAAPLYPLTKPSIPFIWTEEHQKAFDRIKEALLSAPALALPDLTKPFTLYVDERAGVARGVLTQTLGPWRRPVAYLSKKLDPVASGWPTCLKAVAAVALLLKDADKLTLGQNVTVIASHSLESIVRQPPDRWMTNARMTHYQSLLLNERVSFAPPAVLNPATLLPVESEATPVHRCSEILAEETGTRRDLKDQPLPGVPAWYTDGSSFIAEGKRRAGAAIVDGKRTVWASSLPEGTSAQKAELVALTQALRLAEGKDINIYTDSRYAFATAHIHGAIYKQRGWLTSAGKDIKNKEEILALLEAIHLPKRVAIIHCPGHQKGNDPVATGNRRADEAAKQAALSTRVLAETTKPAGKRTADGSEFEKRTADGSEFESPKKKAKVE

SEQ ID NO: 6658 - protein, 2091 aa, synthetic construct
MPAAKRVKLDGGDKKYSIGLDIGTNSVGWAVITDEYKVPSKKFKVLGNTDRHSIKKNLIGALLFDSGETAEATRLKRTARRRYTRRKNRICYLQEIFSNEMAKVDDSFFHRLEESFLVEEDKKHERHPIFGNIVDEVAYHEKYPTIYHLRKKLVDSTDKADLRLIYLALAHMIKFRGHFLIEGDLNPDNSDVDKLFIQLVQTYNQLFEENPINASGVDAKAILSARLSKSRRLENLIAQLPGEKKNGLFGNLIALSLGLTPNFKSNFDLAEDAKLQLSKDTYDDDLDNLLAQIGDQYADLFLAAKNLSDAILLSDILRVNTEITKAPLSASMIKRYDEHHQDLTLLKALVRQQLPEKYKEIFFDQSKNGYAGYIDGGASQEEFYKFIKPILEKMDGTEELLVKLNREDLLRKQRTFDNGSIPHQIHLGELHAILRRQEDFYPFLKDNREKIEKILTFRIPYYVGPLARGNSRFAWMTRKSEETITPWNFEEVVDKGASAQSFIERMTNFDKNLPNEKVLPKHSLLYEYFTVYNELTKVKYVTEGMRKPAFLSGEQKKAIVDLLFKTNRKVTVKQLKEDYFKKIECFDSVEISGVEDRFNASLGTYHDLLKIIKDKDFLDNEENEDILEDIVLTLTLFEDREMIEERLKTYAHLFDDKVMKQLKRRRYTGWGRLSRKLINGIRDKQSGKTILDFLKSDGFANRNFMQLIHDDSLTFKEDIQKAQVSGQGDSLHEHIANLAGSPAIKKGILQTVKVVDELVKVMGRHKPENIVIEMARENQTTQKGQKNSRERMKRIEEGIKELGSQILKEHPVENTQLQNEKLYLYYLQNGRDMYVDQELDINRLSDYDVDHIVPQSFLKDDSIDNKVLTRSDKARGKSDNVPSEEVVKKMKNYWRQLLNAKLITQRKFDNLTKAERGGLSELDKAGFIKRQLVETRQITKHVAQILDSRMNTKYDENDKLIREVKVITLKSKLVSDFRKDFQFYKVREINNYHHAHDAYLNAVVGTALIKKYPKLESEFVYGDYKVYDVRKMIAKSEQEIGKATAKYFFYSNIMNFFKTEITLANGEIRKRPLIETNGETGEIVWDKGRDFATVRKVLSMPQVNIVKKTEVQTGGFSKESILPKRNSDKLIARKKDWDPKKYGGFDSPTVAYSVLVVAKVEKGKSKKLKSVKELLGITIMERSSFEKNPIDFLEAKGYKEVKKDLIIKLPKYSLFELENGRKRMLASAGELQKGNELALPSKYVNFLYLASHYEKLKGSPEDNEQKQLFVEQHKHYLDEIIEQISEFSKRVILADANLDKVLSAYNKHRDKPIREQAENIIHLFTLTNLGAPAAFKYFDTTIDRKRYTSTKEVLDATLIHQSITGLYETRIDLSQLGGDGGPAPGGSGGTLNIEDEYRLHETSKEPDVPLGSTWLSDFPQAWAETGGMGLAVRQAPLIIPLKATSTPVSIKQYPMSQEARLGIKPHIQRLLDQGILVPCQSPWNTPLLPVKKPGTNDYRPVQDLREVNKRVEDIHPTVPNPYNLLSGLPPSHQWYTVLDLKDAFFCLRLHPTSQPLFAFEWRDPEMGISGQLTWTRLPQGFKNSPTLFNEALHRDLADFRIQHPDLILLQYVDDLLLAATSEQDCQRGTRALLQTLGNLGYRASAKKAQICQKQVKYLGYLLKEGQRWLTEARKETVMGQPTPKTPRQLREFLGTAGFCRLWIPGFAEMAAPLYPLTKPGTLFNWGPDQQKAYQEIKQALLTAPALGLPDLTKPFELFVDEKQGYAKGVLTQKLGPWRRPVAYLSKKLDPVAAGWPPCLRMVAAIAVLTKDAGKLTMGQPLVILAPHAVEALVKQPPDRWLSNARMTHYQAMLLDTDRVQFGPVVALNPATLLPLPEKEAPHDCLEILAETHGTRPDLTDQPIPDADYTWYTDGSSFLQEGQRRAGAAVTTETEVIWARALPAGTSAQRAELIALTQALKMAEGKKLNVYTDSRYAFATAHVHGEIYRRRGWLTSEGREIKNKNEILALLKALFLPKRLSIIHCPGHQKGNSAEARGNRMADQAAREAAMKAVLETSTLLAGKRTADGSEFEKRTADGSEFESPKKKAKVE

SEQ ID NO: 6659 - protein, 2093 aa, synthetic construct
MPAAKRVKLDGGDKKYSIGLDIGTNSVGWAVITDEYKVPSKKFKVLGNTDRHSIKKNLIGALLFDSGETAEATRLKRTARRRYTRRKNRICYLQEIFSNEMAKVDDSFFHRLEESFLVEEDKKHERHPIFGNIVDEVAYHEKYPTIYHLRKKLVDSTDKADLRLIYLALAHMIKFRGHFLIEGDLNPDNSDVDKLFIQLVQTYNQLFEENPINASGVDAKAILSARLSKSRRLENLIAQLPGEKKNGLFGNLIALSLGLTPNFKSNFDLAEDAKLQLSKDTYDDDLDNLLAQIGDQYADLFLAAKNLSDAILLSDILRVNTEITKAPLSASMIKRYDEHHQDLTLLKALVRQQLPEKYKEIFFDQSKNGYAGYIDGGASQEEFYKFIKPILEKMDGTEELLVKLNREDLLRKQRTFDNGSIPHQIHLGELHAILRRQEDFYPFLKDNREKIEKILTFRIPYYVGPLARGNSRFAWMTRKSEETITPWNFEEVVDKGASAQSFIERMTNFDKNLPNEKVLPKHSLLYEYFTVYNELTKVKYVTEGMRKPAFLSGEQKKAIVDLLFKTNRKVTVKQLKEDYFKKIECFDSVEISGVEDRFNASLGTYHDLLKIIKDKDFLDNEENEDILEDIVLTLTLFEDREMIEERLKTYAHLFDDKVMKQLKRRRYTGWGRLSRKLINGIRDKQSGKTILDFLKSDGFANRNFMQLIHDDSLTFKEDIQKAQVSGQGDSLHEHIANLAGSPAIKKGILQTVKVVDELVKVMGRHKPENIVIEMARENQTTQKGQKNSRERMKRIEEGIKELGSQILKEHPVENTQLQNEKLYLYYLQNGRDMYVDQELDINRLSDYDVDHIVPQSFLKDDSIDNKVLTRSDKARGKSDNVPSEEVVKKMKNYWRQLLNAKLITQRKFDNLTKAERGGLSELDKAGFIKRQLVETRQITKHVAQILDSRMNTKYDENDKLIREVKVITLKSKLVSDFRKDFQFYKVREINNYHHAHDAYLNAVVGTALIKKYPKLESEFVYGDYKVYDVRKMIAKSEQEIGKATAKYFFYSNIMNFFKTEITLANGEIRKRPLIETNGETGEIVWDKGRDFATVRKVLSMPQVNIVKKTEVQTGGFSKESILPKRNSDKLIARKKDWDPKKYGGFDSPTVAYSVLVVAKVEKGKSKKLKSVKELLGITIMERSSFEKNPIDFLEAKGYKEVKKDLIIKLPKYSLFELENGRKRMLASAGELQKGNELALPSKYVNFLYLASHYEKLKGSPEDNEQKQLFVEQHKHYLDEIIEQISEFSKRVILADANLDKVLSAYNKHRDKPIREQAENIIHLFTLTNLGAPAAFKYFDTTIDRKRYTSTKEVLDATLIHQSITGLYETRIDLSQLGGDGGGGGGSSGGTAPLEEEYRLFLEAPIQNVTLLEQWKREIPKVWAEINPPGLASTQAPIHVQLLSTALPVRVRQYPITLEAKRSLRETIRKFRAAGILRPVHSPWNTPLLPVRKSGTSEYRMVQDLREVNKRVETIHPTVPNPYTLLSLLPPDRIWYSVLDLKDAFFCIPLAPESQLIFAFEWADAEEGESGQLTWTRLPQGFKNSPTLFNEALNRDLQGFRLDHPSVSLLQYVDDLLIAADTQAACLSATRDLLMTLAELGYRVSGKKAQLCQEEVTYLGFKIHKGSRSLSNSRTQAILQIPVPKTKRQVREFLGTIGYCRLWIPGFAELAQPLYAATRPGNDPLVWGEKEEEAFQSLKLALTQPPALALPSLDKPFQLFVEETSGAAKGVLTQALGPWKRPVAYLSKRLDPVAAGWPRCLRAIAAAALLTREASKLTFGQDIEITSSHNLESLLRSPPDKWLTNARITQYQVLLLDPPRVRFKQTAALNPATLLPETDDTLPIHHCLDTLDSLTSTRPDLTDQPLAQAEATLFTDGSSYIRDGKRYAGAAVVTLDSVIWAEPLPIGTSAQKAELIALTKALEWSKDKSVNIYTDSRYAFATLHVHGMIYRERGWLTAGGKAIKNAPEILALLTAVWLPKRVAVMHCKGHQKDDAPTSTGNRRADEVAREVAIRPLSTQATISAGKRTADGSEFEKRTADGSEFESPKKKAKVE

SEQ ID NO: 6660 - protein, 2082 aa, synthetic construct
MPAAKRVKLDGGDKKYSIGLDIGTNSVGWAVITDEYKVPSKKFKVLGNTDRHSIKKNLIGALLFDSGETAEATRLKRTARRRYTRRKNRICYLQEIFSNEMAKVDDSFFHRLEESFLVEEDKKHERHPIFGNIVDEVAYHEKYPTIYHLRKKLVDSTDKADLRLIYLALAHMIKFRGHFLIEGDLNPDNSDVDKLFIQLVQTYNQLFEENPINASGVDAKAILSARLSKSRRLENLIAQLPGEKKNGLFGNLIALSLGLTPNFKSNFDLAEDAKLQLSKDTYDDDLDNLLAQIGDQYADLFLAAKNLSDAILLSDILRVNTEITKAPLSASMIKRYDEHHQDLTLLKALVRQQLPEKYKEIFFDQSKNGYAGYIDGGASQEEFYKFIKPILEKMDGTEELLVKLNREDLLRKQRTFDNGSIPHQIHLGELHAILRRQEDFYPFLKDNREKIEKILTFRIPYYVGPLARGNSRFAWMTRKSEETITPWNFEEVVDKGASAQSFIERMTNFDKNLPNEKVLPKHSLLYEYFTVYNELTKVKYVTEGMRKPAFLSGEQKKAIVDLLFKTNRKVTVKQLKEDYFKKIECFDSVEISGVEDRFNASLGTYHDLLKIIKDKDFLDNEENEDILEDIVLTLTLFEDREMIEERLKTYAHLFDDKVMKQLKRRRYTGWGRLSRKLINGIRDKQSGKTILDFLKSDGFANRNFMQLIHDDSLTFKEDIQKAQVSGQGDSLHEHIANLAGSPAIKKGILQTVKVVDELVKVMGRHKPENIVIEMARENQTTQKGQKNSRERMKRIEEGIKELGSQILKEHPVENTQLQNEKLYLYYLQNGRDMYVDQELDINRLSDYDVDHIVPQSFLKDDSIDNKVLTRSDKARGKSDNVPSEEVVKKMKNYWRQLLNAKLITQRKFDNLTKAERGGLSELDKAGFIKRQLVETRQITKHVAQILDSRMNTKYDENDKLIREVKVITLKSKLVSDFRKDFQFYKVREINNYHHAHDAYLNAVVGTALIKKYPKLESEFVYGDYKVYDVRKMIAKSEQEIGKATAKYFFYSNIMNFFKTEITLANGEIRKRPLIETNGETGEIVWDKGRDFATVRKVLSMPQVNIVKKTEVQTGGFSKESILPKRNSDKLIARKKDWDPKKYGGFDSPTVAYSVLVVAKVEKGKSKKLKSVKELLGITIMERSSFEKNPIDFLEAKGYKEVKKDLIIKLPKYSLFELENGRKRMLASAGELQKGNELALPSKYVNFLYLASHYEKLKGSPEDNEQKQLFVEQHKHYLDEIIEQISEFSKRVILADANLDKVLSAYNKHRDKPIREQAENIIHLFTLTNLGAPAAFKYFDTTIDRKRYTSTKEVLDATLIHQSITGLYETRIDLSQLGGDGGGGGGSSGGVPWILKKPLELTIKLDLEEQQGTLLNNSILSKKGKEELKQLFEKYSALWQSWENQVGHRRIRPHKIATGTVKPTPQKQYHINPKAKPDIQIVINDLLKQGVLIQKESTMNTPVYPVPKPNGRWRMVLDYRAVNKVTPLIAVQNQHSYGILGSLFKGRYKTTIDLSNGFWAHPIVPEDYWITAFTWQGKQYCWTVLPQGFLNSPGLFTGDVVDLLQGIPNVEVYVDDVYISHDSEKEHLEYLDILFNRLKEAGYIISLKKSNIANSIVDFLGFQITNEGRGLTDTFKEKLENITAPTTLKQLQSILGLLNFARNFIPDFTELIAPLYALIPKSTKNYVPWQIEHSTTLETLITKLNGAEYLQGRKGDKTLIMKVNASYTTGYIRYYNEGEKKPISYVSIVFSKTELKFTELEKLLTTVHKGLLKALDLSMGQNIHVYSPIVSMQNIQKTPQTAKKALASRWLSWLSYLEDPRIRFFYDPQMPALKDLPAVDTGKDNKKHPSNFQHIFYTDGSAITSPTKEGHLNAGMGIVYFINKDGNLQKQQEWSISLGNHTAQFAEIAAFEFALKKCLPLGGNILVVTDSNYVAKAYNEELDVWASNGFVNNRKKPLKHISKWKSVADLKRLRPDVVVTHEPGHQKLDSSPHAYGNNLADQLATQASFKVHAGKRTADGSEFEKRTADGSEFESPKKKAKVE

SEQ ID NO: 6661 - protein, 2091 aa, synthetic construct
MPAAKRVKLDGGDKKYSIGLDIGTNSVGWAVITDEYKVPSKKFKVLGNTDRHSIKKNLIGALLFDSGETAEATRLKRTARRRYTRRKNRICYLQEIFSNEMAKVDDSFFHRLEESFLVEEDKKHERHPIFGNIVDEVAYHEKYPTIYHLRKKLVDSTDKADLRLIYLALAHMIKFRGHFLIEGDLNPDNSDVDKLFIQLVQTYNQLFEENPINASGVDAKAILSARLSKSRRLENLIAQLPGEKKNGLFGNLIALSLGLTPNFKSNFDLAEDAKLQLSKDTYDDDLDNLLAQIGDQYADLFLAAKNLSDAILLSDILRVNTEITKAPLSASMIKRYDEHHQDLTLLKALVRQQLPEKYKEIFFDQSKNGYAGYIDGGASQEEFYKFIKPILEKMDGTEELLVKLNREDLLRKQRTFDNGSIPHQIHLGELHAILRRQEDFYPFLKDNREKIEKILTFRIPYYVGPLARGNSRFAWMTRKSEETITPWNFEEVVDKGASAQSFIERMTNFDKNLPNEKVLPKHSLLYEYFTVYNELTKVKYVTEGMRKPAFLSGEQKKAIVDLLFKTNRKVTVKQLKEDYFKKIECFDSVEISGVEDRFNASLGTYHDLLKIIKDKDFLDNEENEDILEDIVLTLTLFEDREMIEERLKTYAHLFDDKVMKQLKRRRYTGWGRLSRKLINGIRDKQSGKTILDFLKSDGFANRNFMQLIHDDSLTFKEDIQKAQVSGQGDSLHEHIANLAGSPAIKKGILQTVKVVDELVKVMGRHKPENIVIEMARENQTTQKGQKNSRERMKRIEEGIKELGSQILKEHPVENTQLQNEKLYLYYLQNGRDMYVDQELDINRLSDYDVDHIVPQSFLKDDSIDNKVLTRSDKARGKSDNVPSEEVVKKMKNYWRQLLNAKLITQRKFDNLTKAERGGLSELDKAGFIKRQLVETRQITKHVAQILDSRMNTKYDENDKLIREVKVITLKSKLVSDFRKDFQFYKVREINNYHHAHDAYLNAVVGTALIKKYPKLESEFVYGDYKVYDVRKMIAKSEQEIGKATAKYFFYSNIMNFFKTEITLANGEIRKRPLIETNGETGEIVWDKGRDFATVRKVLSMPQVNIVKKTEVQTGGFSKESILPKRNSDKLIARKKDWDPKKYGGFDSPTVAYSVLVVAKVEKGKSKKLKSVKELLGITIMERSSFEKNPIDFLEAKGYKEVKKDLIIKLPKYSLFELENGRKRMLASAGELQKGNELALPSKYVNFLYLASHYEKLKGSPEDNEQKQLFVEQHKHYLDEIIEQISEFSKRVILADANLDKVLSAYNKHRDKPIREQAENIIHLFTLTNLGAPAAFKYFDTTIDRKRYTSTKEVLDATLIHQSITGLYETRIDLSQLGGDGGGGGGSSGGTLGIEDEYRLHETSTEPDVSLGSTWLSDFPQAWAETGGMGLAVRQAPLIIPLKATSTPVSIQQYPMSHEARLGIKPHIQRLLDQGILVPCQSPWNTPLLPVKKPGTNDYRPVQDLREVNKRVEDIHPTVPNPYNLLSGLPPSHQWYTVLDLKDAFFCLRLHPTSQPLFAFEWRDPGMGISGQLTWTRLPQGFKNSPTLFDEALHRDLADFRIQHPDLILLQYVDDILLAATSELDCQQGTRALLQTLGDLGYRASAKKAQICQKQVKYLGYLLREGQRWLTEARKETVMGQPVPKTPRQLREFLGTAGFCRLWIPGFAEMAAPLYPLTKTGTLFSWGPDQQKAYQEIKQALLTAPALGLPDLTKPFELFVDEKQGYAKGVLTQKLGPWRRPVAYLSKKLDPVAAGWPPCLRMVAAIAVLTKDAGKLTMGQPLVILAPHAVEALVKQPPDRWLSNARMTHYQAMLLDTDRVQFGPVVALNPATLLPLPEEGAPHDCLEILAETHGTRPDLTDQPIPDADHTWYTDGSSFLQEGQRKAGAAVTTETEVIWAGALPAGTSAQRAELIALTQALKMAEGKRLNVYTDSRYAFATAHIHGEIYRRRGLLTSEGREIKNKSEILALLKALFLPKRLSIIHCLGHQKGDSAEARGNRLADQAAREAAIKTPPDTSTLLAGKRTADGSEFEKRTADGSEFESPKKKAKVE

SEQ ID NO: 6662 - protein, 2091 aa, synthetic construct
MPAAKRVKLDGGDKKYSIGLDIGTNSVGWAVITDEYKVPSKKFKVLGNTDRHSIKKNLIGALLFDSGETAEATRLKRTARRRYTRRKNRICYLQEIFSNEMAKVDDSFFHRLEESFLVEEDKKHERHPIFGNIVDEVAYHEKYPTIYHLRKKLVDSTDKADLRLIYLALAHMIKFRGHFLIEGDLNPDNSDVDKLFIQLVQTYNQLFEENPINASGVDAKAILSARLSKSRRLENLIAQLPGEKKNGLFGNLIALSLGLTPNFKSNFDLAEDAKLQLSKDTYDDDLDNLLAQIGDQYADLFLAAKNLSDAILLSDILRVNTEITKAPLSASMIKRYDEHHQDLTLLKALVRQQLPEKYKEIFFDQSKNGYAGYIDGGASQEEFYKFIKPILEKMDGTEELLVKLNREDLLRKQRTFDNGSIPHQIHLGELHAILRRQEDFYPFLKDNREKIEKILTFRIPYYVGPLARGNSRFAWMTRKSEETITPWNFEEVVDKGASAQSFIERMTNFDKNLPNEKVLPKHSLLYEYFTVYNELTKVKYVTEGMRKPAFLSGEQKKAIVDLLFKTNRKVTVKQLKEDYFKKIECFDSVEISGVEDRFNASLGTYHDLLKIIKDKDFLDNEENEDILEDIVLTLTLFEDREMIEERLKTYAHLFDDKVMKQLKRRRYTGWGRLSRKLINGIRDKQSGKTILDFLKSDGFANRNFMQLIHDDSLTFKEDIQKAQVSGQGDSLHEHIANLAGSPAIKKGILQTVKVVDELVKVMGRHKPENIVIEMARENQTTQKGQKNSRERMKRIEEGIKELGSQILKEHPVENTQLQNEKLYLYYLQNGRDMYVDQELDINRLSDYDVDHIVPQSFLKDDSIDNKVLTRSDKARGKSDNVPSEEVVKKMKNYWRQLLNAKLITQRKFDNLTKAERGGLSELDKAGFIKRQLVETRQITKHVAQILDSRMNTKYDENDKLIREVKVITLKSKLVSDFRKDFQFYKVREINNYHHAHDAYLNAVVGTALIKKYPKLESEFVYGDYKVYDVRKMIAKSEQEIGKATAKYFFYSNIMNFFKTEITLANGEIRKRPLIETNGETGEIVWDKGRDFATVRKVLSMPQVNIVKKTEVQTGGFSKESILPKRNSDKLIARKKDWDPKKYGGFDSPTVAYSVLVVAKVEKGKSKKLKSVKELLGITIMERSSFEKNPIDFLEAKGYKEVKKDLIIKLPKYSLFELENGRKRMLASAGELQKGNELALPSKYVNFLYLASHYEKLKGSPEDNEQKQLFVEQHKHYLDEIIEQISEFSKRVILADANLDKVLSAYNKHRDKPIREQAENIIHLFTLTNLGAPAAFKYFDTTIDRKRYTSTKEVLDATLIHQSITGLYETRIDLSQLGGDGGGGGGSSGGTLNIEDEYRLHETSKEPDVSLGSTWLSDFPQAWAETGGMGLAVRQAPLIIPLKATSTPVSIKQYPMSQEARLGIKPHIQRLLDQGILVPCQSPWNTPLLPVKKPGTNDYRPVQDLREVNKRVEDIHPTVPNPYNLLSGLPPSHQWYTVLDLKDAFFCLRLHPTSQPLFAFEWRDPEMGISGQLTWTRLPQGFKNSPTLFNEALHRDLAGFRIQHPDLILLQYVDDLLLAATSELDCQQGTRALLQTLGDLGYRASAKKAQICQKQVKYLGYLLKEGQRWLTEARKETVMGQPIPKTPRQLREFLGTAGFCRLWIPGFAEMAAPLYPLTKPGTLFNWGPDQQKAFQEIKQALLTAPALGLPDLTKPFELFVDEKQGYAKGVLTQKLGPWRRPVAYLSKKLDPVAAGWPPCLRMVAAIAVLTKDAGKLTMGQPLVILAPHAVEALVKQPPDRWLSNARMTHYQALLLDTDRVQFGPVVALNPATLLPLPEEGLQHDCLDILAEAHGTRSDLMDQPLPDADHTWYTDGSSFLQEGQRKAGAAVTTETEVIWARALPAGTSAQRAELIALTQALKMAEGKKLNVYTDSRYAFATAHIHGEIYRRRGWLTSEGKEIKNKDEILALLKALFLPKRLSIIHCPGHQKGNSAEARGNRMADQAAREVATRETPETSTLLAGKRTADGSEFEKRTADGSEFESPKKKAKVE

SEQ ID NO: 6663 - protein, 2091 aa, synthetic construct
MPAAKRVKLDGGDKKYSIGLDIGTNSVGWAVITDEYKVPSKKFKVLGNTDRHSIKKNLIGALLFDSGETAEATRLKRTARRRYTRRKNRICYLQEIFSNEMAKVDDSFFHRLEESFLVEEDKKHERHPIFGNIVDEVAYHEKYPTIYHLRKKLVDSTDKADLRLIYLALAHMIKFRGHFLIEGDLNPDNSDVDKLFIQLVQTYNQLFEENPINASGVDAKAILSARLSKSRRLENLIAQLPGEKKNGLFGNLIALSLGLTPNFKSNFDLAEDAKLQLSKDTYDDDLDNLLAQIGDQYADLFLAAKNLSDAILLSDILRVNTEITKAPLSASMIKRYDEHHQDLTLLKALVRQQLPEKYKEIFFDQSKNGYAGYIDGGASQEEFYKFIKPILEKMDGTEELLVKLNREDLLRKQRTFDNGSIPHQIHLGELHAILRRQEDFYPFLKDNREKIEKILTFRIPYYVGPLARGNSRFAWMTRKSEETITPWNFEEVVDKGASAQSFIERMTNFDKNLPNEKVLPKHSLLYEYFTVYNELTKVKYVTEGMRKPAFLSGEQKKAIVDLLFKTNRKVTVKQLKEDYFKKIECFDSVEISGVEDRFNASLGTYHDLLKIIKDKDFLDNEENEDILEDIVLTLTLFEDREMIEERLKTYAHLFDDKVMKQLKRRRYTGWGRLSRKLINGIRDKQSGKTILDFLKSDGFANRNFMQLIHDDSLTFKEDIQKAQVSGQGDSLHEHIANLAGSPAIKKGILQTVKVVDELVKVMGRHKPENIVIEMARENQTTQKGQKNSRERMKRIEEGIKELGSQILKEHPVENTQLQNEKLYLYYLQNGRDMYVDQELDINRLSDYDVDHIVPQSFLKDDSIDNKVLTRSDKARGKSDNVPSEEVVKKMKNYWRQLLNAKLITQRKFDNLTKAERGGLSELDKAGFIKRQLVETRQITKHVAQILDSRMNTKYDENDKLIREVKVITLKSKLVSDFRKDFQFYKVREINNYHHAHDAYLNAVVGTALIKKYPKLESEFVYGDYKVYDVRKMIAKSEQEIGKATAKYFFYSNIMNFFKTEITLANGEIRKRPLIETNGETGEIVWDKGRDFATVRKVLSMPQVNIVKKTEVQTGGFSKESILPKRNSDKLIARKKDWDPKKYGGFDSPTVAYSVLVVAKVEKGKSKKLKSVKELLGITIMERSSFEKNPIDFLEAKGYKEVKKDLIIKLPKYSLFELENGRKRMLASAGELQKGNELALPSKYVNFLYLASHYEKLKGSPEDNEQKQLFVEQHKHYLDEIIEQISEFSKRVILADANLDKVLSAYNKHRDKPIREQAENIIHLFTLTNLGAPAAFKYFDTTIDRKRYTSTKEVLDATLIHQSITGLYETRIDLSQLGGDGGGGGGSSGGTLNIEDEHRLHETSKEPDVSLGSTWLSDFPQAWAETGGMGLAVRQAPLIIPLKATSTPVSIKQYPMSQEARLGIKPHIQRLLDQGILVPCQSPWNTPLLPVKKPGTNDYRPVQDLREVNKRVEDIHPTVPNPYNLLSGLPPSHQWYTVLDLKDAFFCLRLHPTSQPLFAFEWRDPEMGISGQLTWTRLPQGFKNSPTLFNEALHRDLADFRIQHPDLILLQYVDDLLLAATSELDCQQGTRALLQTLGNLGYRASAKKAQICQKQVKYLGYLLKEGQRWLTEARKETVMGQPTPKTPRQLREFLGTAGFCRLWIPGFAEMAAPLYPLTKPGTLFNWGPDQQKAYQEIKQALLTAPALGLPDLTKPFELFVDEKQGYAKGVLTQKLGPWRRPVAYLSKKLDPVAAGWPPCLRMVAAIAVLTKDAGKLTMGQPLVILAPHAVEALVKQPPDRWLSNARMTHYQALLLDTDRVQFGPVVALNPATLLPLPEEGLQHNCLDILAEAHGTRPDLTDQPLPDADHTWYTDGSSLLQEGQRKAGAAVTTETEVIWAKALPAGTSAQRAELIALTQALKMAEGKKLNVYTDSRYAFATAHIHGEIYRRRGWLTSEGKEIKNKDEILALLKALFLPKRLSIIHCPGHQKGHSAEARGNRMADQAARKAAITETPDTSTLLAGKRTADGSEFEKRTADGSEFESPKKKAKVE

SEQ ID NO: 6664 - protein, 2091 aa, synthetic construct; identical to SEQ ID NO: 6663

SEQ ID NO: 6665 - protein, 2083 aa, synthetic construct
MPAAKRVKLDGGDKKYSIGLDIGTNSVGWAVITDEYKVPSKKFKVLGNTDRHSIKKNLIGALLFDSGETAEATRLKRTARRRYTRRKNRICYLQEIFSNEMAKVDDSFFHRLEESFLVEEDKKHERHPIFGNIVDEVAYHEKYPTIYHLRKKLVDSTDKADLRLIYLALAHMIKFRGHFLIEGDLNPDNSDVDKLFIQLVQTYNQLFEENPINASGVDAKAILSARLSKSRRLENLIAQLPGEKKNGLFGNLIALSLGLTPNFKSNFDLAEDAKLQLSKDTYDDDLDNLLAQIGDQYADLFLAAKNLSDAILLSDILRVNTEITKAPLSASMIKRYDEHHQDLTLLKALVRQQLPEKYKEIFFDQSKNGYAGYIDGGASQEEFYKFIKPILEKMDGTEELLVKLNREDLLRKQRTFDNGSIPHQIHLGELHAILRRQEDFYPFLKDNREKIEKILTFRIPYYVGPLARGNSRFAWMTRKSEETITPWNFEEVVDKGASAQSFIERMTNFDKNLPNEKVLPKHSLLYEYFTVYNELTKVKYVTEGMRKPAFLSGEQKKAIVDLLFKTNRKVTVKQLKEDYFKKIECFDSVEISGVEDRFNASLGTYHDLLKIIKDKDFLDNEENEDILEDIVLTLTLFEDREMIEERLKTYAHLFDDKVMKQLKRRRYTGWGRLSRKLINGIRDKQSGKTILDFLKSDGFANRNFMQLIHDDSLTFKEDIQKAQVSGQGDSLHEHIANLAGSPAIKKGILQTVKVVDELVKVMGRHKPENIVIEMARENQTTQKGQKNSRERMKRIEEGIKELGSQILKEHPVENTQLQNEKLYLYYLQNGRDMYVDQELDINRLSDYDVDHIVPQSFLKDDSIDNKVLTRSDKARGKSDNVPSEEVVKKMKNYWRQLLNAKLITQRKFDNLTKAERGGLSELDKAGFIKRQLVETRQITKHVAQILDSRMNTKYDENDKLIREVKVITLKSKLVSDFRKDFQFYKVREINNYHHAHDAYLNAVVGTALIKKYPKLESEFVYGDYKVYDVRKMIAKSEQEIGKATAKYFFYSNIMNFFKTEITLANGEIRKRPLIETNGETGEIVWDKGRDFATVRKVLSMPQVNIVKKTEVQTGGFSKESILPKRNSDKLIARKKDWDPKKYGGFDSPTVAYSVLVVAKVEKGKSKKLKSVKELLGITIMERSSFEKNPIDFLEAKGYKEVKKDLIIKLPKYSLFELENGRKRMLASAGELQKGNELALPSKYVNFLYLASHYEKLKGSPEDNEQKQLFVEQHKHYLDEIIEQISEFSKRVILADANLDKVLSAYNKHRDKPIREQAENIIHLFTLTNLGAPAAFKYFDTTIDRKRYTSTKEVLDATLIHQSITGLYETRIDLSQLGGDGGGGGGSSGGLDDEYRLYSPLVKPDQNIQFWLEQFPQAWAETAGMGLAKQVPPQVIQLKASATPVSVRQYPLSKEAQEGIRPHVQRLIQQGILVPVQSPWNTPLLPVRKPGTNDYRPVQDLREVNKRVQDIHPTVPNPYNLLCALPPQRSWYTVLDLKDAFFCLRLHPTSQPLFAFEWRDPGTGRTGQLTWTRLPQGFKNSPTIFNEALHRDLANFRIQHPQVTLLQYVDDLLLAGATKQDCLEGTKALLLELSDLGYRASAKKAQICRREVTYLGYSLRDGQRWLTEARKKTVVQIPAPTTAKQVREFLGKAGFCRLFIPGFATLAAPLYPLTKPKGEFSWAPEHQKAFDAIKKALLSAPALALPDVTKPFTLYVDERKGVARGVLTQTLGPWRRPVAYLSKKLDPVASGWPVCLKAIAAVAILVKDADKLTLGQNITVIAPHALENIVRQPPDRWMTNARMTHYQSLLLTERVTFAPPAALNPATLLPEETDEPVTHDCHQLLIEETGVRKDLTDIPLTGEVLTWFTDGSSYVVEGKRMAGAAVVDGTRTIWASSLPEGTSAQKAELMALTQALRLAEGKSINIYTDSRYAFATAHVHGAIYKQRGWLTSAGREIKNKEEILSLLEALHLPKRLAIIHCPGHQKAKDPISRGNQMADRVAKQAAQGVNLLPAGKRTADGSEFEKRTADGSEFESPKKKAKVE

SEQ ID NO: 6666 - protein, 2083 aa, synthetic construct; identical to SEQ ID NO: 6665

SEQ ID NO: 6667 - protein, 2082 aa, synthetic construct
MPAAKRVKLDGGDKKYSIGLDIGTNSVGWAVITDEYKVPSKKFKVLGNTDRHSIKKNLIGALLFDSGETAEATRLKRTARRRYTRRKNRICYLQEIFSNEMAKVDDSFFHRLEESFLVEEDKKHERHPIFGNIVDEVAYHEKYPTIYHLRKKLVDSTDKADLRLIYLALAHMIKFRGHFLIEGDLNPDNSDVDKLFIQLVQTYNQLFEENPINASGVDAKAILSARLSKSRRLENLIAQLPGEKKNGLFGNLIALSLGLTPNFKSNFDLAEDAKLQLSKDTYDDDLDNLLAQIGDQYADLFLAAKNLSDAILLSDILRVNTEITKAPLSASMIKRYDEHHQDLTLLKALVRQQLPEKYKEIFFDQSKNGYAGYIDGGASQEEFYKFIKPILEKMDGTEELLVKLNREDLLRKQRTFDNGSIPHQIHLGELHAILRRQEDFYPFLKDNREKIEKILTFRIPYYVGPLARGNSRFAWMTRKSEETITPWNFEEVVDKGASAQSFIERMTNFDKNLPNEKVLPKHSLLYEYFTVYNELTKVKYVTEGMRKPAFLSGEQKKAIVDLLFKTNRKVTVKQLKEDYFKKIECFDSVEISGVEDRFNASLGTYHDLLKIIKDKDFLDNEENEDILEDIVLTLTLFEDREMIEERLKTYAHLFDDKVMKQLKRRRYTGWGRLSRKLINGIRDKQSGKTILDFLKSDGFANRNFMQLIHDDSLTFKEDIQKAQVSGQGDSLHEHIANLAGSPAIKKGILQTVKVVDELVKVMGRHKPENIVIEMARENQTTQKGQKNSRERMKRIEEGIKELGSQILKEHPVENTQLQNEKLYLYYLQNGRDMYVDQELDINRLSDYDVDHIVPQSFLKDDSIDNKVLTRSDKARGKSDNVPSEEVVKKMKNYWRQLLNAKLITQRKFDNLTKAERGGLSELDKAGFIKRQLVETRQITKHVAQILDSRMNTKYDENDKLIREVKVITLKSKLVSDFRKDFQFYKVREINNYHHAHDAYLNAVVGTALIKKYPKLESEFVYGDYKVYDVRKMIAKSEQEIGKATAKYFFYSNIMNFFKTEITLANGEIRKRPLIETNGETGEIVWDKGRDFATVRKVLSMPQVNIVKKTEVQTGGFSKESILPKRNSDKLIARKKDWDPKKYGGFDSPTVAYSVLVVAKVEKGKSKKLKSVKELLGITIMERSSFEKNPIDFLEAKGYKEVKKDLIIKLPKYSLFELENGRKRMLASAGELQKGNELALPSKYVNFLYLASHYEKLKGSPEDNEQKQLFVEQHKHYLDEIIEQISEFSKRVILADANLDKVLSAYNKHRDKPIREQAENIIHLFTLTNLGAPAAFKYFDTTIDRKRYTSTKEVLDATLIHQSITGLYETRIDLSQLGGDGGGGGGSSGGIPWLMKKPLQLTTLVPLQEYEERLLKQTMLTGSYKEKLQSLFLKYDALWQHWENQVGHRRIKPHHIATGTVNPRPQKQYPINPKAKASIQTVINDLLKQGVLIQQNSIMNTPVYPVPKPDGKWRMVLDYREVNKTIPLIAAQNQHSAGILSSIFRGKYKTTLDLSNGFWAHSITPESYWLTAFTWLGQQYCWTRLPQGFLNSPALFNADVVDLLKEVPNVQVYVDDIYISHDDPREHLEQLEKVFSLLLNAGYVVSLKKSEIAQHEVEFLGFNITKEGRGLTETFKQKLLNITPPRDLKQLQSILGLLNFARNFIPNFSELVKPLYNIIATAPGKYITWTTDNSQQLQNIISMLNSAENLEERNPEVRLIMKVNTSPSAGYIRFYNEFAKRPIMYLNYVYTKAEVKFTNTEKLLTTIHKGLIKALDLGMGQEILVYSPIVSMTKIQKTPLPERKALPIRWITWMSYLEDPRIQFHYDKTLPELQQVPTVTDDIIAKIKHPSEFSMVFYTDGSAIKHPNVNKSHNAGMGIAQVQFKPEFTVINTWSIPLGDHTAQLAEVAAVEFACKKALKIDGPVLIVTDSFYVAESVNKELPYWQSNGFFNNKKKPLKHVSKWKSIADCIQLKPDIIIIHEKGHQPTASTFHTEGNNLADKLATQGSYVVNAGKRTADGSEFEKRTADGSEFESPKKKAKVE

SEQ ID NO: 6668 - protein, 2089 aa, synthetic construct
MPAAKRVKLDGGDKKYSIGLDIGTNSVGWAVITDEYKVPSKKFKVLGNTDRHSIKKNLIGALLFDSGETAEATRLKRTARRRYTRRKNRICYLQEIFSNEMAKVDDSFFHRLEESFLVEEDKKHERHPIFGNIVDEVAYHEKYPTIYHLRKKLVDSTDKADLRLIYLALAHMIKFRGHFLIEGDLNPDNSDVDKLFIQLVQTYNQLFEENPINASGVDAKAILSARLSKSRRLENLIAQLPGEKKNGLFGNLIALSLGLTPNFKSNFDLAEDAKLQLSKDTYDDDLDNLLAQIGDQYADLFLAAKNLSDAILLSDILRVNTEITKAPLSASMIKRYDEHHQDLTLLKALVRQQLPEKYKEIFFDQSKNGYAGYIDGGASQEEFYKFIKPILEKMDGTEELLVKLNREDLLRKQRTFDNGSIPHQIHLGELHAILRRQEDFYPFLKDNREKIEKILTFRIPYYVGPLARGNSRFAWMTRKSEETITPWNFEEVVDKGASAQSFIERMTNFDKNLPNEKVLPKHSLLYEYFTVYNELTKVKYVTEGMRKPAFLSGEQKKAIVDLLFKTNRKVTVKQLKEDYFKKIECFDSVEISGVEDRFNASLGTYHDLLKIIKDKDFLDNEENEDILEDIVLTLTLFEDREMIEERLKTYAHLFDDKVMKQLKRRRYTGWGRLSRKLINGIRDKQSGKTILDFLKSDGFANRNFMQLIHDDSLTFKEDIQKAQVSGQGDSLHEHIANLAGSPAIKKGILQTVKVVDELVKVMGRHKPENIVIEMARENQTTQKGQKNSRERMKRIEEGIKELGSQILKEHPVENTQLQNEKLYLYYLQNGRDMYVDQELDINRLSDYDVDHIVPQSFLKDDSIDNKVLTRSDKARGKSDNVPSEEVVKKMKNYWRQLLNAKLITQRKFDNLTKAERGGLSELDKAGFIKRQLVETRQITKHVAQILDSRMNTKYDENDKLIREVKVITLKSKLVSDFRKDFQFYKVREINNYHHAHDAYLNAVVGTALIKKYPKLESEFVYGDYKVYDVRKMIAKSEQEIGKATAKYFFYSNIMNFFKTEITLANGEIRKRPLIETNGETGEIVWDKGRDFATVRKVLSMPQVNIVKKTEVQTGGFSKESILPKRNSDKLIARKKDWDPKKYGGFDSPTVAYSVLVVAKVEKGKSKKLKSVKELLGITIMERSSFEKNPIDFLEAKGYKEVKKDLIIKLPKYSLFELENGRKRMLASAGELQKGNELALPSKYVNFLYLASHYEKLKGSPEDNEQKQLFVEQHKHYLDEIIEQISEFSKRVILADANLDKVLSAYNKHRDKPIREQAENIIHLFTLTNLGAPAAFKYFDTTIDRKRYTSTKEVLDATLIHQSITGLYETRIDLSQLGGDGGGGGGSSGGVLNLEEEYRLHEKPVPSSIDPSWLQLFPTVWAERAGMGLANQVPPVVVELRSGASPVAVRQYPMSKEAREGIRPHIQRFLDLGVLVPCQSPWNTPLLPVKKPGTNDYRPVQDLREINKRVQDIHPTVPNPYNLLSSLPPSHTWYSVLDLKDAFFCLKLHPNSQPLFAFEWRDPEKGNTGQLTWTRLPQGFKNSPTLFNEALHRDLAPFRALNPQVVLLQYVDDLLVAAPTYRDCKEGTQKLLQELSKLGYRVSAKKAQLCQKEVTYLGYLLKEGKRWLTPARKATVMKIPPPTTPRQVREFLGTAGFCRLWIPGFASLAAPLYPLTKPSIPFIWTEEHQKAFDRIKEALLSAPALALPDLTKPFTLYVDERAGVARGVLTQTLGPWRRPVAYLSKKLDPVASGWPTCLKAVAAVALLLKDADKLTLGQNVTVIASHSLESIVRQPPDRWMTNARMTHYQSLLLNERVSFAPPAVLNPATLLPVESEATPVHRCSEILAEETGTRRDLKDQPLPGVPAWYTDGSSFIAEGKRRAGAAIVDGKRTVWASSLPEGTSAQKAELVALTQALRLAEGKDINIYTDSRYAFATAHIHGAIYKQRGWLTSAGKDIKNKEEILALLEAIHLPKRVAIIHCPGHQKGNDPVATGNRRADEAAKQAALSTRVLAETTKPAGKRTADGSEFEKRTADGSEFESPKKKAKVE

SEQ ID NO: 6669 - protein, 2089 aa, synthetic construct
MPAAKRVKLDGGDKKYSIGLDIGTNSVGWAVITDEYKVPSKKFKVLGNTDRHSIKKNLIGALLFDSGETAEATRLKRTARRRYTRRKNRICYLQEIFSNEMAKVDDSFFHRLEESFLVEEDKKHERHPIFGNIVDEVAYHEKYPTIYHLRKKLVDSTDKADLRLIYLALAHMIKFRGHFLIEGDLNPDNSDVDKLFIQLVQTYNQLFEENPINASGVDAKAILSARLSKSRRLENLIAQLPGEKKNGLFGNLIALSLGLTPNFKSNFDLAEDAKLQLSKDTYDDDLDNLLAQIGDQYADLFLAAKNLSDAILLSDILRVNTEITKAPLSASMIKRYDEHHQDLTLLKALVRQQLPEKYKEIFFDQSKNGYAGYIDGGASQEEFYKFIKPILEKMDGTEELLVKLNREDLLRKQRTFDNGSIPHQIHLGELHAILRRQEDFYPFLKDNREKIEKILTFRIPYYVGPLARGNSRFAWMTRKSEETITPWNFEEVVDKGASAQSFIERMTNFDKNLPNEKVLPKHSLLYEYFTVYNELTKVKYVTEGMRKPAFLSGEQKKAIVDLLFKTNRKVTVKQLKEDYFKKIECFDSVEISGVEDRFNASLGTYHDLLKIIKDKDFLDNEENEDILEDIVLTLTLFEDREMIEERLKTYAHLFDDKVMKQLKRRRYTGWGRLSRKLINGIRDKQSGKTILDFLKSDGFANRNFMQLIHDDSLTFKEDIQKAQVSGQGDSLHEHIANLAGSPAIKKGILQTVKVVDELVKVMGRHKPENIVIEMARENQTTQKGQKNSRERMKRIEEGIKELGSQILKEHPVENTQLQNEKLYLYYLQNGRDMYVDQELDINRLSDYDVDHIVPQSFLKDDSIDNKVLTRSDKARGKSDNVPSEEVVKKMKNYWRQLLNAKLITQRKFDNLTKAERGGLSELDKAGFIKRQLVETRQITKHVAQILDSRMNTKYDENDKLIREVKVITLKSKLVSDFRKDFQFYKVREINNYHHAHDAYLNAVVGTALIKKYPKLESEFVYGDYKVYDVRKMIAKSEQEIGKATAKYFFYSNIMNFFKTEITLANGEIRKRPLIETNGETGEIVWDKGRDFATVRKVLSMPQVNIVKKTEVQTGGFSKESILPKRNSDKLIARKKDWDPKKYGGFDSPTVAYSVLVVAKVEKGKSKKLKSVKELLGITIMERSSFEKNPIDFLEAKGYKEVKKDLIIKLPKYSLFELENGRKRMLASAGELQKGNELALPSKYVNFLYLASHYEKLKGSPEDNEQKQLFVEQHKHYLDEIIEQISEFSKRVILADANLDKVLSAYNKHRDKPIREQAENIIHLFTLTNLGAPAAFKYFDTTIDRKRYTSTKEVLDATLIHQSITGLYETRIDLSQLGGDGGGGGGSSGGVLNLEEEYRLHEKPVPSSIDPSWLQLFPTVWAERAGMGLANQVPPVVVELRSGASPVAVRQYPMSKEAREGIRPHIQRFLDLGVLVPCQSPWNTPLLPVKKPGTNDYRPVQDLREINKRVQDIHPTVPNPYNLLSSLPPSHTWYSVLDLKDAFFCLKLHPNSQPLFAFEWRDPEKGNTGQLTWTRLPQGFKNSPTLFNEALHRDLAPFRALNPQVVLLQYVDDLLVAAPTYRDCKEGTQKLLQELSKLGYRVSAKKAQLCQKEVTYLGYLLKEGKRWLTPARKATVMKIPPPTTPRQVREFLGKAGFCRLFIPGFASLAAPLYPLTKPSIPFIWTEEHQKAFDRIKEALLSAPALALPDLTKPFTLYVDERAGVARGVLTQTLGPWRRPVAYLSKKLDPVASGWPTCLKAVAAVALLLKDADKLTLGQNVTVIASHSLESIVRQPPDRWMTNARMTHYQSLLLNERVSFAPPAVLNPATLLPVESEATPVHRCSEILAEETGTRRDLKDQPLPGVPAWYTDGSSFIAEGKRRAGAAIVDGKRTVWASSLPEGTSAQKAELVALTQALRLAEGKDINIYTDSRYAFATAHIHGAIYKQRGWLTSAGKDIKNKEEILALLEAIHLPKRVAIIHCPGHQKGNDPVATGNRRADEAAKQAALSTRVLAETTKPAGKRTADGSEFEKRTADGSEFESPKKKAKVE

SEQ ID NO: 6670 - protein, 2091 aa, synthetic construct
MPAAKRVKLDGGDKKYSIGLDIGTNSVGWAVITDEYKVPSKKFKVLGNTDRHSIKKNLIGALLFDSGETAEATRLKRTARRRYTRRKNRICYLQEIFSNEMAKVDDSFFHRLEESFLVEEDKKHERHPIFGNIVDEVAYHEKYPTIYHLRKKLVDSTDKADLRLIYLALAHMIKFRGHFLIEGDLNPDNSDVDKLFIQLVQTYNQLFEENPINASGVDAKAILSARLSKSRRLENLIAQLPGEKKNGLFGNLIALSLGLTPNFKSNFDLAEDAKLQLSKDTYDDDLDNLLAQIGDQYADLFLAAKNLSDAILLSDILRVNTEITKAPLSASMIKRYDEHHQDLTLLKALVRQQLPEKYKEIFFDQSKNGYAGYIDGGASQEEFYKFIKPILEKMDGTEELLVKLNREDLLRKQRTFDNGSIPHQIHLGELHAILRRQEDFYPFLKDNREKIEKILTFRIPYYVGPLARGNSRFAWMTRKSEETITPWNFEEVVDKGASAQSFIERMTNFDKNLPNEKVLPKHSLLYEYFTVYNELTKVKYVTEGMRKPAFLSGEQKKAIVDLLFKTNRKVTVKQLKEDYFKKIECFDSVEISGVEDRFNASLGTYHDLLKIIKDKDFLDNEENEDILEDIVLTLTLFEDREMIEERLKTYAHLFDDKVMKQLKRRRYTGWGRLSRKLINGIRDKQSGKTILDFLKSDGFANRNFMQLIHDDSLTFKEDIQKAQVSGQGDSLHEHIANLAGSPAIKKGILQTVKVVDELVKVMGRHKPENIVIEMARENQTTQKGQKNSRERMKRIEEGIKELGSQILKEHPVENTQLQNEKLYLYYLQNGRDMYVDQELDINRLSDYDVDHIVPQSFLKDDSIDNKVLTRSDKARGKSDNVPSEEVVKKMKNYWRQLLNAKLITQRKFDNLTKAERGGLSELDKAGFIKRQLVETRQITKHVAQILDSRMNTKYDENDKLIREVKVITLKSKLVSDFRKDFQFYKVREINNYHHAHDAYLNAVVGTALIKKYPKLESEFVYGDYKVYDVRKMIAKSEQEIGKATAKYFFYSNIMNFFKTEITLANGEIRKRPLIETNGETGEIVWDKGRDFATVRKVLSMPQVNIVKKTEVQTGGFSKESILPKRNSDKLIARKKDWDPKKYGGFDSPTVAYSVLVVAKVEKGKSKKLKSVKELLGITIMERSSFEKNPIDFLEAKGYKEVKKDLIIKLPKYSLFELENGRKRMLASAGELQKGNELALPSKYVNFLYLASHYEKLKGSPEDNEQKQLFVEQHKHYLDEIIEQISEFSKRVILADANLDKVLSAYNKHRDKPIREQAENIIHLFTLTNLGAPAAFKYFDTTIDRKRYTSTKEVLDATLIHQSITGLYETRIDLSQLGGDGGGGGGSSGGTLNIEDEYRLHETSKEPDVPLGSTWLSDFPQAWAETGGMGLAVRQAPLIIPLKATSTPVSIKQYPMSQEARLGIKPHIQRLLDQGILVPCQSPWNTPLLPVKKPGTNDYRPVQDLREVNKRVEDIHPTVPNPYNLLSGLPPSHQWYTVLDLKDAFFCLRLHPTSQPLFAFEWRDPEMGISGQLTWTRLPQGFKNSPTLFNEALHRDLADFRIQHPDLILLQYVDDLLLAATSEQDCQRGTRALLQTLGNLGYRASAKKAQICQKQVKYLGYLLKEGQRWLTEARKETVMGQPTPKTPRQLREFLGTAGFCRLWIPGFAEMAAPLYPLTKPGTLFNWGPDQQKAYQEIKQALLTAPALGLPDLTKPFELFVDEKQGYAKGVLTQKLGPWRRPVAYLSKKLDPVAAGWPPCLRMVAAIAVLTKDAGKLTMGQPLVILAPHAVEALVKQPPDRWLSNARMTHYQAMLLDTDRVQFGPVVALNPATLLPLPEKEAPHDCLEILAETHGTRPDLTDQPIPDADYTWYTDGSSFLQEGQRRAGAAVTTETEVIWARALPAGTSAQRAELIALTQALKMAEGKKLNVYTDSRYAFATAHVHGEIYRRRGWLTSEGREIKNKNEILALLKALFLPKRLSIIHCPGHQKGNSAEARGNRMADQAAREAAMKAVLETSTLLAGKRTADGSEFEKRTADGSEFESPKKKAKVE

SEQ ID NO: 6671 - protein, 2093 aa, synthetic construct
MPAAKRVKLDGGDKKYSIGLDIGTNSVGWAVITDEYKVPSKKFKVLGNTDRHSIKKNLIGALLFDSGETAEATRLKRTARRRYTRRKNRICYLQEIFSNEMAKVDDSFFHRLEESFLVEEDKKHERHPIFGNIVDEVAYHEKYPTIYHLRKKLVDSTDKADLRLIYLALAHMIKFRGHFLIEGDLNPDNSDVDKLFIQLVQTYNQLFEENPINASGVDAKAILSARLSKSRRLENLIAQLPGEKKNGLFGNLIALSLGLTPNFKSNFDLAEDAKLQLSKDTYDDDLDNLLAQIGDQYADLFLAAKNLSDAILLSDILRVNTEITKAPLSASMIKRYDEHHQDLTLLKALVRQQLPEKYKEIFFDQSKNGYAGYIDGGASQEEFYKFIKPILEKMDGTEELLVKLNREDLLRKQRTFDNGSIPHQIHLGELHAILRRQEDFYPFLKDNREKIEKILTFRIPYYVGPLARGNSRFAWMTRKSEETITPWNFEEVVDKGASAQSFIERMTNFDKNLPNEKVLPKHSLLYEYFTVYNELTKVKYVTEGMRKPAFLSGEQKKAIVDLLFKTNRKVTVKQLKEDYFKKIECFDSVEISGVEDRFNASLGTYHDLLKIIKDKDFLDNEENEDILEDIVLTLTLFEDREMIEERLKTYAHLFDDKVMKQLKRRRYTGWGRLSRKLINGIRDKQSGKTILDFLKSDGFANRNFMQLIHDDSLTFKEDIQKAQVSGQGDSLHEHIANLAGSPAIKKGILQTVKVVDELVKVMGRHKPENIVIEMARENQTTQKGQKNSRERMKRIEEGIKELGSQILKEHPVENTQLQNEKLYLYYLQNGRDMYVDQELDINRLSDYDVDHIVPQSFLKDDSIDNKVLTRSDKARGKSDNVPSEEVVKKMKNYWRQLLNAKLITQRKFDNLTKAERGGLSELDKAGFIKRQLVETRQITKHVAQILDSRMNTKYDENDKLIREVKVITLKSKLVSDFRKDFQFYKVREINNYHHAHDAYLNAVVGTALIKKYPKLESEFVYGDYKVYDVRKMIAKSEQEIGKATAKYFFYSNIMNFFKTEITLANGEIRKRPLIETNGETGEIVWDKGRDFATVRKVLSMPQVNIVKKTEVQTGGFSKESILPKRNSDKLIARKKDWDPKKYGGFDSPTVAYSVLVVAKVEKGKSKKLKSVKELLGITIMERSSFEKNPIDFLEAKGYKEVKKDLIIKLPKYSLFELENGRKRMLASAGELQKGNELALPSKYVNFLYLASHYEKLKGSPEDNEQKQLFVEQHKHYLDEIIEQISEFSKRVILADANLDKVLSAYNKHRDKPIREQAENIIHLFTLTNLGAPAAFKYFDTTIDRKRYTSTKEVLDATLIHQSITGLYETRIDLSQLGGDGGGSSGGGGGTAPLEEEYRLFLEAPIQNVTLLEQWKREIPKVWAEINPPGLASTQAPIHVQLLSTALPVRVRQYPITLEAKRSLRETIRKFRAAGILRPVHSPWNTPLLPVRKSGTSEYRMVQDLREVNKRVETIHPTVPNPYTLLSLLPPDRIWYSVLDLKDAFFCIPLAPESQLIFAFEWADAEEGESGQLTWTRLPQGFKNSPTLFDEALNRDLQGFRLDHPSVSLLQYVDDLLIAADTQAACLSATRDLLMTLAELGYRVSGKKAQLCQEEVTYLGFKIHKGSRSLSNSRTQAILQIPVPKTKRQVREFLGTIGYCRLWIPGFAELAQPLYAATRGGNDPLVWGEKEEEAFQSLKLALTQPPALALPSLDKPFQLFVEETSGAAKGVLTQALGPWKRPVAYLSKRLDPVAAGWPRCLRAIAAAALLTREASKLTFGQDIEITSSHNLESLLRSPPDKWLTNARITQYQVLLLDPPRVRFKQTAALNPATLLPETDDTLPIHHCLDTLDSLTSTRPDLTDQPLAQAEATLFTDGSSYIRDGKRYAGAAVVTLDSVIWAEPLPIGTSAQKAELIALTKALEWSKDKSVNIYTDSRYAFATLHVHGMIYRERGLLTAGGKAIKNAPEILALLTAVWLPKRVAVMHCKGHQKDDAPTSTGNRRADEVAREVAIRPLSTQATISAGKRTADGSEFEKRTADGSEFESPKKKAKVE

SEQ ID NO: 6672 - protein, 2097 aa, synthetic construct
MPAAKRVKLDGGDKKYSIGLDIGTNSVGWAVITDEYKVPSKKFKVLGNTDRHSIKKNLIGALLFDSGETAEATRLKRTARRRYTRRKNRICYLQEIFSNEMAKVDDSFFHRLEESFLVEEDKKHERHPIFGNIVDEVAYHEKYPTIYHLRKKLVDSTDKADLRLIYLALAHMIKFRGHFLIEGDLNPDNSDVDKLFIQLVQTYNQLFEENPINASGVDAKAILSARLSKSRRLENLIAQLPGEKKNGLFGNLIALSLGLTPNFKSNFDLAEDAKLQLSKDTYDDDLDNLLAQIGDQYADLFLAAKNLSDAILLSDILRVNTEITKAPLSASMIKRYDEHHQDLTLLKALVRQQLPEKYKEIFFDQSKNGYAGYIDGGASQEEFYKFIKPILEKMDGTEELLVKLNREDLLRKQRTFDNGSIPHQIHLGELHAILRRQEDFYPFLKDNREKIEKILTFRIPYYVGPLARGNSRFAWMTRKSEETITPWNFEEVVDKGASAQSFIERMTNFDKNLPNEKVLPKHSLLYEYFTVYNELTKVKYVTEGMRKPAFLSGEQKKAIVDLLFKTNRKVTVKQLKEDYFKKIECFDSVEISGVEDRFNASLGTYHDLLKIIKDKDFLDNEENEDILEDIVLTLTLFEDREMIEERLKTYAHLFDDKVMKQLKRRRYTGWGRLSRKLINGIRDKQSGKTILDFLKSDGFANRNFMQLIHDDSLTFKEDIQKAQVSGQGDSLHEHIANLAGSPAIKKGILQTVKVVDELVKVMGRHKPENIVIEMARENQTTQKGQKNSRERMKRIEEGIKELGSQILKEHPVENTQLQNEKLYLYYLQNGRDMYVDQELDINRLSDYDVDHIVPQSFLKDDSIDNKVLTRSDKARGKSDNVPSEEVVKKMKNYWRQLLNAKLITQRKFDNLTKAERGGLSELDKAGFIKRQLVETRQITKHVAQILDSRMNTKYDENDKLIREVKVITLKSKLVSDFRKDFQFYKVREINNYHHAHDAYLNAVVGTALIKKYPKLESEFVYGDYKVYDVRKMIAKSEQEIGKATAKYFFYSNIMNFFKTEITLANGEIRKRPLIETNGETGEIVWDKGRDFATVRKVLSMPQVNIVKKTEVQTGGFSKESILPKRNSDKLIARKKDWDPKKYGGFDSPTVAYSVLVVAKVEKGKSKKLKSVKELLGITIMERSSFEKNPIDFLEAKGYKEVKKDLIIKLPKYSLFELENGRKRMLASAGELQKGNELALPSKYVNFLYLASHYEKLKGSPEDNEQKQLFVEQHKHYLDEIIEQISEFSKRVILADANLDKVLSAYNKHRDKPIREQAENIIHLFTLTNLGAPAAFKYFDTTIDRKRYTSTKEVLDATLIHQSITGLYETRIDLSQLGGDGGGSSGGGGGTVSLQDEHRLFDIPVTTSLPDVWLQDFPQAWAETGGLGRAKCQAPIIIDLKPTAVPVSIKQYPMSLEAHMGIRQHIIKFLELGVLRPCRSPWNTPLLPVKKPGTQDYRPVQDLREINKRTVDIHPTVPNPYNLLSTLKPDYSWYTVLDLKDAFFCLPLAPQSQELFAFEWKDPERGISGQLTWTRLPQGFKNSPTLFNEALHRDLTDFRTQHPEVTLLQYVDDLLLAAPTKKACTQGTRHLLQELGEKGYRASAKKAQICQTKVTYLGYILSEGKRWLTPGRIETVARIPPPRNPREVREFLGKAGFCRLFIPGFAELAAPLYALTKPSTPFTWQTEHQLAFEALKKALLSAPALGLPDTSKPFTLFLDERQGIAKGVLTQKLGPWKRPVAYLSKKLDPVAAGWPPCLRIMAATAMLVKDSAKLTLGQPLTVITPHTLEAIVRQPPDRWITNARLTHYQALLLDTDRVQFGPPVTLNPATLLPVPENQPSPHDCRQVLAETHGTREDLKDQELPDADHTWYTDGSSYLDSGTRRAGAAVVDGHNTIWAQSLPPGTSAQKAELIALTKALELSKGKKANIYTDSRYAFATAHTHGSIYERRGWLTSEGKEIKNKAEIIALLKALFLPQEVAIIHCPGHQKGQDPVAVGNRQADRVARQAAMAEVLTLATEPDNTSHITAGKRTADGSEFEKRTADGSEFESPKKKAKVE

SEQ ID NO: 6673 - protein, 2008 aa, synthetic construct
MPAAKRVKLDGGDKKYSIGLDIGTNSVGWAVITDEYKVPSKKFKVLGNTDRHSIKKNLIGALLFDSGETAEATRLKRTARRRYTRRKNRICYLQEIFSNEMAKVDDSFFHRLEESFLVEEDKKHERHPIFGNIVDEVAYHEKYPTIYHLRKKLVDSTDKADLRLIYLALAHMIKFRGHFLIEGDLNPDNSDVDKLFIQLVQTYNQLFEENPINASGVDAKAILSARLSKSRRLENLIAQLPGEKKNGLFGNLIALSLGLTPNFKSNFDLAEDAKLQLSKDTYDDDLDNLLAQIGDQYADLFLAAKNLSDAILLSDILRVNTEITKAPLSASMIKRYDEHHQDLTLLKALVRQQLPEKYKEIFFDQSKNGYAGYIDGGASQEEFYKFIKPILEKMDGTEELLVKLNREDLLRKQRTFDNGSIPHQIHLGELHAILRRQEDFYPFLKDNREKIEKILTFRIPYYVGPLARGNSRFAWMTRKSEETITPWNFEEVVDKGASAQSFIERMTNFDKNLPNEKVLPKHSLLYEYFTVYNELTKVKYVTEGMRKPAFLSGEQKKAIVDLLFKTNRKVTVKQLKEDYFKKIECFDSVEISGVEDRFNASLGTYHDLLKIIKDKDFLDNEENEDILEDIVLTLTLFEDREMIEERLKTYAHLFDDKVMKQLKRRRYTGWGRLSRKLINGIRDKQSGKTILDFLKSDGFANRNFMQLIHDDSLTFKEDIQKAQVSGQGDSLHEHIANLAGSPAIKKGILQTVKVVDELVKVMGRHKPENIVIEMARENQTTQKGQKNSRERMKRIEEGIKELGSQILKEHPVENTQLQNEKLYLYYLQNGRDMYVDQELDINRLSDYDVDHIVPQSFLKDDSIDNKVLTRSDKARGKSDNVPSEEVVKKMKNYWRQLLNAKLITQRKFDNLTKAERGGLSELDKAGFIKRQLVETRQITKHVAQILDSRMNTKYDENDKLIREVKVITLKSKLVSDFRKDFQFYKVREINNYHHAHDAYLNAVVGTALIKKYPKLESEFVYGDYKVYDVRKMIAKSEQEIGKATAKYFFYSNIMNFFKTEITLANGEIRKRPLIETNGETGEIVWDKGRDFATVRKVLSMPQVNIVKKTEVQTGGFSKESILPKRNSDKLIARKKDWDPKKYGGFDSPTVAYSVLVVAKVEKGKSKKLKSVKELLGITIMERSSFEKNPIDFLEAKGYKEVKKDLIIKLPKYSLFELENGRKRMLASAGELQKGNELALPSKYVNFLYLASHYEKLKGSPEDNEQKQLFVEQHKHYLDEIIEQISEFSKRVILADANLDKVLSAYNKHRDKPIREQAENIIHLFTLTNLGAPAAFKYFDTTIDRKRYTSTKEVLDATLIHQSITGLYETRIDLSQLGGDGGGSSGGGGGAVLGLEHLPRPPQISQFPLNPERLQALQHLVRKALEAGHIEPYTGPGNNPVFPVKKANGTWRFIHDLRATNSLTIDLSSSSPGPPDLSSLPTTLAHLQTIDLRDAFFQIPLPKQFQPYFAFTVPQQCNYGPGTRYAWKVLPQGFKNSPTLFEMQLAHILQPIRQAFPQCTILQYMDDILLASPSHEDLLLLSEATMASLISHGLPVSENKTQQTPGTIKFLGQIISPNHLTYDAVPTVPIRSRWALPELQALLGEIQWVSKGTPTLRQPLHSLYCALQRHTDPRDQIYLNPSQVQSLVQLRQALSQNCRSRLVQTLPLLGAIMLTLTGTTTVVFQSKEQWPLVWLHAPLPHTSQCPWGQLLASAVLLLDKYTLQSYGLLCQTIHHNISTQTFNQFIQTSDHPSVPILLHHSHRFKNLGAQTGELWNTFLKTAAPLAPVKALMPVFTLSPVIINTAPCLFSDGSTSRAAYILWDKQILSQRSFPLPPPHKSAQRAELLGLLHGLSSARSWRCLNIFLDSKYLYHYLRTLALGTFQGRSSQAPFQALLPRLLSRKVVYLHHVRSHTNLPDPISRLNALTDALLITPVLQLAGKRTADGSEFEKRTADGSEFESPKKKAKVE

SEQ ID NO: 6674 - protein, 2122 aa, synthetic construct
MPAAKRVKLDGGDKKYSIGLDIGTNSVGWAVITDEYKVPSKKFKVLGNTDRHSIKKNLIGALLFDSGETAEATRLKRTARRRYTRRKNRICYLQEIFSNEMAKVDDSFFHRLEESFLVEEDKKHERHPIFGNIVDEVAYHEKYPTIYHLRKKLVDSTDKADLRLIYLALAHMIKFRGHFLIEGDLNPDNSDVDKLFIQLVQTYNQLFEENPINASGVDAKAILSARLSKSRRLENLIAQLPGEKKNGLFGNLIALSLGLTPNFKSNFDLAEDAKLQLSKDTYDDDLDNLLAQIGDQYADLFLAAKNLSDAILLSDILRVNTEITKAPLSASMIKRYDEHHQDLTLLKALVRQQLPEKYKEIFFDQSKNGYAGYIDGGASQEEFYKFIKPILEKMDGTEELLVKLNREDLLRKQRTFDNGSIPHQIHLGELHAILRRQEDFYPFLKDNREKIEKILTFRIPYYVGPLARGNSRFAWMTRKSEETITPWNFEEVVDKGASAQSFIERMTNFDKNLPNEKVLPKHSLLYEYFTVYNELTKVKYVTEGMRKPAFLSGEQKKAIVDLLFKTNRKVTVKQLKEDYFKKIECFDSVEISGVEDRFNASLGTYHDLLKIIKDKDFLDNEENEDILEDIVLTLTLFEDREMIEERLKTYAHLFDDKVMKQLKRRRYTGWGRLSRKLINGIRDKQSGKTILDFLKSDGFANRNFMQLIHDDSLTFKEDIQKAQVSGQGDSLHEHIANLAGSPAIKKGILQTVKVVDELVKVMGRHKPENIVIEMARENQTTQKGQKNSRERMKRIEEGIKELGSQILKEHPVENTQLQNEKLYLYYLQNGRDMYVDQELDINRLSDYDVDHIVPQSFLKDDSIDNKVLTRSDKARGKSDNVPSEEVVKKMKNYWRQLLNAKLITQRKFDNLTKAERGGLSELDKAGFIKRQLVETRQITKHVAQILDSRMNTKYDENDKLIREVKVITLKSKLVSDFRKDFQFYKVREINNYHHAHDAYLNAVVGTALIKKYPKLESEFVYGDYKVYDVRKMIAKSEQEIGKATAKYFFYSNIMNFFKTEITLANGEIRKRPLIETNGETGEIVWDKGRDFATVRKVLSMPQVNIVKKTEVQTGGFSKESILPKRNSDKLIARKKDWDPKKYGGFDSPTVAYSVLVVAKVEKGKSKKLKSVKELLGITIMERSSFEKNPIDFLEAKGYKEVKKDLIIKLPKYSLFELENGRKRMLASAGELQKGNELALPSKYVNFLYLASHYEKLKGSPEDNEQKQLFVEQHKHYLDEIIEQISEFSKRVILADANLDKVLSAYNKHRDKPIREQAENIIHLFTLTNLGAPAAFKYFDTTIDRKRYTSTKEVLDATLIHQSITGLYETRIDLSQLGGDGGGSSGGGGGLLGRDLLTKLKAQIQFSTEGPQVTWEDRPAMCLVLNLEEEYRLHEKPVPPSIDPSWLQLFPMVWAEKAGMGLANQVPPVVVELKSDASPVAVRQYPMSKEAREGIRPHIQRFLDLGILVPCQSPWNTPLLPVKKPGTNDYRPVQDLREVNKRVQDIHPTVPNPYNLLSSLPPSHTWYSVLDLKDAFFCLKLHPNSQPLFAFEWRDPEKGNTGQLTWTRLPQGFKNSPTLFNEALHRDLASFRALNPQVVMLQYVDDLLVAAPTYRDCKEGTRRLLQELSKLGYRVSAKKAQLCREEVTYLGYLLKGGKRWLTPARKATVMKIPTPTTPRQVREFLGTAGFCRLWIPGFASLAAPLYPLTRPKVPFTWTEAHQEAFGRIKEALLSAPALALPDLTKPFALYVDEKEGVARGVLTQTLGPWRRPVAYLSKKLDPVASGWPTCLKAIAAVALLLKDADKLTLGQNVLVIAPHNLESIVRQPPDRWMTNARMTHYQSLLLNERVSFAPPAILNPATLLPVESDDTPIHICSEILAEETGTRPDLRDQPLPGVPAWYTDGSSFIMDGRRQAGAAIVDNKRTVWASNLPEGTSAQKAELIALTQALRLAEGKSINIYTDSRYAFATAHVHGAIYKQRGWLTSAGKDIKNKEEILALLEAIHLPKRVAIIHCPGHQRGTDPVATGNRKADEAAKQAAQSTRILTETTKNAGKRTADGSEFEKRTADGSEFESPKKKAKVE

SEQ ID NO: 6675 - protein, 2213 aa, synthetic construct
MPAAKRVKLDGGDKKYSIGLDIGTNSVGWAVITDEYKVPSKKFKVLGNTDRHSIKKNLIGALLFDSGETAEATRLKRTARRRYTRRKNRICYLQEIFSNEMAKVDDSFFHRLEESFLVEEDKKHERHPIFGNIVDEVAYHEKYPTIYHLRKKLVDSTDKADLRLIYLALAHMIKFRGHFLIEGDLNPDNSDVDKLFIQLVQTYNQLFEENPINASGVDAKAILSARLSKSRRLENLIAQLPGEKKNGLFGNLIALSLGLTPNFKSNFDLAEDAKLQLSKDTYDDDLDNLLAQIGDQYADLFLAAKNLSDAILLSDILRVNTEITKAPLSASMIKRYDEHHQDLTLLKALVRQQLPEKYKEIFFDQSKNGYAGYIDGGASQEEFYKFIKPILEKMDGTEELLVKLNREDLLRKQRTFDNGSIPHQIHLGELHAILRRQEDFYPFLKDNREKIEKILTFRIPYYVGPLARGNSRFAWMTRKSEETITPWNFEEVVDKGASAQSFIERMTNFDKNLPNEKVLPKHSLLYEYFTVYNELTKVKYVTEGMRKPAFLSGEQKKAIVDLLFKTNRKVTVKQLKEDYFKKIECFDSVEISGVEDRFNASLGTYHDLLKIIKDKDFLDNEENEDILEDIVLTLTLFEDREMIEERLKTYAHLFDDKVMKQLKRRRYTGWGRLSRKLINGIRDKQSGKTILDFLKSDGFANRNFMQLIHDDSLTFKEDIQKAQVSGQGDSLHEHIANLAGSPAIKKGILQTVKVVDELVKVMGRHKPENIVIEMARENQTTQKGQKNSRERMKRIEEGIKELGSQILKEHPVENTQLQNEKLYLYYLQNGRDMYVDQELDINRLSDYDVDHIVPQSFLKDDSIDNKVLTRSDKARGKSDNVPSEEVVKKMKNYWRQLLNAKLITQRKFDNLTKAERGGLSELDKAGFIKRQLVETRQITKHVAQILDSRMNTKYDENDKLIREVKVITLKSKLVSDFRKDFQFYKVREINNYHHAHDAYLNAVVGTALIKKYPKLESEFVYGDYKVYDVRKMIAKSEQEIGKATAKYFFYSNIMNFFKTEITLANGEIRKRPLIETNGETGEIVWDKGRDFATVRKVLSMPQVNIVKKTEVQTGGFSKESILPKRNSDKLIARKKDWDPKKYGGFDSPTVAYSVLVVAKVEKGKSKKLKSVKELLGITIMERSSFEKNPIDFLEAKGYKEVKKDLIIKLPKYSLFELENGRKRMLASAGELQKGNELALPSKYVNFLYLASHYEKLKGSPEDNEQKQLFVEQHKHYLDEIIEQISEFSKRVILADANLDKVLSAYNKHRDKPIREQAENIIHLFTLTNLGAPAAFKYFDTTIDRKRYTSTKEVLDATLIHQSITGLYETRIDLSQLGGDGGGSSGGGGGTLGDQGSRGSDPLPEPRVTLTVEGIPTEFLVNTGAEHSVLTKPMGKMGSKRTVVAGATGSKVYPWTTKRLLKIGQKQVTHSFLVIPECPAPLLGRDLLTKLKAQIQFSTEGPQVTWEDRPAMCLVLNLEEEYRLHEKPVPPSIDPSWLQLFPMVWAEKAGMGLANQVPPVVVELKSDASPVAVRQYPMSKEAREGIRPHIQRFLDLGILVPCQSPWNTPLLPVKKPGTNDYRPVQDLREVNKRVQDIHPTVPNPYNLLSSLPPSHTWYSVLDLKDAFFCLKLHPNSQPLFAFEWRDPEKGNTGQLTWTRLPQGFKNSPTLFNEALHRDLASFRALNPQVVMLQYVDDLLVAAPTYRDCKEGTRRLLQELSKLGYRVSAKKAQLCREEVTYLGYLLKGGKRWLTPARKATVMKIPTPTTPRQVREFLGTAGFCRLWIPGFASLAAPLYPLTRPKVPFTWTEAHQEAFGRIKEALLSAPALALPDLTKPFALYVDEKEGVARGVLTQTLGPWRRPVAYLSKKLDPVASGWPTCLKAIAAVALLLKDADKLTLGQNVLVIAPHNLESIVRQPPDRWMTNARMTHYQSLLLNERVSFAPPAILNPATLLPVESDDTPIHICSEILAEETGTRPDLRDQPLPGVPAWYTDGSSFIMDGRRQAGAAIVDNKRTVWASNLPEGTSAQKAELIALTQALRLAEGKSINIYTDSRYAFATAHVHGAIYKQRGWLTSAGKDIKNKEEILALLEAIHLPKRVAIIHCPGHQRGTDPVATGNRKADEAAKQAAQSTRILTETTKNAGKRTADGSEFEKRTADGSEFESPKKKAKVE

SEQ ID NO: 6676 - protein, 2213 aa, synthetic construct
MPAAKRVKLDGGDKKYSIGLDIGTNSVGWAVITDEYKVPSKKFKVLGNTDRHSIKKNLIGALLFDSGETAEATRLKRTARRRYTRRKNRICYLQEIFSNEMAKVDDSFFHRLEESFLVEEDKKHERHPIFGNIVDEVAYHEKYPTIYHLRKKLVDSTDKADLRLIYLALAHMIKFRGHFLIEGDLNPDNSDVDKLFIQLVQTYNQLFEENPINASGVDAKAILSARLSKSRRLENLIAQLPGEKKNGLFGNLIALSLGLTPNFKSNFDLAEDAKLQLSKDTYDDDLDNLLAQIGDQYADLFLAAKNLSDAILLSDILRVNTEITKAPLSASMIKRYDEHHQDLTLLKALVRQQLPEKYKEIFFDQSKNGYAGYIDGGASQEEFYKFIKPILEKMDGTEELLVKLNREDLLRKQRTFDNGSIPHQIHLGELHAILRRQEDFYPFLKDNREKIEKILTFRIPYYVGPLARGNSRFAWMTRKSEETITPWNFEEVVDKGASAQSFIERMTNFDKNLPNEKVLPKHSLLYEYFTVYNELTKVKYVTEGMRKPAFLSGEQKKAIVDLLFKTNRKVTVKQLKEDYFKKIECFDSVEISGVEDRFNASLGTYHDLLKIIKDKDFLDNEENEDILEDIVLTLTLFEDREMIEERLKTYAHLFDDKVMKQLKRRRYTGWGRLSRKLINGIRDKQSGKTILDFLKSDGFANRNFMQLIHDDSLTFKEDIQKAQVSGQGDSLHEHIANLAGSPAIKKGILQTVKVVDELVKVMGRHKPENIVIEMARENQTTQKGQKNSRERMKRIEEGIKELGSQILKEHPVENTQLQNEKLYLYYLQNGRDMYVDQELDINRLSDYDVDHIVPQSFLKDDSIDNKVLTRSDKARGKSDNVPSEEVVKKMKNYWRQLLNAKLITQRKFDNLTKAERGGLSELDKAGFIKRQLVETRQITKHVAQILDSRMNTKYDENDKLIREVKVITLKSKLVSDFRKDFQFYKVREINNYHHAHDAYLNAVVGTALIKKYPKLESEFVYGDYKVYDVRKMIAKSEQEIGKATAKYFFYSNIMNFFKTEITLANGEIRKRPLIETNGETGEIVWDKGRDFATVRKVLSMPQVNIVKKTEVQTGGFSKESILPKRNSDKLIARKKDWDPKKYGGFDSPTVAYSVLVVAKVEKGKSKKLKSVKELLGITIMERSSFEKNPIDFLEAKGYKEVKKDLIIKLPKYSLFELENGRKRMLASAGELQKGNELALPSKYVNFLYLASHYEKLKGSPEDNEQKQLFVEQHKHYLDEIIEQISEFSKRVILADANLDKVLSAYNKHRDKPIREQAENIIHLFTLTNLGAPAAFKYFDTTIDRKRYTSTKEVLDATLIHQSITGLYETRIDLSQLGGDGGGSSGGGGGTLGDQGSRGSDPLPEPRVTLTVEGIPTEFLVNTGAEHSVLTKPMGKMGSKRTVVAGATGSKVYPWTTKRLLKIGQKQVTHSFLVIPECPAPLLGRDLLTKLKAQIQFSTEGPQVTWEDRPAMCLVLNLEEEYRLHEKPVPPSIDPSWLQLFPMVWAEKAGMGLANQVPPVVVELKSDASPVAVRQYPMSKEAREGIRPHIQRFLDLGILVPCQSPWNTPLLPVKKPGTNDYRPVQDLREVNKRVQDIHPTVPNPYNLLSSLPPSHTWYSVLDLKDAFFCLKLHPNSQPLFAFEWRDPEKGNTGQLTWTRLPQGFKNSPTLFNEALHRDLASFRALNPQVVMLQYVDDLLVAAPTYRDCKEGTRRLLQELSKLGYRVSAKKAQLCREEVTYLGYLLKGGKRWLTPARKATVMKIPTPTTPRQVREFLGKAGFCRLFIPGFASLAAPLYPLTRPKVPFTWTEAHQEAFGRIKEALLSAPALALPDLTKPFALYVDEKEGVARGVLTQTLGPWRRPVAYLSKKLDPVASGWPTCLKAIAAVALLLKDADKLTLGQNVLVIAPHNLESIVRQPPDRWMTNARMTHYQSLLLNERVSFAPPAILNPATLLPVESDDTPIHICSEILAEETGTRPDLRDQPLPGVPAWYTDGSSFIMDGRRQAGAAIVDNKRTVWASNLPEGTSAQKAELIALTQALRLAEGKSINIYTDSRYAFATAHVHGAIYKQRGWLTSAGKDIKNKEEILALLEAIHLPKRVAIIHCPGHQRGTDPVATGNRKADEAAKQAAQSTRILTETTKNAGKRTADGSEFEKRTADGSEFESPKKKAKVE

SEQ ID NO: 6677 - protein, 2091 aa, synthetic construct
MPAAKRVKLDGGDKKYSIGLDIGTNSVGWAVITDEYKVPSKKFKVLGNTDRHSIKKNLIGALLFDSGETAEATRLKRTARRRYTRRKNRICYLQEIFSNEMAKVDDSFFHRLEESFLVEEDKKHERHPIFGNIVDEVAYHEKYPTIYHLRKKLVDSTDKADLRLIYLALAHMIKFRGHFLIEGDLNPDNSDVDKLFIQLVQTYNQLFEENPINASGVDAKAILSARLSKSRRLENLIAQLPGEKKNGLFGNLIALSLGLTPNFKSNFDLAEDAKLQLSKDTYDDDLDNLLAQIGDQYADLFLAAKNLSDAILLSDILRVNTEITKAPLSASMIKRYDEHHQDLTLLKALVRQQLPEKYKEIFFDQSKNGYAGYIDGGASQEEFYKFIKPILEKMDGTEELLVKLNREDLLRKQRTFDNGSIPHQIHLGELHAILRRQEDFYPFLKDNREKIEKILTFRIPYYVGPLARGNSRFAWMTRKSEETITPWNFEEVVDKGASAQSFIERMTNFDKNLPNEKVLPKHSLLYEYFTVYNELTKVKYVTEGMRKPAFLSGEQKKAIVDLLFKTNRKVTVKQLKEDYFKKIECFDSVEISGVEDRFNASLGTYHDLLKIIKDKDFLDNEENEDILEDIVLTLTLFEDREMIEERLKTYAHLFDDKVMKQLKRRRYTGWGRLSRKLINGIRDKQSGKTILDFLKSDGFANRNFMQLIHDDSLTFKEDIQKAQVSGQGDSLHEHIANLAGSPAIKKGILQTVKVVDELVKVMGRHKPENIVIEMARENQTTQKGQKNSRERMKRIEEGIKELGSQILKEHPVENTQLQNEKLYLYYLQNGRDMYVDQELDINRLSDYDVDHIVPQSFLKDDSIDNKVLTRSDKARGKSDNVPSEEVVKKMKNYWRQLLNAKLITQRKFDNLTKAERGGLSELDKAGFIKRQLVETRQITKHVAQILDSRMNTKYDENDKLIREVKVITLKSKLVSDFRKDFQFYKVREINNYHHAHDAYLNAVVGTALIKKYPKLESEFVYGDYKVYDVRKMIAKSEQEIGKATAKYFFYSNIMNFFKTEITLANGEIRKRPLIETNGETGEIVWDKGRDFATVRKVLSMPQVNIVKKTEVQTGGFSKESILPKRNSDKLIARKKDWDPKKYGGFDSPTVAYSVLVVAKVEKGKSKKLKSVKELLGITIMERSSFEKNPIDFLEAKGYKEVKKDLIIKLPKYSLFELENGRKRMLASAGELQKGNELALPSKYVNFLYLASHYEKLKGSPEDNEQKQLFVEQHKHYLDEIIEQISEFSKRVILADANLDKVLSAYNKHRDKPIREQAENIIHLFTLTNLGAPAAFKYFDTTIDRKRYTSTKEVLDATLIHQSITGLYETRIDLSQLGGDGGGSSGGGGGTLNLEDEYRLYETSAEPEVSPGSTWLSDFPQAWAETGGMGLAVRQAPLIIPLKATSTPVSIKQYPMSQEAKLGIKPHIQRLLDQGILVPCQSPWNTPLLPVKKPGTNDYRPVQDLREVNKRVEDIHPTVPNPYNLLSGLPPSHRWYTVLDLKDAFFCLRLHPTSQPLFAFEWRDPGMGISGQLTWTRLPQGFKNSPTLFNEALHRDLADFRIQHPDLILLQYVDDILLAATSELDCQQGTRALLLTLGNLGYRASAKKAQLCQKQVKYLGYLLKEGQRWLTEARKETVMGQPTPKTPRQLREFLGTAGFCRLWIPGFAEMAAPLYPLTKPGTLFNWGPDQQKAYQEIKQALLTAPALGLPDLTKPFELFVDEKQGYAKGVLTQKLGPWRRPVAYLSKKLDPVAAGWPPCLRMVAAIAVLRKDAGKLTMGQPLVILAPHAVEALVKQPPDRWLSNARMTHYQAMLLDTDRVQFGPVVALNPATLLPLPEEGAPHDCLEILAETHGTRPDLTDQPIPDADHTWYTDGSSFLQEGQRKAGAAVTTETEVIWARALPAGTSAQRAELIALTQALKMAEGKRLNVYTDSRYAFATAHIHGEIYRRRGWLTSEGREIKNKSEILALLKALFLPKRLSIIHCLGHQKGDSAEARGNRLADQAAREAAIKTPPDTSTLLAGKRTADGSEFEKRTADGSEFESPKKKAKVE

SEQ ID NO: 6678 - protein, 2091 aa, synthetic construct
MPAAKRVKLDGGDKKYSIGLDIGTNSVGWAVITDEYKVPSKKFKVLGNTDRHSIKKNLIGALLFDSGETAEATRLKRTARRRYTRRKNRICYLQEIFSNEMAKVDDSFFHRLEESFLVEEDKKHERHPIFGNIVDEVAYHEKYPTIYHLRKKLVDSTDKADLRLIYLALAHMIKFRGHFLIEGDLNPDNSDVDKLFIQLVQTYNQLFEENPINASGVDAKAILSARLSKSRRLENLIAQLPGEKKNGLFGNLIALSLGLTPNFKSNFDLAEDAKLQLSKDTYDDDLDNLLAQIGDQYADLFLAAKNLSDAILLSDILRVNTEITKAPLSASMIKRYDEHHQDLTLLKALVRQQLPEKYKEIFFDQSKNGYAGYIDGGASQEEFYKFIKPILEKMDGTEELLVKLNREDLLRKQRTFDNGSIPHQIHLGELHAILRRQEDFYPFLKDNREKIEKILTFRIPYYVGPLARGNSRFAWMTRKSEETITPWNFEEVVDKGASAQSFIERMTNFDKNLPNEKVLPKHSLLYEYFTVYNELTKVKYVTEGMRKPAFLSGEQKKAIVDLLFKTNRKVTVKQLKEDYFKKIECFDSVEISGVEDRFNASLGTYHDLLKIIKDKDFLDNEENEDILEDIVLTLTLFEDREMIEERLKTYAHLFDDKVMKQLKRRRYTGWGRLSRKLINGIRDKQSGKTILDFLKSDGFANRNFMQLIHDDSLTFKEDIQKAQVSGQGDSLHEHIANLAGSPAIKKGILQTVKVVDELVKVMGRHKPENIVIEMARENQTTQKGQKNSRERMKRIEEGIKELGSQILKEHPVENTQLQNEKLYLYYLQNGRDMYVDQELDINRLSDYDVDHIVPQSFLKDDSIDNKVLTRSDKARGKSDNVPSEEVVKKMKNYWRQLLNAKLITQRKFDNLTKAERGGLSELDKAGFIKRQLVETRQITKHVAQILDSRMNTKYDENDKLIREVKVITLKSKLVSDFRKDFQFYKVREINNYHHAHDAYLNAVVGTALIKKYPKLESEFVYGDYKVYDVRKMIAKSEQEIGKATAKYFFYSNIMNFFKTEITLANGEIRKRPLIETNGETGEIVWDKGRDFATVRKVLSMPQVNIVKKTEVQTGGFSKESILPKRNSDKLIARKKDWDPKKYGGFDSPTVAYSVLVVAKVEKGKSKKLKSVKELLGITIMERSSFEKNPIDFLEAKGYKEVKKDLIIKLPKYSLFELENGRKRMLASAGELQKGNELALPSKYVNFLYLASHYEKLKGSPEDNEQKQLFVEQHKHYLDEIIEQISEFSKRVILADANLDKVLSAYNKHRDKPIREQAENIIHLFTLTNLGAPAAFKYFDTTIDRKRYTSTKEVLDATLIHQSITGLYETRIDLSQLGGDGGGSSGGGGGTLGIEDEYRLHETSTEPDVSLGSTWLSDFPQAWAETGGMGLAVRQAPLIIPLKATSTPVSIQQYPMSHEARLGIKPHIQRLLDQGILVPCQSPWNTPLLPVKKPGTNDYRPVQDLREVNKRVEDIHPTVPNPYNLLSGLPPSHQWYTVLDLKDAFFCLRLHPTSQPLFAFEWRDPGMGISGQLTWTRLPQGFKNSPTLFDEALHRDLADFRIQHPDLILLQYVDDILLAATSELDCQQGTRALLQTLGDLGYRASAKKAQICQKQVKYLGYLLREGQRWLTEARKETVMGQPVPKTPRQLREFLGTAGFCRLWIPGFAEMAAPLYPLTKTGTLFSWGPDQQKAYQEIKQALLTAPALGLPDLTKPFELFVDEKQGYAKGVLTQKLGPWRRPVAYLSKKLDPVAAGWPPCLRMVAAIAVLTKDAGKLTMGQPLVILAPHAVEALVKQPPDRWLSNARMTHYQAMLLDTDRVQFGPVVALNPATLLPLPEEGAPHDCLEILAETHGTRPDLTDQPIPDADHTWYTDGSSFLQEGQRKAGAAVTTETEVIWAGALPAGTSAQRAELIALTQALKMAEGKRLNVYTDSRYAFATAHIHGEIYRRRGLLTSEGREIKNKSEILALLKALFLPKRLSIIHCLGHQKGDSAEARGNRLADQAAREAAIKTPPDTSTLLAGKRTADGSEFEKRTADGSEFESPKKKAKVE

SEQ ID NO: 6679 - protein, 2091 aa, synthetic construct
MPAAKRVKLDGGDKKYSIGLDIGTNSVGWAVITDEYKVPSKKFKVLGNTDRHSIKKNLIGALLFDSGETAEATRLKRTARRRYTRRKNRICYLQEIFSNEMAKVDDSFFHRLEESFLVEEDKKHERHPIFGNIVDEVAYHEKYPTIYHLRKKLVDSTDKADLRLIYLALAHMIKFRGHFLIEGDLNPDNSDVDKLFIQLVQTYNQLFEENPINASGVDAKAILSARLSKSRRLENLIAQLPGEKKNGLFGNLIALSLGLTPNFKSNFDLAEDAKLQLSKDTYDDDLDNLLAQIGDQYADLFLAAKNLSDAILLSDILRVNTEITKAPLSASMIKRYDEHHQDLTLLKALVRQQLPEKYKEIFFDQSKNGYAGYIDGGASQEEFYKFIKPILEKMDGTEELLVKLNREDLLRKQRTFDNGSIPHQIHLGELHAILRRQEDFYPFLKDNREKIEKILTFRIPYYVGPLARGNSRFAWMTRKSEETITPWNFEEVVDKGASAQSFIERMTNFDKNLPNEKVLPKHSLLYEYFTVYNELTKVKYVTEGMRKPAFLSGEQKKAIVDLLFKTNRKVTVKQLKEDYFKKIECFDSVEISGVEDRFNASLGTYHDLLKIIKDKDFLDNEENEDILEDIVLTLTLFEDREMIEERLKTYAHLFDDKVMKQLKRRRYTGWGRLSRKLINGIRDKQSGKTILDFLKSDGFANRNFMQLIHDDSLTFKEDIQKAQVSGQGDSLHEHIANLAGSPAIKKGILQTVKVVDELVKVMGRHKPENIVIEMARENQTTQKGQKNSRERMKRIEEGIKELGSQILKEHPVENTQLQNEKLYLYYLQNGRDMYVDQELDINRLSDYDVDHIVPQSFLKDDSIDNKVLTRSDKARGKSDNVPSEEVVKKMKNYWRQLLNAKLITQRKFDNLTKAERGGLSELDKAGFIKRQLVETRQITKHVAQILDSRMNTKYDENDKLIREVKVITLKSKLVSDFRKDFQFYKVREINNYHHAHDAYLNAVVGTALIKKYPKLESEFVYGDYKVYDVRKMIAKSEQEIGKATAKYFFYSNIMNFFKTEITLANGEIRKRPLIETNGETGEIVWDKGRDFATVRKVLSMPQVNIVKKTEVQTGGFSKESILPKRNSDKLIARKKDWDPKKYGGFDSPTVAYSVLVVAKVEKGKSKKLKSVKELLGITIMERSSFEKNPIDFLEAKGYKEVKKDLIIKLPKYSLFELENGRKRMLASAGELQKGNELALPSKYVNFLYLASHYEKLKGSPEDNEQKQLFVEQHKHYLDEIIEQISEFSKRVILADANLDKVLSAYNKHRDKPIREQAENIIHLFTLTNLGAPAAFKYFDTTIDRKRYTSTKEVLDATLIHQSITGLYETRIDLSQLGGDGGGSSGGGGGTLNIEDEYRLHETSKGPDVPLGSTWLSDFPQAWAETGGMGLAVRQAPLIIPLKATSTPVSIKQYPMSQEARLGIKPHIQRLLDQGILVPCQSPWNTPLLPVKKPGTNDYRPVQDLREVNKRVEDIHPTVPNPYNLLSGLPPSHQWYTVLDLKDAFFCLRLHPTSQSLFAFEWRDPEMGISGQLTWTRLPQGFKNSPTLFNEALHRDLADFRIQHPDLILLQYVDDLLLAATSELDCQQGTRALLQTLGDLGYRASAKKAQICQKQVKYLGYLLKEGQRWLTEARKETVMGQPTPKTPRQLREFLGTAGFCRLWIPGFAEMAAPLYPLTKPGTLFEWGPDQQKAYQEIKQALLTAPALGLPDLTKPFELFVDEKQGYAKGVLTQKLGPWRRPVAYLSKKLDPVAAGWPPCLRMVAAIAVLTKDAGKLTMGQPLVILAPHAVEALVKQPPDRWLSNARMTHYQALLLDTDRVQFGPIVALNPATLLPLPEEGLQHDCLDILAEAHGTRPDLTDQPLPDADHTWYTDGSSFLQEGQRKAGAAVTTETEVVWAKALPAGTSAQRAELIALTQALKMAEGKKLNVYTDSRYAFATAHIHGEIYRRRGWLTSEGKEIKNKDEILALLKALFLPKRLSIIHCPGHQKGNRAEARGNRMADQAAREVATRETPETSTLLAGKRTADGSEFEKRTADGSEFESPKKKAKVE

SEQ ID NO: 6680 - protein, 2085 aa, synthetic construct
MPAAKRVKLDGGDKKYSIGLDIGTNSVGWAVITDEYKVPSKKFKVLGNTDRHSIKKNLIGALLFDSGETAEATRLKRTARRRYTRRKNRICYLQEIFSNEMAKVDDSFFHRLEESFLVEEDKKHERHPIFGNIVDEVAYHEKYPTIYHLRKKLVDSTDKADLRLIYLALAHMIKFRGHFLIEGDLNPDNSDVDKLFIQLVQTYNQLFEENPINASGVDAKAILSARLSKSRRLENLIAQLPGEKKNGLFGNLIALSLGLTPNFKSNFDLAEDAKLQLSKDTYDDDLDNLLAQIGDQYADLFLAAKNLSDAILLSDILRVNTEITKAPLSASMIKRYDEHHQDLTLLKALVRQQLPEKYKEIFFDQSKNGYAGYIDGGASQEEFYKFIKPILEKMDGTEELLVKLNREDLLRKQRTFDNGSIPHQIHLGELHAILRRQEDFYPFLKDNREKIEKILTFRIPYYVGPLARGNSRFAWMTRKSEETITPWNFEEVVDKGASAQSFIERMTNFDKNLPNEKVLPKHSLLYEYFTVYNELTKVKYVTEGMRKPAFLSGEQKKAIVDLLFKTNRKVTVKQLKEDYFKKIECFDSVEISGVEDRFNASLGTYHDLLKIIKDKDFLDNEENEDILEDIVLTLTLFEDREMIEERLKTYAHLFDDKVMKQLKRRRYTGWGRLSRKLINGIRDKQSGKTILDFLKSDGFANRNFMQLIHDDSLTFKEDIQKAQVSGQGDSLHEHIANLAGSPAIKKGILQTVKVVDELVKVMGRHKPENIVIEMARENQTTQKGQKNSRERMKRIEEGIKELGSQILKEHPVENTQLQNEKLYLYYLQNGRDMYVDQELDINRLSDYDVDHIVPQSFLKDDSIDNKVLTRSDKARGKSDNVPSEEVVKKMKNYWRQLLNAKLITQRKFDNLTKAERGGLSELDKAGFIKRQLVETRQITKHVAQILDSRMNTKYDENDKLIREVKVITLKSKLVSDFRKDFQFYKVREINNYHHAHDAYLNAVVGTALIKKYPKLESEFVYGDYKVYDVRKMIAKSEQEIGKATAKYFFYSNIMNFFKTEITLANGEIRKRPLIETNGETGEIVWDKGRDFATVRKVLSMPQVNIVKKTEVQTGGFSKESILPKRNSDKLIARKKDWDPKKYGGFDSPTVAYSVLVVAKVEKGKSKKLKSVKELLGITIMERSSFEKNPIDFLEAKGYKEVKKDLIIKLPKYSLFELENGRKRMLASAGELQKGNELALPSKYVNFLYLASHYEKLKGSPEDNEQKQLFVEQHKHYLDEIIEQISEFSKRVILADANLDKVLSAYNKHRDKPIREQAENIIHLFTLTNLGAPAAFKYFDTTIDRKRYTSTKEVLDATLIHQSITGLYETRIDLSQLGGDGGGSSGGGGGTLQLDDEYRLYSPLVKPDQNIQFWLEQFPQAWAETAGMGLAKQVPPQVIQLKASATPVSVRQYPLSKEAQEGIRPHVQRLIQQGILVPVQSPWNTPLLPVRKPGTNDYRPVQDLREVNKRVQDIHPTVPNPYNLLCALPPQRSWYTVLDLKDAFFCLRLHPTSQPLFAFEWRDPGTGRTGQLTWTRLPQGFKNSPTIFDEALHRDLANFRIQHPQVTLLQYVDDLLLAGATKQDCLEGTKALLLELSDLGYRASAKKAQICRREVTYLGYSLRDGQRWLTEARKKTVVQIPAPTTAKQVREFLGTAGFCRLWIPGFATLAAPLYPLTKEKGEFSWAPEHQKAFDAIKKALLSAPALALPDVTKPFTLYVDERKGVARGVLTQTLGPWRRPVAYLSKKLDPVASGWPVCLKAIAAVAILVKDADKLTLGQNITVIAPHALENIVRQPPDRWMTNARMTHYQSLLLTERVTFAPPAALNPATLLPEETDEPVTHDCHQLLIEETGVRKDLTDIPLTGEVLTWFTDGSSYVVEGKRMAGAAVVDGTRTIWASSLPEGTSAQKAELMALTQALRLAEGKSINIYTDSRYAFATAHVHGAIYKQRGLLTSAGREIKNKEEILSLLEALHLPKRLAIIHCPGHQKAKDPISRGNQMADRVAKQAAQGVNLLAGKRTADGSEFEKRTADGSEFESPKKKAKVE

SEQ ID NO: 6681 - protein, 2171 aa, synthetic construct
MPAAKRVKLDGGDKKYSIGLDIGTNSVGWAVITDEYKVPSKKFKVLGNTDRHSIKKNLIGALLFDSGETAEATRLKRTARRRYTRRKNRICYLQEIFSNEMAKVDDSFFHRLEESFLVEEDKKHERHPIFGNIVDEVAYHEKYPTIYHLRKKLVDSTDKADLRLIYLALAHMIKFRGHFLIEGDLNPDNSDVDKLFIQLVQTYNQLFEENPINASGVDAKAILSARLSKSRRLENLIAQLPGEKKNGLFGNLIALSLGLTPNFKSNFDLAEDAKLQLSKDTYDDDLDNLLAQIGDQYADLFLAAKNLSDAILLSDILRVNTEITKAPLSASMIKRYDEHHQDLTLLKALVRQQLPEKYKEIFFDQSKNGYAGYIDGGASQEEFYKFIKPILEKMDGTEELLVKLNREDLLRKQRTFDNGSIPHQIHLGELHAILRRQEDFYPFLKDNREKIEKILTFRIPYYVGPLARGNSRFAWMTRKSEETITPWNFEEVVDKGASAQSFIERMTNFDKNLPNEKVLPKHSLLYEYFTVYNELTKVKYVTEGMRKPAFLSGEQKKAIVDLLFKTNRKVTVKQLKEDYFKKIECFDSVEISGVEDRFNASLGTYHDLLKIIKDKDFLDNEENEDILEDIVLTLTLFEDREMIEERLKTYAHLFDDKVMKQLKRRRYTGWGRLSRKLINGIRDKQSGKTILDFLKSDGFANRNFMQLIHDDSLTFKEDIQKAQVSGQGDSLHEHIANLAGSPAIKKGILQTVKVVDELVKVMGRHKPENIVIEMARENQTTQKGQKNSRERMKRIEEGIKELGSQILKEHPVENTQLQNEKLYLYYLQNGRDMYVDQELDINRLSDYDVDHIVPQSFLKDDSIDNKVLTRSDKARGKSDNVPSEEVVKKMKNYWRQLLNAKLITQRKFDNLTKAERGGLSELDKAGFIKRQLVETRQITKHVAQILDSRMNTKYDENDKLIREVKVITLKSKLVSDFRKDFQFYKVREINNYHHAHDAYLNAVVGTALIKKYPKLESEFVYGDYKVYDVRKMIAKSEQEIGKATAKYFFYSNIMNFFKTEITLANGEIRKRPLIETNGETGEIVWDKGRDFATVRKVLSMPQVNIVKKTEVQTGGFSKESILPKRNSDKLIARKKDWDPKKYGGFDSPTVAYSVLVVAKVEKGKSKKLKSVKELLGITIMERSSFEKNPIDFLEAKGYKEVKKDLIIKLPKYSLFELENGRKRMLASAGELQKGNELALPSKYVNFLYLASHYEKLKGSPEDNEQKQLFVEQHKHYLDEIIEQISEFSKRVILADANLDKVLSAYNKHRDKPIREQAENIIHLFTLTNLGAPAAFKYFDTTIDRKRYTSTKEVLDATLIHQSITGLYETRIDLSQLGGDGGGSSGGGGGMDPLQLLQPLEAEIKGTKLKAHWNSGATITCVPQAFLEEEVPIKNIWIKTIHGEKEQPVYYLTFKIQGRKVEAEVISSPYDYILVSPSDIPWLMKKPLQLTTLVPLQEYEERLLKQTMLTGSYKEKLQSLFLKYDALWQHWENQVGHRRIKPHHIATGTVNPRPQKQYPINPKAKASIQTVINDLLKQGVLIQQNSIMNTPVYPVPKPDGKWRMVLDYREVNKTIPLIAAQNQHSAGILSSIFRGKYKTTLDLSNGFWAHSITPESYWLTAFTWLGQQYCWTRLPQGFLNSPALFNADVVDLLKEVPNVQVYVDDIYISHDDPREHLEQLEKVFSLLLNAGYVVSLKKSEIAQHEVEFLGFNITKEGRGLTETFKQKLLNITPPRDLKQLQSILGKLNFARNFIPNFSELVKPLYNIIATAPGKYITWTTDNSQQLQNIISMLNSAENLEERNPEVRLIMKVNTSPSAGYIRFYNEFAKRPIMYLNYVYTKAEVKFTNTEKLLTTIHKGLIKALDLGMGQEILVYSPIVSMTKIQKTPLPERKALPIRWITWMSYLEDPRIQFHYDKTLPELQQVPTVTDDIIAKIKHPSEFSMVFYTDGSAIKHPNVNKSHNAGMGIAQVQFKPEFTVINTWSIPLGDHTAQLAEVAAVEFACKKALKIDGPVLIVTDSFYVAESVNKELPYWQSNGFFNNKKKPLKHVSKWKSIADCIQLKPDIIIIHEKGHQPTASTFHTEGNNLADKLATQGSYVVNAGKRTADGSEFEKRTADGSEFESPKKKAKVE

SEQ ID NO: 6682 - protein, 2089 aa, synthetic construct
MPAAKRVKLDGGDKKYSIGLDIGTNSVGWAVITDEYKVPSKKFKVLGNTDRHSIKKNLIGALLFDSGETAEATRLKRTARRRYTRRKNRICYLQEIFSNEMAKVDDSFFHRLEESFLVEEDKKHERHPIFGNIVDEVAYHEKYPTIYHLRKKLVDSTDKADLRLIYLALAHMIKFRGHFLIEGDLNPDNSDVDKLFIQLVQTYNQLFEENPINASGVDAKAILSARLSKSRRLENLIAQLPGEKKNGLFGNLIALSLGLTPNFKSNFDLAEDAKLQLSKDTYDDDLDNLLAQIGDQYADLFLAAKNLSDAILLSDILRVNTEITKAPLSASMIKRYDEHHQDLTLLKALVRQQLPEKYKEIFFDQSKNGYAGYIDGGASQEEFYKFIKPILEKMDGTEELLVKLNREDLLRKQRTFDNGSIPHQIHLGELHAILRRQEDFYPFLKDNREKIEKILTFRIPYYVGPLARGNSRFAWMTRKSEETITPWNFEEVVDKGASAQSFIERMTNFDKNLPNEKVLPKHSLLYEYFTVYNELTKVKYVTEGMRKPAFLSGEQKKAIVDLLFKTNRKVTVKQLKEDYFKKIECFDSVEISGVEDRFNASLGTYHDLLKIIKDKDFLDNEENEDILEDIVLTLTLFEDREMIEERLKTYAHLFDDKVMKQLKRRRYTGWGRLSRKLINGIRDKQSGKTILDFLKSDGFANRNFMQLIHDDSLTFKEDIQKAQVSGQGDSLHEHIANLAGSPAIKKGILQTVKVVDELVKVMGRHKPENIVIEMARENQTTQKGQKNSRERMKRIEEGIKELGSQILKEHPVENTQLQNEKLYLYYLQNGRDMYVDQELDINRLSDYDVDHIVPQSFLKDDSIDNKVLTRSDKARGKSDNVPSEEVVKKMKNYWRQLLNAKLITQRKFDNLTKAERGGLSELDKAGFIKRQLVETRQITKHVAQILDSRMNTKYDENDKLIREVKVITLKSKLVSDFRKDFQFYKVREINNYHHAHDAYLNAVVGTALIKKYPKLESEFVYGDYKVYDVRKMIAKSEQEIGKATAKYFFYSNIMNFFKTEITLANGEIRKRPLIETNGETGEIVWDKGRDFATVRKVLSMPQVNIVKKTEVQTGGFSKESILPKRNSDKLIARKKDWDPKKYGGFDSPTVAYSVLVVAKVEKGKSKKLKSVKELLGITIMERSSFEKNPIDFLEAKGYKEVKKDLIIKLPKYSLFELENGRKRMLASAGELQKGNELALPSKYVNFLYLASHYEKLKGSPEDNEQKQLFVEQHKHYLDEIIEQISEFSKRVILADANLDKVLSAYNKHRDKPIREQAENIIHLFTLTNLGAPAAFKYFDTTIDRKRYTSTKEVLDATLIHQSITGLYETRIDLSQLGGDGGGSSGGGGGVLNLEEEYRLHEKPVPSSIDPSWLQLFPTVWAERAGMGLANQVPPVVVELRSGASPVAVRQYPMSKEAREGIRPHIQRFLDLGVLVPCQSPWNTPLLPVKKPGTNDYRPVQDLREINKRVQDIHPTVPNPYNLLSSLPPSHTWYSVLDLKDAFFCLKLHPNSQPLFAFEWRDPEKGNTGQLTWTRLPQGFKNSPTLFDEALHRDLAPFRALNPQVVLLQYVDDLLVAAPTYRDCKEGTQKLLQELSKLGYRVSAKKAQLCQKEVTYLGYLLKEGKRWLTPARKATVMKIPPPTTPRQVREFLGTAGFCRLWIPGFASLAAPLYPLTKESIPFIWTEEHQKAFDRIKEALLSAPALALPDLTKPFTLYVDERAGVARGVLTQTLGPWRRPVAYLSKKLDPVASGWPTCLKAVAAVALLLKDADKLTLGQNVTVIASHSLESIVRQPPDRWMTNARMTHYQSLLLNERVSFAPPAVLNPATLLPVESEATPVHRCSEILAEETGTRRDLKDQPLPGVPAWYTDGSSFIAEGKRRAGAAIVDGKRTVWASSLPEGTSAQKAELVALTQALRLAEGKDINIYTDSRYAFATAHIHGAIYKQRGLLTSAGKDIKNKEEILALLEAIHLPKRVAIIHCPGHQKGNDPVATGNRRADEAAKQAALSTRVLAETTKPAGKRTADGSEFEKRTADGSEFESPKKKAKVE

SEQ ID NO: 6683 - protein, 2095 aa, synthetic construct
MPAAKRVKLDGGDKKYSIGLDIGTNSVGWAVITDEYKVPSKKFKVLGNTDRHSIKKNLIGALLFDSGETAEATRLKRTARRRYTRRKNRICYLQEIFSNEMAKVDDSFFHRLEESFLVEEDKKHERHPIFGNIVDEVAYHEKYPTIYHLRKKLVDSTDKADLRLIYLALAHMIKFRGHFLIEGDLNPDNSDVDKLFIQLVQTYNQLFEENPINASGVDAKAILSARLSKSRRLENLIAQLPGEKKNGLFGNLIALSLGLTPNFKSNFDLAEDAKLQLSKDTYDDDLDNLLAQIGDQYADLFLAAKNLSDAILLSDILRVNTEITKAPLSASMIKRYDEHHQDLTLLKALVRQQLPEKYKEIFFDQSKNGYAGYIDGGASQEEFYKFIKPILEKMDGTEELLVKLNREDLLRKQRTFDNGSIPHQIHLGELHAILRRQEDFYPFLKDNREKIEKILTFRIPYYVGPLARGNSRFAWMTRKSEETITPWNFEEVVDKGASAQSFIERMTNFDKNLPNEKVLPKHSLLYEYFTVYNELTKVKYVTEGMRKPAFLSGEQKKAIVDLLFKTNRKVTVKQLKEDYFKKIECFDSVEISGVEDRFNASLGTYHDLLKIIKDKDFLDNEENEDILEDIVLTLTLFEDREMIEERLKTYAHLFDDKVMKQLKRRRYTGWGRLSRKLINGIRDKQSGKTILDFLKSDGFANRNFMQLIHDDSLTFKEDIQKAQVSGQGDSLHEHIANLAGSPAIKKGILQTVKVVDELVKVMGRHKPENIVIEMARENQTTQKGQKNSRERMKRIEEGIKELGSQILKEHPVENTQLQNEKLYLYYLQNGRDMYVDQELDINRLSDYDVDHIVPQSFLKDDSIDNKVLTRSDKARGKSDNVPSEEVVKKMKNYWRQLLNAKLITQRKFDNLTKAERGGLSELDKAGFIKRQLVETRQITKHVAQILDSRMNTKYDENDKLIREVKVITLKSKLVSDFRKDFQFYKVREINNYHHAHDAYLNAVVGTALIKKYPKLESEFVYGDYKVYDVRKMIAKSEQEIGKATAKYFFYSNIMNFFKTEITLANGEIRKRPLIETNGETGEIVWDKGRDFATVRKVLSMPQVNIVKKTEVQTGGFSKESILPKRNSDKLIARKKDWDPKKYGGFDSPTVAYSVLVVAKVEKGKSKKLKSVKELLGITIMERSSFEKNPIDFLEAKGYKEVKKDLIIKLPKYSLFELENGRKRMLASAGELQKGNELALPSKYVNFLYLASHYEKLKGSPEDNEQKQLFVEQHKHYLDEIIEQISEFSKRVILADANLDKVLSAYNKHRDKPIREQAENIIHLFTLTNLGAPAAFKYFDTTIDRKRYTSTKEVLDATLIHQSITGLYETRIDLSQLGGDGGGGGEAAAKGGTAPLEEEYRLFLEAPIQNVTLLEQWKREIPKVWAEINPPGLASTQAPIHVQLLSTALPVRVRQYPITLEAKRSLRETIRKFRAAGILRPVHSPWNTPLLPVRKSGTSEYRMVQDLREVNKRVETIHPTVPNPYTLLSLLPPDRIWYSVLDLKDAFFCIPLAPESQLIFAFEWADAEEGESGQLTWTRLPQGFKNSPTLFNEALNRDLQGFRLDHPSVSLLQYVDDLLIAADTQAACLSATRDLLMTLAELGYRVSGKKAQLCQEEVTYLGFKIHKGSRSLSNSRTQAILQIPVPKTKRQVREFLGTIGYCRLWIPGFAELAQPLYAATRPGNDPLVWGEKEEEAFQSLKLALTQPPALALPSLDKPFQLFVEETSGAAKGVLTQALGPWKRPVAYLSKRLDPVAAGWPRCLRAIAAAALLTREASKLTFGQDIEITSSHNLESLLRSPPDKWLTNARITQYQVLLLDPPRVRFKQTAALNPATLLPETDDTLPIHHCLDTLDSLTSTRPDLTDQPLAQAEATLFTDGSSYIRDGKRYAGAAVVTLDSVIWAEPLPIGTSAQKAELIALTKALEWSKDKSVNIYTDSRYAFATLHVHGMIYRERGWLTAGGKAIKNAPEILALLTAVWLPKRVAVMHCKGHQKDDAPTSTGNRRADEVAREVAIRPLSTQATISAGKRTADGSEFEKRTADGSEFESPKKKAKVE

SEQ ID NO: 6684 - protein, 2099 aa, synthetic construct
MPAAKRVKLDGGDKKYSIGLDIGTNSVGWAVITDEYKVPSKKFKVLGNTDRHSIKKNLIGALLFDSGETAEATRLKRTARRRYTRRKNRICYLQEIFSNEMAKVDDSFFHRLEESFLVEEDKKHERHPIFGNIVDEVAYHEKYPTIYHLRKKLVDSTDKADLRLIYLALAHMIKFRGHFLIEGDLNPDNSDVDKLFIQLVQTYNQLFEENPINASGVDAKAILSARLSKSRRLENLIAQLPGEKKNGLFGNLIALSLGLTPNFKSNFDLAEDAKLQLSKDTYDDDLDNLLAQIGDQYADLFLAAKNLSDAILLSDILRVNTEITKAPLSASMIKRYDEHHQDLTLLKALVRQQLPEKYKEIFFDQSKNGYAGYIDGGASQEEFYKFIKPILEKMDGTEELLVKLNREDLLRKQRTFDNGSIPHQIHLGELHAILRRQEDFYPFLKDNREKIEKILTFRIPYYVGPLARGNSRFAWMTRKSEETITPWNFEEVVDKGASAQSFIERMTNFDKNLPNEKVLPKHSLLYEYFTVYNELTKVKYVTEGMRKPAFLSGEQKKAIVDLLFKTNRKVTVKQLKEDYFKKIECFDSVEISGVEDRFNASLGTYHDLLKIIKDKDFLDNEENEDILEDIVLTLTLFEDREMIEERLKTYAHLFDDKVMKQLKRRRYTGWGRLSRKLINGIRDKQSGKTILDFLKSDGFANRNFMQLIHDDSLTFKEDIQKAQVSGQGDSLHEHIANLAGSPAIKKGILQTVKVVDELVKVMGRHKPENIVIEMARENQTTQKGQKNSRERMKRIEEGIKELGSQILKEHPVENTQLQNEKLYLYYLQNGRDMYVDQELDINRLSDYDVDHIVPQSFLKDDSIDNKVLTRSDKARGKSDNVPSEEVVKKMKNYWRQLLNAKLITQRKFDNLTKAERGGLSELDKAGFIKRQLVETRQITKHVAQILDSRMNTKYDENDKLIREVKVITLKSKLVSDFRKDFQFYKVREINNYHHAHDAYLNAVVGTALIKKYPKLESEFVYGDYKVYDVRKMIAKSEQEIGKATAKYFFYSNIMNFFKTEITLANGEIRKRPLIETNGETGEIVWDKGRDFATVRKVLSMPQVNIVKKTEVQTGGFSKESILPKRNSDKLIARKKDWDPKKYGGFDSPTVAYSVLVVAKVEKGKSKKLKSVKELLGITIMERSSFEKNPIDFLEAKGYKEVKKDLIIKLPKYSLFELENGRKRMLASAGELQKGNELALPSKYVNFLYLASHYEKLKGSPEDNEQKQLFVEQHKHYLDEIIEQISEFSKRVILADANLDKVLSAYNKHRDKPIREQAENIIHLFTLTNLGAPAAFKYFDTTIDRKRYTSTKEVLDATLIHQSITGLYETRIDLSQLGGDGGGGGEAAAKGGTVSLQDEHRLFDIPVTTSLPDVWLQDFPQAWAETGGLGRAKCQAPIIIDLKPTAVPVSIKQYPMSLEAHMGIRQHIIKFLELGVLRPCRSPWNTPLLPVKKPGTQDYRPVQDLREINKRTVDIHPTVPNPYNLLSTLKPDYSWYTVLDLKDAFFCLPLAPQSQELFAFEWKDPERGISGQLTWTRLPQGFKNSPTLFDEALHRDLTDFRTQHPEVTLLQYVDDLLLAAPTKKACTQGTRHLLQELGEKGYRASAKKAQICQTKVTYLGYILSEGKRWLTPGRIETVARIPPPRNPREVREFLGTAGFCRLWIPGFAELAAPLYALTKESTPFTWQTEHQLAFEALKKALLSAPALGLPDTSKPFTLFLDERQGIAKGVLTQKLGPWKRPVAYLSKKLDPVAAGWPPCLRIMAATAMLVKDSAKLTLGQPLTVITPHTLEAIVRQPPDRWITNARLTHYQALLLDTDRVQFGPPVTLNPATLLPVPENQPSPHDCRQVLAETHGTREDLKDQELPDADHTWYTDGSSYLDSGTRRAGAAVVDGHNTIWAQSLPPGTSAQKAELIALTKALELSKGKKANIYTDSRYAFATAHTHGSIYERRGLLTSEGKEIKNKAEIIALLKALFLPQEVAIIHCPGHQKGQDPVAVGNRQADRVARQAAMAEVLTLATEPDNTSHITAGKRTADGSEFEKRTADGSEFESPKKKAKVE

SEQ ID NO: 6685 - protein, 2092 aa, synthetic construct
MPAAKRVKLDGGDKKYSIGLDIGTNSVGWAVITDEYKVPSKKFKVLGNTDRHSIKKNLIGALLFDSGETAEATRLKRTARRRYTRRKNRICYLQEIFSNEMAKVDDSFFHRLEESFLVEEDKKHERHPIFGNIVDEVAYHEKYPTIYHLRKKLVDSTDKADLRLIYLALAHMIKFRGHFLIEGDLNPDNSDVDKLFIQLVQTYNQLFEENPINASGVDAKAILSARLSKSRRLENLIAQLPGEKKNGLFGNLIALSLGLTPNFKSNFDLAEDAKLQLSKDTYDDDLDNLLAQIGDQYADLFLAAKNLSDAILLSDILRVNTEITKAPLSASMIKRYDEHHQDLTLLKALVRQQLPEKYKEIFFDQSKNGYAGYIDGGASQEEFYKFIKPILEKMDGTEELLVKLNREDLLRKQRTFDNGSIPHQIHLGELHAILRRQEDFYPFLKDNREKIEKILTFRIPYYVGPLARGNSRFAWMTRKSEETITPWNFEEVVDKGASAQSFIERMTNFDKNLPNEKVLPKHSLLYEYFTVYNELTKVKYVTEGMRKPAFLSGEQKKAIVDLLFKTNRKVTVKQLKEDYFKKIECFDSVEISGVEDRFNASLGTYHDLLKIIKDKDFLDNEENEDILEDIVLTLTLFEDREMIEERLKTYAHLFDDKVMKQLKRRRYTGWGRLSRKLINGIRDKQSGKTILDFLKSDGFANRNFMQLIHDDSLTFKEDIQKAQVSGQGDSLHEHIANLAGSPAIKKGILQTVKVVDELVKVMGRHKPENIVIEMARENQTTQKGQKNSRERMKRIEEGIKELGSQILKEHPVENTQLQNEKLYLYYLQNGRDMYVDQELDINRLSDYDVDHIVPQSFLKDDSIDNKVLTRSDKARGKSDNVPSEEVVKKMKNYWRQLLNAKLITQRKFDNLTKAERGGLSELDKAGFIKRQLVETRQITKHVAQILDSRMNTKYDENDKLIREVKVITLKSKLVSDFRKDFQFYKVREINNYHHAHDAYLNAVVGTALIKKYPKLESEFVYGDYKVYDVRKMIAKSEQEIGKATAKYFFYSNIMNFFKTEITLANGEIRKRPLIETNGETGEIVWDKGRDFATVRKVLSMPQVNIVKKTEVQTGGFSKESILPKRNSDKLIARKKDWDPKKYGGFDSPTVAYSVLVVAKVEKGKSKKLKSVKELLGITIMERSSFEKNPIDFLEAKGYKEVKKDLIIKLPKYSLFELENGRKRMLASAGELQKGNELALPSKYVNFLYLASHYEKLKGSPEDNEQKQLFVEQHKHYLDEIIEQISEFSKRVILADANLDKVLSAYNKHRDKPIREQAENIIHLFTLTNLGAPAAFKYFDTTIDRKRYTSTKEVLDATLIHQSITGLYETRIDLSQLGGDGGGGGEAAAKGGTLQLEEEYRLFEPESTQKQEMDIWLKNFPQAWAETGGMGTAHCQAPVLIQLKATATPISIRQYPMPHEAYQGIKPHIRRMLDQGILKPCQSPWNTPLLPVKKPGTEDYRPVQDLREVNKRVEDIHPTVPNPYNLLSTLPPSHPWYTVLDLKDAFFCLRLHSESQLLFAFEWRDPEIGLSGQLTWTRLPQGFKNSPTLFNEALHSDLADFRVRYPALVLLQYVDDLLLAAATRTECLEGTKALLETLGNKGYRASAKKAQICLQEVTYLGYSLKDGQRWLTKARKEAILSIPVPKNSRQVREFLGTAGYCRLWIPGFAELAAPLYPLTRPGTLFQWGTEQQLAFEDIKKALLSSPALGLPDITKPFELFIDENSGFAKGVLVQKLGPWKRPVAYLSKKLDTVASGWPPCLRMVAAIAILVKDAGKLTLGQPLTILTSHPVEALVRQPPNKWLSNARMTHYQAMLLDAERVHFGPTVSLNPATLLPLPSGGNHHDCLQILAETHGTRPDLTDQPLPDADLTWYTDGSSFIRNGEREAGAAVTTESEVIWAAPLPPGTSAQRAELIALTQALKMAEGKKLTVYTDSRYAFATTHVHGEIYRRRGWLTSEGKEIKNKNEILALLEALFLPKRLSIIHCPGHQKGDSPQAKGNRLADDTAKKAATETHSSLTVLPAGKRTADGSEFEKRTADGSEFESPKKKAKVE

SEQ ID NO: 6686 - protein, 2124 aa, synthetic construct
MPAAKRVKLDGGDKKYSIGLDIGTNSVGWAVITDEYKVPSKKFKVLGNTDRHSIKKNLIGALLFDSGETAEATRLKRTARRRYTRRKNRICYLQEIFSNEMAKVDDSFFHRLEESFLVEEDKKHERHPIFGNIVDEVAYHEKYPTIYHLRKKLVDSTDKADLRLIYLALAHMIKFRGHFLIEGDLNPDNSDVDKLFIQLVQTYNQLFEENPINASGVDAKAILSARLSKSRRLENLIAQLPGEKKNGLFGNLIALSLGLTPNFKSNFDLAEDAKLQLSKDTYDDDLDNLLAQIGDQYADLFLAAKNLSDAILLSDILRVNTEITKAPLSASMIKRYDEHHQDLTLLKALVRQQLPEKYKEIFFDQSKNGYAGYIDGGASQEEFYKFIKPILEKMDGTEELLVKLNREDLLRKQRTFDNGSIPHQIHLGELHAILRRQEDFYPFLKDNREKIEKILTFRIPYYVGPLARGNSRFAWMTRKSEETITPWNFEEVVDKGASAQSFIERMTNFDKNLPNEKVLPKHSLLYEYFTVYNELTKVKYVTEGMRKPAFLSGEQKKAIVDLLFKTNRKVTVKQLKEDYFKKIECFDSVEISGVEDRFNASLGTYHDLLKIIKDKDFLDNEENEDILEDIVLTLTLFEDREMIEERLKTYAHLFDDKVMKQLKRRRYTGWGRLSRKLINGIRDKQSGKTILDFLKSDGFANRNFMQLIHDDSLTFKEDIQKAQVSGQGDSLHEHIANLAGSPAIKKGILQTVKVVDELVKVMGRHKPENIVIEMARENQTTQKGQKNSRERMKRIEEGIKELGSQILKEHPVENTQLQNEKLYLYYLQNGRDMYVDQELDINRLSDYDVDHIVPQSFLKDDSIDNKVLTRSDKARGKSDNVPSEEVVKKMKNYWRQLLNAKLITQRKFDNLTKAERGGLSELDKAGFIKRQLVETRQITKHVAQILDSRMNTKYDENDKLIREVKVITLKSKLVSDFRKDFQFYKVREINNYHHAHDAYLNAVVGTALIKKYPKLESEFVYGDYKVYDVRKMIAKSEQEIGKATAKYFFYSNIMNFFKTEITLANGEIRKRPLIETNGETGEIVWDKGRDFATVRKVLSMPQVNIVKKTEVQTGGFSKESILPKRNSDKLIARKKDWDPKKYGGFDSPTVAYSVLVVAKVEKGKSKKLKSVKELLGITIMERSSFEKNPIDFLEAKGYKEVKKDLIIKLPKYSLFELENGRKRMLASAGELQKGNELALPSKYVNFLYLASHYEKLKGSPEDNEQKQLFVEQHKHYLDEIIEQISEFSKRVILADANLDKVLSAYNKHRDKPIREQAENIIHLFTLTNLGAPAAFKYFDTTIDRKRYTSTKEVLDATLIHQSITGLYETRIDLSQLGGDGGGGGEAAAKGGLLGRDLLTKLKAQIQFSTEGPQVTWEDRPAMCLVLNLEEEYRLHEKPVPPSIDPSWLQLFPMVWAEKAGMGLANQVPPVVVELKSDASPVAVRQYPMSKEAREGIRPHIQRFLDLGILVPCQSPWNTPLLPVKKPGTNDYRPVQDLREVNKRVQDIHPTVPNPYNLLSSLPPSHTWYSVLDLKDAFFCLKLHPNSQPLFAFEWRDPEKGNTGQLTWTRLPQGFKNSPTLFNEALHRDLASFRALNPQVVMLQYVDDLLVAAPTYRDCKEGTRRLLQELSKLGYRVSAKKAQLCREEVTYLGYLLKGGKRWLTPARKATVMKIPTPTTPRQVREFLGKAGFCRLFIPGFASLAAPLYPLTRPKVPFTWTEAHQEAFGRIKEALLSAPALALPDLTKPFALYVDEKEGVARGVLTQTLGPWRRPVAYLSKKLDPVASGWPTCLKAIAAVALLLKDADKLTLGQNVLVIAPHNLESIVRQPPDRWMTNARMTHYQSLLLNERVSFAPPAILNPATLLPVESDDTPIHICSEILAEETGTRPDLRDQPLPGVPAWYTDGSSFIMDGRRQAGAAIVDNKRTVWASNLPEGTSAQKAELIALTQALRLAEGKSINIYTDSRYAFATAHVHGAIYKQRGWLTSAGKDIKNKEEILALLEAIHLPKRVAIIHCPGHQRGTDPVATGNRKADEAAKQAAQSTRILTETTKNAGKRTADGSEFEKRTADGSEFESPKKKAKVE

SEQ ID NO: 6687 - protein, 2215 aa, synthetic construct
MPAAKRVKLDGGDKKYSIGLDIGTNSVGWAVITDEYKVPSKKFKVLGNTDRHSIKKNLIGALLFDSGETAEATRLKRTARRRYTRRKNRICYLQEIFSNEMAKVDDSFFHRLEESFLVEEDKKHERHPIFGNIVDEVAYHEKYPTIYHLRKKLVDSTDKADLRLIYLALAHMIKFRGHFLIEGDLNPDNSDVDKLFIQLVQTYNQLFEENPINASGVDAKAILSARLSKSRRLENLIAQLPGEKKNGLFGNLIALSLGLTPNFKSNFDLAEDAKLQLSKDTYDDDLDNLLAQIGDQYADLFLAAKNLSDAILLSDILRVNTEITKAPLSASMIKRYDEHHQDLTLLKALVRQQLPEKYKEIFFDQSKNGYAGYIDGGASQEEFYKFIKPILEKMDGTEELLVKLNREDLLRKQRTFDNGSIPHQIHLGELHAILRRQEDFYPFLKDNREKIEKILTFRIPYYVGPLARGNSRFAWMTRKSEETITPWNFEEVVDKGASAQSFIERMTNFDKNLPNEKVLPKHSLLYEYFTVYNELTKVKYVTEGMRKPAFLSGEQKKAIVDLLFKTNRKVTVKQLKEDYFKKIECFDSVEISGVEDRFNASLGTYHDLLKIIKDKDFLDNEENEDILEDIVLTLTLFEDREMIEERLKTYAHLFDDKVMKQLKRRRYTGWGRLSRKLINGIRDKQSGKTILDFLKSDGFANRNFMQLIHDDSLTFKEDIQKAQVSGQGDSLHEHIANLAGSPAIKKGILQTVKVVDELVKVMGRHKPENIVIEMARENQTTQKGQKNSRERMKRIEEGIKELGSQILKEHPVENTQLQNEKLYLYYLQNGRDMYVDQELDINRLSDYDVDHIVPQSFLKDDSIDNKVLTRSDKARGKSDNVPSEEVVKKMKNYWRQLLNAKLITQRKFDNLTKAERGGLSELDKAGFIKRQLVETRQITKHVAQILDSRMNTKYDENDKLIREVKVITLKSKLVSDFRKDFQFYKVREINNYHHAHDAYLNAVVGTALIKKYPKLESEFVYGDYKVYDVRKMIAKSEQEIGKATAKYFFYSNIMNFFKTEITLANGEIRKRPLIETNGETGEIVWDKGRDFATVRKVLSMPQVNIVKKTEVQTGGFSKESILPKRNSDKLIARKKDWDPKKYGGFDSPTVAYSVLVVAKVEKGKSKKLKSVKELLGITIMERSSFEKNPIDFLEAKGYKEVKKDLIIKLPKYSLFELENGRKRMLASAGELQKGNELALPSKYVNFLYLASHYEKLKGSPEDNEQKQLFVEQHKHYLDEIIEQISEFSKRVILADANLDKVLSAYNKHRDKPIREQAENIIHLFTLTNLGAPAAFKYFDTTIDRKRYTSTKEVLDATLIHQSITGLYETRIDLSQLGGDGGGGGEAAAKGGTLGDQGSRGSDPLPEPRVTLTVEGIPTEFLVNTGAEHSVLTKPMGKMGSKRTVVAGATGSKVYPWTTKRLLKIGQKQVTHSFLVIPECPAPLLGRDLLTKLKAQIQFSTEGPQVTWEDRPAMCLVLNLEEEYRLHEKPVPPSIDPSWLQLFPMVWAEKAGMGLANQVPPVVVELKSDASPVAVRQYPMSKEAREGIRPHIQRFLDLGILVPCQSPWNTPLLPVKKPGTNDYRPVQDLREVNKRVQDIHPTVPNPYNLLSSLPPSHTWYSVLDLKDAFFCLKLHPNSQPLFAFEWRDPEKGNTGQLTWTRLPQGFKNSPTLFNEALHRDLASFRALNPQVVMLQYVDDLLVAAPTYRDCKEGTRRLLQELSKLGYRVSAKKAQLCREEVTYLGYLLKGGKRWLTPARKATVMKIPTPTTPRQVREFLGTAGFCRLWIPGFASLAAPLYPLTRPKVPFTWTEAHQEAFGRIKEALLSAPALALPDLTKPFALYVDEKEGVARGVLTQTLGPWRRPVAYLSKKLDPVASGWPTCLKAIAAVALLLKDADKLTLGQNVLVIAPHNLESIVRQPPDRWMTNARMTHYQSLLLNERVSFAPPAILNPATLLPVESDDTPIHICSEILAEETGTRPDLRDQPLPGVPAWYTDGSSFIMDGRRQAGAAIVDNKRTVWASNLPEGTSAQKAELIALTQALRLAEGKSINIYTDSRYAFATAHVHGAIYKQRGWLTSAGKDIKNKEEILALLEAIHLPKRVAIIHCPGHQRGTDPVATGNRKADEAAKQAAQSTRILTETTKNAGKRTADGSEFEKRTADGSEFESPKKKAKVE

SEQ ID NO: 6688 - protein, 2215 aa, synthetic construct
MPAAKRVKLDGGDKKYSIGLDIGTNSVGWAVITDEYKVPSKKFKVLGNTDRHSIKKNLIGALLFDSGETAEATRLKRTARRRYTRRKNRICYLQEIFSNEMAKVDDSFFHRLEESFLVEEDKKHERHPIFGNIVDEVAYHEKYPTIYHLRKKLVDSTDKADLRLIYLALAHMIKFRGHFLIEGDLNPDNSDVDKLFIQLVQTYNQLFEENPINASGVDAKAILSARLSKSRRLENLIAQLPGEKKNGLFGNLIALSLGLTPNFKSNFDLAEDAKLQLSKDTYDDDLDNLLAQIGDQYADLFLAAKNLSDAILLSDILRVNTEITKAPLSASMIKRYDEHHQDLTLLKALVRQQLPEKYKEIFFDQSKNGYAGYIDGGASQEEFYKFIKPILEKMDGTEELLVKLNREDLLRKQRTFDNGSIPHQIHLGELHAILRRQEDFYPFLKDNREKIEKILTFRIPYYVGPLARGNSRFAWMTRKSEETITPWNFEEVVDKGASAQSFIERMTNFDKNLPNEKVLPKHSLLYEYFTVYNELTKVKYVTEGMRKPAFLSGEQKKAIVDLLFKTNRKVTVKQLKEDYFKKIECFDSVEISGVEDRFNASLGTYHDLLKIIKDKDFLDNEENEDILEDIVLTLTLFEDREMIEERLKTYAHLFDDKVMKQLKRRRYTGWGRLSRKLINGIRDKQSGKTILDFLKSDGFANRNFMQLIHDDSLTFKEDIQKAQVSGQGDSLHEHIANLAGSPAIKKGILQTVKVVDELVKVMGRHKPENIVIEMARENQTTQKGQKNSRERMKRIEEGIKELGSQILKEHPVENTQLQNEKLYLYYLQNGRDMYVDQELDINRLSDYDVDHIVPQSFLKDDSIDNKVLTRSDKARGKSDNVPSEEVVKKMKNYWRQLLNAKLITQRKFDNLTKAERGGLSELDKAGFIKRQLVETRQITKHVAQILDSRMNTKYDENDKLIREVKVITLKSKLVSDFRKDFQFYKVREINNYHHAHDAYLNAVVGTALIKKYPKLESEFVYGDYKVYDVRKMIAKSEQEIGKATAKYFFYSNIMNFFKTEITLANGEIRKRPLIETNGETGEIVWDKGRDFATVRKVLSMPQVNIVKKTEVQTGGFSKESILPKRNSDKLIARKKDWDPKKYGGFDSPTVAYSVLVVAKVEKGKSKKLKSVKELLGITIMERSSFEKNPIDFLEAKGYKEVKKDLIIKLPKYSLFELENGRKRMLASAGELQKGNELALPSKYVNFLYLASHYEKLKGSPEDNEQKQLFVEQHKHYLDEIIEQISEFSKRVILADANLDKVLSAYNKHRDKPIREQAENIIHLFTLTNLGAPAAFKYFDTTIDRKRYTSTKEVLDATLIHQSITGLYETRIDLSQLGGDGGGGGEAAAKGGTLGDQGSRGSDPLPEPRVTLTVEGIPTEFLVNTGAEHSVLTKPMGKMGSKRTVVAGATGSKVYPWTTKRLLKIGQKQVTHSFLVIPECPAPLLGRDLLTKLKAQIQFSTEGPQVTWEDRPAMCLVLNLEEEYRLHEKPVPPSIDPSWLQLFPMVWAEKAGMGLANQVPPVVVELKSDASPVAVRQYPMSKEAREGIRPHIQRFLDLGILVPCQSPWNTPLLPVKKPGTNDYRPVQDLREVNKRVQDIHPTVPNPYNLLSSLPPSHTWYSVLDLKDAFFCLKLHPNSQPLFAFEWRDPEKGNTGQLTWTRLPQGFKNSPTLFNEALHRDLASFRALNPQVVMLQYVDDLLVAAPTYRDCKEGTRRLLQELSKLGYRVSAKKAQLCREEVTYLGYLLKGGKRWLTPARKATVMKIPTPTTPRQVREFLGKAGFCRLFIPGFASLAAPLYPLTRPKVPFTWTEAHQEAFGRIKEALLSAPALALPDLTKPFALYVDEKEGVARGVLTQTLGPWRRPVAYLSKKLDPVASGWPTCLKAIAAVALLLKDADKLTLGQNVLVIAPHNLESIVRQPPDRWMTNARMTHYQSLLLNERVSFAPPAILNPATLLPVESDDTPIHICSEILAEETGTRPDLRDQPLPGVPAWYTDGSSFIMDGRRQAGAAIVDNKRTVWASNLPEGTSAQKAELIALTQALRLAEGKSINIYTDSRYAFATAHVHGAIYKQRGWLTSAGKDIKNKEEILALLEAIHLPKRVAIIHCPGHQRGTDPVATGNRKADEAAKQAAQSTRILTETTKNAGKRTADGSEFEKRTADGSEFESPKKKAKVE

SEQ ID NO: 6689 - protein, 2093 aa, synthetic construct
MPAAKRVKLDGGDKKYSIGLDIGTNSVGWAVITDEYKVPSKKFKVLGNTDRHSIKKNLIGALLFDSGETAEATRLKRTARRRYTRRKNRICYLQEIFSNEMAKVDDSFFHRLEESFLVEEDKKHERHPIFGNIVDEVAYHEKYPTIYHLRKKLVDSTDKADLRLIYLALAHMIKFRGHFLIEGDLNPDNSDVDKLFIQLVQTYNQLFEENPINASGVDAKAILSARLSKSRRLENLIAQLPGEKKNGLFGNLIALSLGLTPNFKSNFDLAEDAKLQLSKDTYDDDLDNLLAQIGDQYADLFLAAKNLSDAILLSDILRVNTEITKAPLSASMIKRYDEHHQDLTLLKALVRQQLPEKYKEIFFDQSKNGYAGYIDGGASQEEFYKFIKPILEKMDGTEELLVKLNREDLLRKQRTFDNGSIPHQIHLGELHAILRRQEDFYPFLKDNREKIEKILTFRIPYYVGPLARGNSRFAWMTRKSEETITPWNFEEVVDKGASAQSFIERMTNFDKNLPNEKVLPKHSLLYEYFTVYNELTKVKYVTEGMRKPAFLSGEQKKAIVDLLFKTNRKVTVKQLKEDYFKKIECFDSVEISGVEDRFNASLGTYHDLLKIIKDKDFLDNEENEDILEDIVLTLTLFEDREMIEERLKTYAHLFDDKVMKQLKRRRYTGWGRLSRKLINGIRDKQSGKTILDFLKSDGFANRNFMQLIHDDSLTFKEDIQKAQVSGQGDSLHEHIANLAGSPAIKKGILQTVKVVDELVKVMGRHKPENIVIEMARENQTTQKGQKNSRERMKRIEEGIKELGSQILKEHPVENTQLQNEKLYLYYLQNGRDMYVDQELDINRLSDYDVDHIVPQSFLKDDSIDNKVLTRSDKARGKSDNVPSEEVVKKMKNYWRQLLNAKLITQRKFDNLTKAERGGLSELDKAGFIKRQLVETRQITKHVAQILDSRMNTKYDENDKLIREVKVITLKSKLVSDFRKDFQFYKVREINNYHHAHDAYLNAVVGTALIKKYPKLESEFVYGDYKVYDVRKMIAKSEQEIGKATAKYFFYSNIMNFFKTEITLANGEIRKRPLIETNGETGEIVWDKGRDFATVRKVLSMPQVNIVKKTEVQTGGFSKESILPKRNSDKLIARKKDWDPKKYGGFDSPTVAYSVLVVAKVEKGKSKKLKSVKELLGITIMERSSFEKNPIDFLEAKGYKEVKKDLIIKLPKYSLFELENGRKRMLASAGELQKGNELALPSKYVNFLYLASHYEKLKGSPEDNEQKQLFVEQHKHYLDEIIEQISEFSKRVILADANLDKVLSAYNKHRDKPIREQAENIIHLFTLTNLGAPAAFKYFDTTIDRKRYTSTKEVLDATLIHQSITGLYETRIDLSQLGGDGGGGGEAAAKGGTLNLEDEYRLYETSAEPEVSPGSTWLSDFPQAWAETGGMGLAVRQAPLIIPLKATSTPVSIKQYPMSQEAKLGIKPHIQRLLDQGILVPCQSPWNTPLLPVKKPGTNDYRPVQDLREVNKRVEDIHPTVPNPYNLLSGLPPSHRWYTVLDLKDAFFCLRLHPTSQPLFAFEWRDPGMGISGQLTWTRLPQGFKNSPTLFNEALHRDLADFRIQHPDLILLQYVDDILLAATSELDCQQGTRALLLTLGNLGYRASAKKAQLCQKQVKYLGYLLKEGQRWLTEARKETVMGQPTPKTPRQLREFLGTAGFCRLWIPGFAEMAAPLYPLTKPGTLFNWGPDQQKAYQEIKQALLTAPALGLPDLTKPFELFVDEKQGYAKGVLTQKLGPWRRPVAYLSKKLDPVAAGWPPCLRMVAAIAVLRKDAGKLTMGQPLVILAPHAVEALVKQPPDRWLSNARMTHYQAMLLDTDRVQFGPVVALNPATLLPLPEEGAPHDCLEILAETHGTRPDLTDQPIPDADHTWYTDGSSFLQEGQRKAGAAVTTETEVIWARALPAGTSAQRAELIALTQALKMAEGKRLNVYTDSRYAFATAHIHGEIYRRRGWLTSEGREIKNKSEILALLKALFLPKRLSIIHCLGHQKGDSAEARGNRLADQAAREAAIKTPPDTSTLLAGKRTADGSEFEKRTADGSEFESPKKKAKVE

SEQ ID NO: 6690 - protein, 2093 aa, synthetic construct
MPAAKRVKLDGGDKKYSIGLDIGTNSVGWAVITDEYKVPSKKFKVLGNTDRHSIKKNLIGALLFDSGETAEATRLKRTARRRYTRRKNRICYLQEIFSNEMAKVDDSFFHRLEESFLVEEDKKHERHPIFGNIVDEVAYHEKYPTIYHLRKKLVDSTDKADLRLIYLALAHMIKFRGHFLIEGDLNPDNSDVDKLFIQLVQTYNQLFEENPINASGVDAKAILSARLSKSRRLENLIAQLPGEKKNGLFGNLIALSLGLTPNFKSNFDLAEDAKLQLSKDTYDDDLDNLLAQIGDQYADLFLAAKNLSDAILLSDILRVNTEITKAPLSASMIKRYDEHHQDLTLLKALVRQQLPEKYKEIFFDQSKNGYAGYIDGGASQEEFYKFIKPILEKMDGTEELLVKLNREDLLRKQRTFDNGSIPHQIHLGELHAILRRQEDFYPFLKDNREKIEKILTFRIPYYVGPLARGNSRFAWMTRKSEETITPWNFEEVVDKGASAQSFIERMTNFDKNLPNEKVLPKHSLLYEYFTVYNELTKVKYVTEGMRKPAFLSGEQKKAIVDLLFKTNRKVTVKQLKEDYFKKIECFDSVEISGVEDRFNASLGTYHDLLKIIKDKDFLDNEENEDILEDIVLTLTLFEDREMIEERLKTYAHLFDDKVMKQLKRRRYTGWGRLSRKLINGIRDKQSGKTILDFLKSDGFANRNFMQLIHDDSLTFKEDIQKAQVSGQGDSLHEHIANLAGSPAIKKGILQTVKVVDELVKVMGRHKPENIVIEMARENQTTQKGQKNSRERMKRIEEGIKELGSQILKEHPVENTQLQNEKLYLYYLQNGRDMYVDQELDINRLSDYDVDHIVPQSFLKDDSIDNKVLTRSDKARGKSDNVPSEEVVKKMKNYWRQLLNAKLITQRKFDNLTKAERGGLSELDKAGFIKRQLVETRQITKHVAQILDSRMNTKYDENDKLIREVKVITLKSKLVSDFRKDFQFYKVREINNYHHAHDAYLNAVVGTALIKKYPKLESEFVYGDYKVYDVRKMIAKSEQEIGKATAKYFFYSNIMNFFKTEITLANGEIRKRPLIETNGETGEIVWDKGRDFATVRKVLSMPQVNIVKKTEVQTGGFSKESILPKRNSDKLIARKKDWDPKKYGGFDSPTVAYSVLVVAKVEKGKSKKLKSVKELLGITIMERSSFEKNPIDFLEAKGYKEVKKDLIIKLPKYSLFELENGRKRMLASAGELQKGNELALPSKYVNFLYLASHYEKLKGSPEDNEQKQLFVEQHKHYLDEIIEQISEFSKRVILADANLDKVLSAYNKHRDKPIREQAENIIHLFTLTNLGAPAAFKYFDTTIDRKRYTSTKEVLDATLIHQSITGLYETRIDLSQLGGDGGGGGEAAAKGGTLNLEDEYRLYETSAEPEVSPGSTWLSDFPQAWAETGGMGLAVRQAPLIIPLKATSTPVSIKQYPMSQEAKLGIKPHIQRLLDQGILVPCQSPWNTPLLPVKKPGTNDYRPVQDLREVNKRVEDIHPTVPNPYNLLSGLPPSHRWYTVLDLKDAFFCLRLHPTSQPLFAFEWRDPGMGISGQLTWTRLPQGFKNSPTLFNEALHRDLADFRIQHPDLILLQYVDDILLAATSELDCQQGTRALLLTLGNLGYRASAKKAQLCQKQVKYLGYLLKEGQRWLTEARKETVMGQPTPKTPRQLREFLGKAGFCRLFIPGFAEMAAPLYPLTKPGTLFNWGPDQQKAYQEIKQALLTAPALGLPDLTKPFELFVDEKQGYAKGVLTQKLGPWRRPVAYLSKKLDPVAAGWPPCLRMVAAIAVLRKDAGKLTMGQPLVILAPHAVEALVKQPPDRWLSNARMTHYQAMLLDTDRVQFGPVVALNPATLLPLPEEGAPHDCLEILAETHGTRPDLTDQPIPDADHTWYTDGSSFLQEGQRKAGAAVTTETEVIWARALPAGTSAQRAELIALTQALKMAEGKRLNVYTDSRYAFATAHIHGEIYRRRGWLTSEGREIKNKSEILALLKALFLPKRLSIIHCLGHQKGDSAEARGNRLADQAAREAAIKTPPDTSTLLAGKRTADGSEFEKRTADGSEFESPKKKAKVE

SEQ ID NO: 6691 - protein, 2093 aa, synthetic construct
MPAAKRVKLDGGDKKYSIGLDIGTNSVGWAVITDEYKVPSKKFKVLGNTDRHSIKKNLIGALLFDSGETAEATRLKRTARRRYTRRKNRICYLQEIFSNEMAKVDDSFFHRLEESFLVEEDKKHERHPIFGNIVDEVAYHEKYPTIYHLRKKLVDSTDKADLRLIYLALAHMIKFRGHFLIEGDLNPDNSDVDKLFIQLVQTYNQLFEENPINASGVDAKAILSARLSKSRRLENLIAQLPGEKKNGLFGNLIALSLGLTPNFKSNFDLAEDAKLQLSKDTYDDDLDNLLAQIGDQYADLFLAAKNLSDAILLSDILRVNTEITKAPLSASMIKRYDEHHQDLTLLKALVRQQLPEKYKEIFFDQSKNGYAGYIDGGASQEEFYKFIKPILEKMDGTEELLVKLNREDLLRKQRTFDNGSIPHQIHLGELHAILRRQEDFYPFLKDNREKIEKILTFRIPYYVGPLARGNSRFAWMTRKSEETITPWNFEEVVDKGASAQSFIERMTNFDKNLPNEKVLPKHSLLYEYFTVYNELTKVKYVTEGMRKPAFLSGEQKKAIVDLLFKTNRKVTVKQLKEDYFKKIECFDSVEISGVEDRFNASLGTYHDLLKIIKDKDFLDNEENEDILEDIVLTLTLFEDREMIEERLKTYAHLFDDKVMKQLKRRRYTGWGRLSRKLINGIRDKQSGKTILDFLKSDGFANRNFMQLIHDDSLTFKEDIQKAQVSGQGDSLHEHIANLAGSPAIKKGILQTVKVVDELVKVMGRHKPENIVIEMARENQTTQKGQKNSRERMKRIEEGIKELGSQILKEHPVENTQLQNEKLYLYYLQNGRDMYVDQELDINRLSDYDVDHIVPQSFLKDDSIDNKVLTRSDKARGKSDNVPSEEVVKKMKNYWRQLLNAKLITQRKFDNLTKAERGGLSELDKAGFIKRQLVETRQITKHVAQILDSRMNTKYDENDKLIREVKVITLKSKLVSDFRKDFQFYKVREINNYHHAHDAYLNAVVGTALIKKYPKLESEFVYGDYKVYDVRKMIAKSEQEIGKATAKYFFYSNIMNFFKTEITLANGEIRKRPLIETNGETGEIVWDKGRDFATVRKVLSMPQVNIVKKTEVQTGGFSKESILPKRNSDKLIARKKDWDPKKYGGFDSPTVAYSVLVVAKVEKGKSKKLKSVKELLGITIMERSSFEKNPIDFLEAKGYKEVKKDLIIKLPKYSLFELENGRKRMLASAGELQKGNELALPSKYVNFLYLASHYEKLKGSPEDNEQKQLFVEQHKHYLDEIIEQISEFSKRVILADANLDKVLSAYNKHRDKPIREQAENIIHLFTLTNLGAPAAFKYFDTTIDRKRYTSTKEVLDATLIHQSITGLYETRIDLSQLGGDGGGGGEAAAKGGLGIEDEYRLHETSTEPDVSLGSTWLSDFPQAWAETGGMGLAVRQAPLIIPLKATSTPVSIQQYPMSHEARLGIKPHIQRLLDQGILVPCQSPWNTPLLPVKKPGTNDYRPVQDLREVNKRVEDIHPTVPNPYNLLSGLPPSHQWYTVLDLKDAFFCLRLHPTSQPLFAFEWRDPGMGISGQLTWTRLPQGFKNSPTLFNEALHRDLADFRIQHPDLILLQYVDDILLAATSELDCQQGTRALLQTLGDLGYRASAKKAQICQKQVKYLGYLLREGQRWLTEARKETVMGQPVPKTPRQLREFLGKAGFCRLFIPGFAEMAAPLYPLTKPGTLFSWGPDQQKAYQEIKQALLTAPALGLPDLTKPFELFVDEKQGYAKGVLTQKLGPWRRPVAYLSKKLDPVAAGWPPCLRMVAAIAVLTKDAGKLTMGQPLVILAPHAVEALVKQPPDRWLSNARMTHYQAMLLDTDRVQFGPVVALNPATLLPLPEEGAPHDCLEILAETHGTRPDLTDQPIPDADHTWYTDGSSFLQEGQRKAGAAVTTETEVIWAGALPAGTSAQRAELIALTQALKMAEGKRLNVYTDSRYAFATAHIHGEIYRRRGWLTSEGREIKNKSEILALLKALFLPKRLSIIHCLGHQKGDSAEARGNRLADQAAREAAIKTPPDTSTLLIAGKRTADGSEFEKRTADGSEFESPKKKAKVE

SEQ ID NO: 6692 - protein, 2093 aa, synthetic construct
MPAAKRVKLDGGDKKYSIGLDIGTNSVGWAVITDEYKVPSKKFKVLGNTDRHSIKKNLIGALLFDSGETAEATRLKRTARRRYTRRKNRICYLQEIFSNEMAKVDDSFFHRLEESFLVEEDKKHERHPIFGNIVDEVAYHEKYPTIYHLRKKLVDSTDKADLRLIYLALAHMIKFRGHFLIEGDLNPDNSDVDKLFIQLVQTYNQLFEENPINASGVDAKAILSARLSKSRRLENLIAQLPGEKKNGLFGNLIALSLGLTPNFKSNFDLAEDAKLQLSKDTYDDDLDNLLAQIGDQYADLFLAAKNLSDAILLSDILRVNTEITKAPLSASMIKRYDEHHQDLTLLKALVRQQLPEKYKEIFFDQSKNGYAGYIDGGASQEEFYKFIKPILEKMDGTEELLVKLNREDLLRKQRTFDNGSIPHQIHLGELHAILRRQEDFYPFLKDNREKIEKILTFRIPYYVGPLARGNSRFAWMTRKSEETITPWNFEEVVDKGASAQSFIERMTNFDKNLPNEKVLPKHSLLYEYFTVYNELTKVKYVTEGMRKPAFLSGEQKKAIVDLLFKTNRKVTVKQLKEDYFKKIECFDSVEISGVEDRFNASLGTYHDLLKIIKDKDFLDNEENEDILEDIVLTLTLFEDREMIEERLKTYAHLFDDKVMKQLKRRRYTGWGRLSRKLINGIRDKQSGKTILDFLKSDGFANRNFMQLIHDDSLTFKEDIQKAQVSGQGDSLHEHIANLAGSPAIKKGILQTVKVVDELVKVMGRHKPENIVIEMARENQTTQKGQKNSRERMKRIEEGIKELGSQILKEHPVENTQLQNEKLYLYYLQNGRDMYVDQELDINRLSDYDVDHIVPQSFLKDDSIDNKVLTRSDKARGKSDNVPSEEVVKKMKNYWRQLLNAKLITQRKFDNLTKAERGGLSELDKAGFIKRQLVETRQITKHVAQILDSRMNTKYDENDKLIREVKVITLKSKLVSDFRKDFQFYKVREINNYHHAHDAYLNAVVGTALIKKYPKLESEFVYGDYKVYDVRKMIAKSEQEIGKATAKYFFYSNIMNFFKTEITLANGEIRKRPLIETNGETGEIVWDKGRDFATVRKVLSMPQVNIVKKTEVQTGGFSKESILPKRNSDKLIARKKDWDPKKYGGFDSPTVAYSVLVVAKVEKGKSKKLKSVKELLGITIMERSSFEKNPIDFLEAKGYKEVKKDLIIKLPKYSLFELENGRKRMLASAGELQKGNELALPSKYVNFLYLASHYEKLKGSPEDNEQKQLFVEQHKHYLDEIIEQISEFSKRVILADANLDKVLSAYNKHRDKPIREQAENIIHLFTLTNLGAPAAFKYFDTTIDRKRYTSTKEVLDATLIHQSITGLYETRIDLSQLGGDGGGGGEAAAKGGTLNIEDEYRLHETSKGPDVPLGSTWLSDFPQAWAETGGMGLAVRQAPLIIPLKATSTPVSIKQYPMSQEARLGIKPHIQRLLDQGILVPCQSPWNTPLLPVKKPGTNDYRPVQDLREVNKRVEDIHPTVPNPYNLLSGLPPSHQWYTVLDLKDAFFCLRLHPTSQSLFAFEWRDPEMGISGQLTWTRLPQGFKNSPTLFNEALHRDLADFRIQHPDLILLQYVDDLLLAATSELDCQQGTRALLQTLGDLGYRASAKKAQICQKQVKYLGYLLKEGQRWLTEARKETVMGQPTPKTPRQLREFLGTAGFCRLWIPGFAEMAAPLYPLTKPGTLFEWGPDQQKAYQEIKQALLTAPALGLPDLTKPFELFVDEKQGYAKGVLTQKLGPWRRPVAYLSKKLDPVAAGWPPCLRMVAAIAVLTKDAGKLTMGQPLVILAPHAVEALVKQPPDRWLSNARMTHYQALLLDTDRVQFGPIVALNPATLLPLPEEGLQHDCLDILAEAHGTRPDLTDQPLPDADHTWYTDGSSFLQEGQRKAGAAVTTETEVVWAKALPAGTSAQRAELIALTQALKMAEGKKLNVYTDSRYAFATAHIHGEIYRRRGWLTSEGKEIKNKDEILALLKALFLPKRLSIIHCPGHQKGNRAEARGNRMADQAAREVATRETPETSTLLAGKRTADGSEFEKRTADGSEFESPKKKAKVE

SEQ ID NO: 6693 - protein, 2087 aa, synthetic construct
MPAAKRVKLDGGDKKYSIGLDIGTNSVGWAVITDEYKVPSKKFKVLGNTDRHSIKKNLIGALLFDSGETAEATRLKRTARRRYTRRKNRICYLQEIFSNEMAKVDDSFFHRLEESFLVEEDKKHERHPIFGNIVDEVAYHEKYPTIYHLRKKLVDSTDKADLRLIYLALAHMIKFRGHFLIEGDLNPDNSDVDKLFIQLVQTYNQLFEENPINASGVDAKAILSARLSKSRRLENLIAQLPGEKKNGLFGNLIALSLGLTPNFKSNFDLAEDAKLQLSKDTYDDDLDNLLAQIGDQYADLFLAAKNLSDAILLSDILRVNTEITKAPLSASMIKRYDEHHQDLTLLKALVRQQLPEKYKEIFFDQSKNGYAGYIDGGASQEEFYKFIKPILEKMDGTEELLVKLNREDLLRKQRTFDNGSIPHQIHLGELHAILRRQEDFYPFLKDNREKIEKILTFRIPYYVGPLARGNSRFAWMTRKSEETITPWNFEEVVDKGASAQSFIERMTNFDKNLPNEKVLPKHSLLYEYFTVYNELTKVKYVTEGMRKPAFLSGEQKKAIVDLLFKTNRKVTVKQLKEDYFKKIECFDSVEISGVEDRFNASLGTYHDLLKIIKDKDFLDNEENEDILEDIVLTLTLFEDREMIEERLKTYAHLFDDKVMKQLKRRRYTGWGRLSRKLINGIRDKQSGKTILDFLKSDGFANRNFMQLIHDDSLTFKEDIQKAQVSGQGDSLHEHIANLAGSPAIKKGILQTVKVVDELVKVMGRHKPENIVIEMARENQTTQKGQKNSRERMKRIEEGIKELGSQILKEHPVENTQLQNEKLYLYYLQNGRDMYVDQELDINRLSDYDVDHIVPQSFLKDDSIDNKVLTRSDKARGKSDNVPSEEVVKKMKNYWRQLLNAKLITQRKFDNLTKAERGGLSELDKAGFIKRQLVETRQITKHVAQILDSRMNTKYDENDKLIREVKVITLKSKLVSDFRKDFQFYKVREINNYHHAHDAYLNAVVGTALIKKYPKLESEFVYGDYKVYDVRKMIAKSEQEIGKATAKYFFYSNIMNFFKTEITLANGEIRKRPLIETNGETGEIVWDKGRDFATVRKVLSMPQVNIVKKTEVQTGGFSKESILPKRNSDKLIARKKDWDPKKYGGFDSPTVAYSVLVVAKVEKGKSKKLKSVKELLGITIMERSSFEKNPIDFLEAKGYKEVKKDLIIKLPKYSLFELENGRKRMLASAGELQKGNELALPSKYVNFLYLASHYEKLKGSPEDNEQKQLFVEQHKHYLDEIIEQISEFSKRVILADANLDKVLSAYNKHRDKPIREQAENIIHLFTLTNLGAPAAFKYFDTTIDRKRYTSTKEVLDATLIHQSITGLYETRIDLSQLGGDGGGGGEAAAKGGTLQLDDEYRLYSPLVKPDQNIQFWLEQFPQAWAETAGMGLAKQVPPQVIQLKASATPVSVRQYPLSKEAQEGIRPHVQRLIQQGILVPVQSPWNTPLLPVRKPGTNDYRPVQDLREVNKRVQDIHPTVPNPYNLLCALPPQRSWYTVLDLKDAFFCLRLHPTSQPLFAFEWRDPGTGRTGQLTWTRLPQGFKNSPTIFDEALHRDLANFRIQHPQVTLLQYVDDLLLAGATKQDCLEGTKALLLELSDLGYRASAKKAQICRREVTYLGYSLRDGQRWLTEARKKTVVQIPAPTTAKQVREFLGTAGFCRLWIPGFATLAAPLYPLTKEKGEFSWAPEHQKAFDAIKKALLSAPALALPDVTKPFTLYVDERKGVARGVLTQTLGPWRRPVAYLSKKLDPVASGWPVCLKAIAAVAILVKDADKLTLGQNITVIAPHALENIVRQPPDRWMTNARMTHYQSLLLTERVTFAPPAALNPATLLPEETDEPVTHDCHQLLIEETGVRKDLTDIPLTGEVLTWFTDGSSYVVEGKRMAGAAVVDGTRTIWASSLPEGTSAQKAELMALTQALRLAEGKSINIYTDSRYAFATAHVHGAIYKQRGLLTSAGREIKNKEEILSLLEALHLPKRLAIIHCPGHQKAKDPISRGNQMADRVAKQAAQGVNLLAGKRTADGSEFEKRTADGSEFESPKKKAKVE

SEQ ID NO: 6694 - protein, 2173 aa, synthetic construct
MPAAKRVKLDGGDKKYSIGLDIGTNSVGWAVITDEYKVPSKKFKVLGNTDRHSIKKNLIGALLFDSGETAEATRLKRTARRRYTRRKNRICYLQEIFSNEMAKVDDSFFHRLEESFLVEEDKKHERHPIFGNIVDEVAYHEKYPTIYHLRKKLVDSTDKADLRLIYLALAHMIKFRGHFLIEGDLNPDNSDVDKLFIQLVQTYNQLFEENPINASGVDAKAILSARLSKSRRLENLIAQLPGEKKNGLFGNLIALSLGLTPNFKSNFDLAEDAKLQLSKDTYDDDLDNLLAQIGDQYADLFLAAKNLSDAILLSDILRVNTEITKAPLSASMIKRYDEHHQDLTLLKALVRQQLPEKYKEIFFDQSKNGYAGYIDGGASQEEFYKFIKPILEKMDGTEELLVKLNREDLLRKQRTFDNGSIPHQIHLGELHAILRRQEDFYPFLKDNREKIEKILTFRIPYYVGPLARGNSRFAWMTRKSEETITPWNFEEVVDKGASAQSFIERMTNFDKNLPNEKVLPKHSLLYEYFTVYNELTKVKYVTEGMRKPAFLSGEQKKAIVDLLFKTNRKVTVKQLKEDYFKKIECFDSVEISGVEDRFNASLGTYHDLLKIIKDKDFLDNEENEDILEDIVLTLTLFEDREMIEERLKTYAHLFDDKVMKQLKRRRYTGWGRLSRKLINGIRDKQSGKTILDFLKSDGFANRNFMQLIHDDSLTFKEDIQKAQVSGQGDSLHEHIANLAGSPAIKKGILQTVKVVDELVKVMGRHKPENIVIEMARENQTTQKGQKNSRERMKRIEEGIKELGSQILKEHPVENTQLQNEKLYLYYLQNGRDMYVDQELDINRLSDYDVDHIVPQSFLKDDSIDNKVLTRSDKARGKSDNVPSEEVVKKMKNYWRQLLNAKLITQRKFDNLTKAERGGLSELDKAGFIKRQLVETRQITKHVAQILDSRMNTKYDENDKLIREVKVITLKSKLVSDFRKDFQFYKVREINNYHHAHDAYLNAVVGTALIKKYPKLESEFVYGDYKVYDVRKMIAKSEQEIGKATAKYFFYSNIMNFFKTEITLANGEIRKRPLIETNGETGEIVWDKGRDFATVRKVLSMPQVNIVKKTEVQTGGFSKESILPKRNSDKLIARKKDWDPKKYGGFDSPTVAYSVLVVAKVEKGKSKKLKSVKELLGITIMERSSFEKNPIDFLEAKGYKEVKKDLIIKLPKYSLFELENGRKRMLASAGELQKGNELALPSKYVNFLYLASHYEKLKGSPEDNEQKQLFVEQHKHYLDEIIEQISEFSKRVILADANLDKVLSAYNKHRDKPIREQAENIIHLFTLTNLGAPAAFKYFDTTIDRKRYTSTKEVLDATLIHQSITGLYETRIDLSQLGGDGGGGGEAAAKGGMDPLQLLQPLEAEIKGTKLKAHWNSGATITCVPQAFLEEEVPIKNIWIKTIHGEKEQPVYYLTFKIQGRKVEAEVISSPYDYILVSPSDIPWLMKKPLQLTTLVPLQEYEERLLKQTMLTGSYKEKLQSLFLKYDALWQHWENQVGHRRIKPHHIATGTVNPRPQKQYPINPKAKASIQTVINDLLKQGVLIQQNSIMNTPVYPVPKPDGKWRMVLDYREVNKTIPLIAAQNQHSAGILSSIFRGKYKTTLDLSNGFWAHSITPESYWLTAFTWLGQQYCWTRLPQGFLNSPALFNADVVDLLKEVPNVQVYVDDIYISHDDPREHLEQLEKVFSLLLNAGYVVSLKKSEIAQHEVEFLGFNITKEGRGLTETFKQKLLNITPPRDLKQLQSILGKLNFARNFIPNFSELVKPLYNIIATAPGKYITWTTDNSQQLQNIISMLNSAENLEERNPEVRLIMKVNTSPSAGYIRFYNEFAKRPIMYLNYVYTKAEVKFTNTEKLLTTIHKGLIKALDLGMGQEILVYSPIVSMTKIQKTPLPERKALPIRWITWMSYLEDPRIQFHYDKTLPELQQVPTVTDDIIAKIKHPSEFSMVFYTDGSAIKHPNVNKSHNAGMGIAQVQFKPEFTVINTWSIPLGDHTAQLAEVAAVEFACKKALKIDGPVLIVTDSFYVAESVNKELPYWQSNGFFNNKKKPLKHVSKWKSIADCIQLKPDIIIIHEKGHQPTASTFHTEGNNLADKLATQGSYVVNAGKRTADGSEFEKRTADGSEFESPKKKAKVE

SEQ ID NO: 6695 - protein, 2093 aa, synthetic construct
MPAAKRVKLDGGDKKYSIGLDIGTNSVGWAVITDEYKVPSKKFKVLGNTDRHSIKKNLIGALLFDSGETAEATRLKRTARRRYTRRKNRICYLQEIFSNEMAKVDDSFFHRLEESFLVEEDKKHERHPIFGNIVDEVAYHEKYPTIYHLRKKLVDSTDKADLRLIYLALAHMIKFRGHFLIEGDLNPDNSDVDKLFIQLVQTYNQLFEENPINASGVDAKAILSARLSKSRRLENLIAQLPGEKKNGLFGNLIALSLGLTPNFKSNFDLAEDAKLQLSKDTYDDDLDNLLAQIGDQYADLFLAAKNLSDAILLSDILRVNTEITKAPLSASMIKRYDEHHQDLTLLKALVRQQLPEKYKEIFFDQSKNGYAGYIDGGASQEEFYKFIKPILEKMDGTEELLVKLNREDLLRKQRTFDNGSIPHQIHLGELHAILRRQEDFYPFLKDNREKIEKILTFRIPYYVGPLARGNSRFAWMTRKSEETITPWNFEEVVDKGASAQSFIERMTNFDKNLPNEKVLPKHSLLYEYFTVYNELTKVKYVTEGMRKPAFLSGEQKKAIVDLLFKTNRKVTVKQLKEDYFKKIECFDSVEISGVEDRFNASLGTYHDLLKIIKDKDFLDNEENEDILEDIVLTLTLFEDREMIEERLKTYAHLFDDKVMKQLKRRRYTGWGRLSRKLINGIRDKQSGKTILDFLKSDGFANRNFMQLIHDDSLTFKEDIQKAQVSGQGDSLHEHIANLAGSPAIKKGILQTVKVVDELVKVMGRHKPENIVIEMARENQTTQKGQKNSRERMKRIEEGIKELGSQILKEHPVENTQLQNEKLYLYYLQNGRDMYVDQELDINRLSDYDVDHIVPQSFLKDDSIDNKVLTRSDKARGKSDNVPSEEVVKKMKNYWRQLLNAKLITQRKFDNLTKAERGGLSELDKAGFIKRQLVETRQITKHVAQILDSRMNTKYDENDKLIREVKVITLKSKLVSDFRKDFQFYKVREINNYHHAHDAYLNAVVGTALIKKYPKLESEFVYGDYKVYDVRKMIAKSEQEIGKATAKYFFYSNIMNFFKTEITLANGEIRKRPLIETNGETGEIVWDKGRDFATVRKVLSMPQVNIVKKTEVQTGGFSKESILPKRNSDKLIARKKDWDPKKYGGFDSPTVAYSVLVVAKVEKGKSKKLKSVKELLGITIMERSSFEKNPIDFLEAKGYKEVKKDLIIKLPKYSLFELENGRKRMLASAGELQKGNELALPSKYVNFLYLASHYEKLKGSPEDNEQKQLFVEQHKHYLDEIIEQISEFSKRVILADANLDKVLSAYNKHRDKPIREQAENIIHLFTLTNLGAPAAFKYFDTTIDRKRYTSTKEVLDATLIHQSITGLYETRIDLSQLGGDGGGGGEAAAKGGTLNIEDEYRLHETSKEPDVPLGSTWLSDFPQAWAETGGMGLAVRQAPLIIPLKATSTPVSIKQYPMSQEARLGIKPHIQRLLDQGILVPCQSPWNTPLLPVKKPGTNDYRPVQDLREVNKRVEDIHPTVPNPYNLLSGLPPSHQWYTVLDLKDAFFCLRLHPTSQPLFAFEWRDPEMGISGQLTWTRLPQGFKNSPTLFNEALHRDLADFRIQHPDLILLQYVDDLLLAATSEQDCQRGTRALLQTLGNLGYRASAKKAQICQKQVKYLGYLLKEGQRWLTEARKETVMGQPTPKTPRQLREFLGTAGFCRLWIPGFAEMAAPLYPLTKPGTLFNWGPDQQKAYQEIKQALLTAPALGLPDLTKPFELFVDEKQGYAKGVLTQKLGPWRRPVAYLSKKLDPVAAGWPPCLRMVAAIAVLTKDAGKLTMGQPLVILAPHAVEALVKQPPDRWLSNARMTHYQAMLLDTDRVQFGPVVALNPATLLPLPEKEAPHDCLEILAETHGTRPDLTDQPIPDADYTWYTDGSSFLQEGQRRAGAAVTTETEVIWARALPAGTSAQRAELIALTQALKMAEGKKLNVYTDSRYAFATAHVHGEIYRRRGWLTSEGREIKNKNEILALLKALFLPKRLSIIHCPGHQKGNSAEARGNRMADQAAREAAMKAVLETSTLLAGKRTADGSEFEKRTADGSEFESPKKKAKVE

SEQ ID NO: 6696 - protein, 2091 aa, synthetic construct
MPAAKRVKLDGGDKKYSIGLDIGTNSVGWAVITDEYKVPSKKFKVLGNTDRHSIKKNLIGALLFDSGETAEATRLKRTARRRYTRRKNRICYLQEIFSNEMAKVDDSFFHRLEESFLVEEDKKHERHPIFGNIVDEVAYHEKYPTIYHLRKKLVDSTDKADLRLIYLALAHMIKFRGHFLIEGDLNPDNSDVDKLFIQLVQTYNQLFEENPINASGVDAKAILSARLSKSRRLENLIAQLPGEKKNGLFGNLIALSLGLTPNFKSNFDLAEDAKLQLSKDTYDDDLDNLLAQIGDQYADLFLAAKNLSDAILLSDILRVNTEITKAPLSASMIKRYDEHHQDLTLLKALVRQQLPEKYKEIFFDQSKNGYAGYIDGGASQEEFYKFIKPILEKMDGTEELLVKLNREDLLRKQRTFDNGSIPHQIHLGELHAILRRQEDFYPFLKDNREKIEKILTFRIPYYVGPLARGNSRFAWMTRKSEETITPWNFEEVVDKGASAQSFIERMTNFDKNLPNEKVLPKHSLLYEYFTVYNELTKVKYVTEGMRKPAFLSGEQKKAIVDLLFKTNRKVTVKQLKEDYFKKIECFDSVEISGVEDRFNASLGTYHDLLKIIKDKDFLDNEENEDILEDIVLTLTLFEDREMIEERLKTYAHLFDDKVMKQLKRRRYTGWGRLSRKLINGIRDKQSGKTILDFLKSDGFANRNFMQLIHDDSLTFKEDIQKAQVSGQGDSLHEHIANLAGSPAIKKGILQTVKVVDELVKVMGRHKPENIVIEMARENQTTQKGQKNSRERMKRIEEGIKELGSQILKEHPVENTQLQNEKLYLYYLQNGRDMYVDQELDINRLSDYDVDHIVPQSFLKDDSIDNKVLTRSDKARGKSDNVPSEEVVKKMKNYWRQLLNAKLITQRKFDNLTKAERGGLSELDKAGFIKRQLVETRQITKHVAQILDSRMNTKYDENDKLIREVKVITLKSKLVSDFRKDFQFYKVREINNYHHAHDAYLNAVVGTALIKKYPKLESEFVYGDYKVYDVRKMIAKSEQEIGKATAKYFFYSNIMNFFKTEITLANGEIRKRPLIETNGETGEIVWDKGRDFATVRKVLSMPQVNIVKKTEVQTGGFSKESILPKRNSDKLIARKKDWDPKKYGGFDSPTVAYSVLVVAKVEKGKSKKLKSVKELLGITIMERSSFEKNPIDFLEAKGYKEVKKDLIIKLPKYSLFELENGRKRMLASAGELQKGNELALPSKYVNFLYLASHYEKLKGSPEDNEQKQLFVEQHKHYLDEIIEQISEFSKRVILADANLDKVLSAYNKHRDKPIREQAENIIHLFTLTNLGAPAAFKYFDTTIDRKRYTSTKEVLDATLIHQSITGLYETRIDLSQLGGDGGEAAAKGGGGGVLNLEEEYRLHEKPVPSSIDPSWLQLFPTVWAERAGMGLANQVPPVVVELRSGASPVAVRQYPMSKEAREGIRPHIQKFLDLGVLVPCRSPWNTPLLPVKKPGTNDYRPVQDLREINKRVQDIHPTVPNPYNLLSSLPPSYTWYSVLDLKDAFFCLRLHPNSQPLFAFEWKDPEKGNTGQLTWTRLPQGFKNSPTLFNEALHRDLAPFRALNPQVVLLQYVDDLLVAAPTYEDCKKGTQKLLQELSKLGYRVSAKKAQLCQREVTYLGYLLKEGKRWLTPARKATVMKIPVPTTPRQVREFLGTAGFCRLWIPGFASLAAPLYPLTKPSIPFIWTEEHQQAFDHIKKALLSAPALALPDLTKPFTLYIDERAGVARGVLTQTLGPWRRPVAYLSKKLDPVASGWPTCLKAVAAVALLLKDADKLTLGQNVTVIASHSLESIVRQPPDRWMTNARMTHYQSLLLNERVSFAPPAVLNPATLLPVESEATPVHRCSEILAEETGTRRDLEDQPLPGVPTWYTDGSSFITEGKRRAGAPIVDGKRTVWASSLPEGTSAQKAELVALTQALRLAEGKNINIYTDSRYAFATAHIHGAIYKQRGWLTSAGKDIKNKEEILALLEAIHLPRRVAIIHCPGHQRGSNPVATGNRRADEAAKQAALSTRVLAGTTKPAGKRTADGSEFEKRTADGSEFESPKKKAKVE

SEQ ID NO: 6697 - protein, 2091 aa, synthetic construct
MPAAKRVKLDGGDKKYSIGLDIGTNSVGWAVITDEYKVPSKKFKVLGNTDRHSIKKNLIGALLFDSGETAEATRLKRTARRRYTRRKNRICYLQEIFSNEMAKVDDSFFHRLEESFLVEEDKKHERHPIFGNIVDEVAYHEKYPTIYHLRKKLVDSTDKADLRLIYLALAHMIKFRGHFLIEGDLNPDNSDVDKLFIQLVQTYNQLFEENPINASGVDAKAILSARLSKSRRLENLIAQLPGEKKNGLFGNLIALSLGLTPNFKSNFDLAEDAKLQLSKDTYDDDLDNLLAQIGDQYADLFLAAKNLSDAILLSDILRVNTEITKAPLSASMIKRYDEHHQDLTLLKALVRQQLPEKYKEIFFDQSKNGYAGYIDGGASQEEFYKFIKPILEKMDGTEELLVKLNREDLLRKQRTFDNGSIPHQIHLGELHAILRRQEDFYPFLKDNREKIEKILTFRIPYYVGPLARGNSRFAWMTRKSEETITPWNFEEVVDKGASAQSFIERMTNFDKNLPNEKVLPKHSLLYEYFTVYNELTKVKYVTEGMRKPAFLSGEQKKAIVDLLFKTNRKVTVKQLKEDYFKKIECFDSVEISGVEDRFNASLGTYHDLLKIIKDKDFLDNEENEDILEDIVLTLTLFEDREMIEERLKTYAHLFDDKVMKQLKRRRYTGWGRLSRKLINGIRDKQSGKTILDFLKSDGFANRNFMQLIHDDSLTFKEDIQKAQVSGQGDSLHEHIANLAGSPAIKKGILQTVKVVDELVKVMGRHKPENIVIEMARENQTTQKGQKNSRERMKRIEEGIKELGSQILKEHPVENTQLQNEKLYLYYLQNGRDMYVDQELDINRLSDYDVDHIVPQSFLKDDSIDNKVLTRSDKARGKSDNVPSEEVVKKMKNYWRQLLNAKLITQRKFDNLTKAERGGLSELDKAGFIKRQLVETRQITKHVAQILDSRMNTKYDENDKLIREVKVITLKSKLVSDFRKDFQFYKVREINNYHHAHDAYLNAVVGTALIKKYPKLESEFVYGDYKVYDVRKMIAKSEQEIGKATAKYFFYSNIMNFFKTEITLANGEIRKRPLIETNGETGEIVWDKGRDFATVRKVLSMPQVNIVKKTEVQTGGFSKESILPKRNSDKLIARKKDWDPKKYGGFDSPTVAYSVLVVAKVEKGKSKKLKSVKELLGITIMERSSFEKNPIDFLEAKGYKEVKKDLIIKLPKYSLFELENGRKRMLASAGELQKGNELALPSKYVNFLYLASHYEKLKGSPEDNEQKQLFVEQHKHYLDEIIEQISEFSKRVILADANLDKVLSAYNKHRDKPIREQAENIIHLFTLTNLGAPAAFKYFDTTIDRKRYTSTKEVLDATLIHQSITGLYETRIDLSQLGGDGGEAAAKGGGGGVLNLEEEYRLHEKPVPSSIDPSWLQLFPTVWAERAGMGLANQVPPVVVELRSGASPVAVRQYPMSKEAREGIRPHIQKFLDLGVLVPCRSPWNTPLLPVKKPGTNDYRPVQDLREINKRVQDIHPTVPNPYNLLSSLPPSYTWYSVLDLKDAFFCLRLHPNSQPLFAFEWKDPEKGNTGQLTWTRLPQGFKNSPTLFNEALHRDLAPFRALNPQVVLLQYVDDLLVAAPTYEDCKKGTQKLLQELSKLGYRVSAKKAQLCQREVTYLGYLLKEGKRWLTPARKATVMKIPVPTTPRQVREFLGKAGFCRLFIPGFASLAAPLYPLTKPSIPFIWTEEHQQAFDHIKKALLSAPALALPDLTKPFTLYIDERAGVARGVLTQTLGPWRRPVAYLSKKLDPVASGWPTCLKAVAAVALLLKDADKLTLGQNVTVIASHSLESIVRQPPDRWMTNARMTHYQSLLLNERVSFAPPAVLNPATLLPVESEATPVHRCSEILAEETGTRRDLEDQPLPGVPTWYTDGSSFITEGKRRAGAPIVDGKRTVWASSLPEGTSAQKAELVALTQALRLAEGKNINIYTDSRYAFATAHIHGAIYKQRGWLTSAGKDIKNKEEILALLEAIHLPRRVAIIHCPGHQRGSNPVATGNRRADEAAKQAALSTRVLAGTTKPAGKRTADGSEFEKRTADGSEFESPKKKAKVE

SEQ ID NO: 6698 - protein, 2124 aa, synthetic construct
MPAAKRVKLDGGDKKYSIGLDIGTNSVGWAVITDEYKVPSKKFKVLGNTDRHSIKKNLIGALLFDSGETAEATRLKRTARRRYTRRKNRICYLQEIFSNEMAKVDDSFFHRLEESFLVEEDKKHERHPIFGNIVDEVAYHEKYPTIYHLRKKLVDSTDKADLRLIYLALAHMIKFRGHFLIEGDLNPDNSDVDKLFIQLVQTYNQLFEENPINASGVDAKAILSARLSKSRRLENLIAQLPGEKKNGLFGNLIALSLGLTPNFKSNFDLAEDAKLQLSKDTYDDDLDNLLAQIGDQYADLFLAAKNLSDAILLSDILRVNTEITKAPLSASMIKRYDEHHQDLTLLKALVRQQLPEKYKEIFFDQSKNGYAGYIDGGASQEEFYKFIKPILEKMDGTEELLVKLNREDLLRKQRTFDNGSIPHQIHLGELHAILRRQEDFYPFLKDNREKIEKILTFRIPYYVGPLARGNSRFAWMTRKSEETITPWNFEEVVDKGASAQSFIERMTNFDKNLPNEKVLPKHSLLYEYFTVYNELTKVKYVTEGMRKPAFLSGEQKKAIVDLLFKTNRKVTVKQLKEDYFKKIECFDSVEISGVEDRFNASLGTYHDLLKIIKDKDFLDNEENEDILEDIVLTLTLFEDREMIEERLKTYAHLFDDKVMKQLKRRRYTGWGRLSRKLINGIRDKQSGKTILDFLKSDGFANRNFMQLIHDDSLTFKEDIQKAQVSGQGDSLHEHIANLAGSPAIKKGILQTVKVVDELVKVMGRHKPENIVIEMARENQTTQKGQKNSRERMKRIEEGIKELGSQILKEHPVENTQLQNEKLYLYYLQNGRDMYVDQELDINRLSDYDVDHIVPQSFLKDDSIDNKVLTRSDKARGKSDNVPSEEVVKKMKNYWRQLLNAKLITQRKFDNLTKAERGGLSELDKAGFIKRQLVETRQITKHVAQILDSRMNTKYDENDKLIREVKVITLKSKLVSDFRKDFQFYKVREINNYHHAHDAYLNAVVGTALIKKYPKLESEFVYGDYKVYDVRKMIAKSEQEIGKATAKYFFYSNIMNFFKTEITLANGEIRKRPLIETNGETGEIVWDKGRDFATVRKVLSMPQVNIVKKTEVQTGGFSKESILPKRNSDKLIARKKDWDPKKYGGFDSPTVAYSVLVVAKVEKGKSKKLKSVKELLGITIMERSSFEKNPIDFLEAKGYKEVKKDLIIKLPKYSLFELENGRKRMLASAGELQKGNELALPSKYVNFLYLASHYEKLKGSPEDNEQKQLFVEQHKHYLDEIIEQISEFSKRVILADANLDKVLSAYNKHRDKPIREQAENIIHLFTLTNLGAPAAFKYFDTTIDRKRYTSTKEVLDATLIHQSITGLYETRIDLSQLGGDGGEAAAKGGGGGLLGRDLLTKLKAQIQFSTEGPQVTWEDRPAMCLVLNLEEEYRLHEKPVPPSIDPSWLQLFPMVWAEKAGMGLANQVPPVVVELKSDASPVAVRQYPMSKEAREGIRPHIQRFLDLGILVPCQSPWNTPLLPVKKPGTNDYRPVQDLREVNKRVQDIHPTVPNPYNLLSSLPPSHTWYSVLDLKDAFFCLKLHPNSQPLFAFEWRDPEKGNTGQLTWTRLPQGFKNSPTLFNEALHRDLASFRALNPQVVMLQYVDDLLVAAPTYRDCKEGTRRLLQELSKLGYRVSAKKAQLCREEVTYLGYLLKGGKRWLTPARKATVMKIPTPTTPRQVREFLGTAGFCRLWIPGFASLAAPLYPLTRPKVPFTWTEAHQEAFGRIKEALLSAPALALPDLTKPFALYVDEKEGVARGVLTQTLGPWRRPVAYLSKKLDPVASGWPTCLKAIAAVALLLKDADKLTLGQNVLVIAPHNLESIVRQPPDRWMTNARMTHYQSLLLNERVSFAPPAILNPATLLPVESDDTPIHICSEILAEETGTRPDLRDQPLPGVPAWYTDGSSFIMDGRRQAGAAIVDNKRTVWASNLPEGTSAQKAELIALTQALRLAEGKSINIYTDSRYAFATAHVHGAIYKQRGWLTSAGKDIKNKEEILALLEAIHLPKRVAIIHCPGHQRGTDPVATGNRKADEAAKQAAQSTRILTETTKNAGKRTADGSEFEKRTADGSEFESPKKKAKVE

SEQ ID NO: 6699 - protein, 2093 aa, synthetic construct
MPAAKRVKLDGGDKKYSIGLDIGTNSVGWAVITDEYKVPSKKFKVLGNTDRHSIKKNLIGALLFDSGETAEATRLKRTARRRYTRRKNRICYLQEIFSNEMAKVDDSFFHRLEESFLVEEDKKHERHPIFGNIVDEVAYHEKYPTIYHLRKKLVDSTDKADLRLIYLALAHMIKFRGHFLIEGDLNPDNSDVDKLFIQLVQTYNQLFEENPINASGVDAKAILSARLSKSRRLENLIAQLPGEKKNGLFGNLIALSLGLTPNFKSNFDLAEDAKLQLSKDTYDDDLDNLLAQIGDQYADLFLAAKNLSDAILLSDILRVNTEITKAPLSASMIKRYDEHHQDLTLLKALVRQQLPEKYKEIFFDQSKNGYAGYIDGGASQEEFYKFIKPILEKMDGTEELLVKLNREDLLRKQRTFDNGSIPHQIHLGELHAILRRQEDFYPFLKDNREKIEKILTFRIPYYVGPLARGNSRFAWMTRKSEETITPWNFEEVVDKGASAQSFIERMTNFDKNLPNEKVLPKHSLLYEYFTVYNELTKVKYVTEGMRKPAFLSGEQKKAIVDLLFKTNRKVTVKQLKEDYFKKIECFDSVEISGVEDRFNASLGTYHDLLKIIKDKDFLDNEENEDILEDIVLTLTLFEDREMIEERLKTYAHLFDDKVMKQLKRRRYTGWGRLSRKLINGIRDKQSGKTILDFLKSDGFANRNFMQLIHDDSLTFKEDIQKAQVSGQGDSLHEHIANLAGSPAIKKGILQTVKVVDELVKVMGRHKPENIVIEMARENQTTQKGQKNSRERMKRIEEGIKELGSQILKEHPVENTQLQNEKLYLYYLQNGRDMYVDQELDINRLSDYDVDHIVPQSFLKDDSIDNKVLTRSDKARGKSDNVPSEEVVKKMKNYWRQLLNAKLITQRKFDNLTKAERGGLSELDKAGFIKRQLVETRQITKHVAQILDSRMNTKYDENDKLIREVKVITLKSKLVSDFRKDFQFYKVREINNYHHAHDAYLNAVVGTALIKKYPKLESEFVYGDYKVYDVRKMIAKSEQEIGKATAKYFFYSNIMNFFKTEITLANGEIRKRPLIETNGETGEIVWDKGRDFATVRKVLSMPQVNIVKKTEVQTGGFSKESILPKRNSDKLIARKKDWDPKKYGGFDSPTVAYSVLVVAKVEKGKSKKLKSVKELLGITIMERSSFEKNPIDFLEAKGYKEVKKDLIIKLPKYSLFELENGRKRMLASAGELQKGNELALPSKYVNFLYLASHYEKLKGSPEDNEQKQLFVEQHKHYLDEIIEQISEFSKRVILADANLDKVLSAYNKHRDKPIREQAENIIHLFTLTNLGAPAAFKYFDTTIDRKRYTSTKEVLDATLIHQSITGLYETRIDLSQLGGDGGEAAAKGGGGGTLNIEDEHRLHETSKEPDVSLGSTWLSDFPQAWAETGGMGLAVRQAPLIIPLKATSTPVSIKQYPMSQEARLGIKPHIQRLLDQGILVPCQSPWNTPLLPVKKPGTNDYRPVQDLREVNKRVEDIHPTVPNPYNLLSGLPPSHQWYTVLDLKDAFFCLRLHPTSQPLFAFEWRDPEMGISGQLTWTRLPQGFKNSPTLFDEALHRDLADFRIQHPDLILLQYVDDLLLAATSELDCQQGTRALLQTLGNLGYRASAKKAQICQKQVKYLGYLLKEGQRWLTEARKETVMGQPTPKTPRQLREFLGTAGFCRLWIPGFAEMAAPLYPLTKTGTLFNWGPDQQKAYQEIKQALLTAPALGLPDLTKPFELFVDEKQGYAKGVLTQKLGPWRRPVAYLSKKLDPVAAGWPPCLRMVAAIAVLTKDAGKLTMGQPLVILAPHAVEALVKQPPDRWLSNARMTHYQALLLDTDRVQFGPVVALNPATLLPLPEEGLQHNCLDILAEAHGTRPDLTDQPLPDADHTWYTDGSSLLQEGQRKAGAAVTTETEVIWAKALPAGTSAQRAELIALTQALKMAEGKKLNVYTDSRYAFATAHIHGEIYRRRGLLTSEGKEIKNKDEILALLKALFLPKRLSIIHCPGHQKGHSAEARGNRMADQAARKAAITETPDTSTLLAGKRTADGSEFEKRTADGSEFESPKKKAKVE

SEQ ID NO: 6700 - protein, 2084 aa, synthetic construct
MPAAKRVKLDGGDKKYSIGLDIGTNSVGWAVITDEYKVPSKKFKVLGNTDRHSIKKNLIGALLFDSGETAEATRLKRTARRRYTRRKNRICYLQEIFSNEMAKVDDSFFHRLEESFLVEEDKKHERHPIFGNIVDEVAYHEKYPTIYHLRKKLVDSTDKADLRLIYLALAHMIKFRGHFLIEGDLNPDNSDVDKLFIQLVQTYNQLFEENPINASGVDAKAILSARLSKSRRLENLIAQLPGEKKNGLFGNLIALSLGLTPNFKSNFDLAEDAKLQLSKDTYDDDLDNLLAQIGDQYADLFLAAKNLSDAILLSDILRVNTEITKAPLSASMIKRYDEHHQDLTLLKALVRQQLPEKYKEIFFDQSKNGYAGYIDGGASQEEFYKFIKPILEKMDGTEELLVKLNREDLLRKQRTFDNGSIPHQIHLGELHAILRRQEDFYPFLKDNREKIEKILTFRIPYYVGPLARGNSRFAWMTRKSEETITPWNFEEVVDKGASAQSFIERMTNFDKNLPNEKVLPKHSLLYEYFTVYNELTKVKYVTEGMRKPAFLSGEQKKAIVDLLFKTNRKVTVKQLKEDYFKKIECFDSVEISGVEDRFNASLGTYHDLLKIIKDKDFLDNEENEDILEDIVLTLTLFEDREMIEERLKTYAHLFDDKVMKQLKRRRYTGWGRLSRKLINGIRDKQSGKTILDFLKSDGFANRNFMQLIHDDSLTFKEDIQKAQVSGQGDSLHEHIANLAGSPAIKKGILQTVKVVDELVKVMGRHKPENIVIEMARENQTTQKGQKNSRERMKRIEEGIKELGSQILKEHPVENTQLQNEKLYLYYLQNGRDMYVDQELDINRLSDYDVDHIVPQSFLKDDSIDNKVLTRSDKARGKSDNVPSEEVVKKMKNYWRQLLNAKLITQRKFDNLTKAERGGLSELDKAGFIKRQLVETRQITKHVAQILDSRMNTKYDENDKLIREVKVITLKSKLVSDFRKDFQFYKVREINNYHHAHDAYLNAVVGTALIKKYPKLESEFVYGDYKVYDVRKMIAKSEQEIGKATAKYFFYSNIMNFFKTEITLANGEIRKRPLIETNGETGEIVWDKGRDFATVRKVLSMPQVNIVKKTEVQTGGFSKESILPKRNSDKLIARKKDWDPKKYGGFDSPTVAYSVLVVAKVEKGKSKKLKSVKELLGITIMERSSFEKNPIDFLEAKGYKEVKKDLIIKLPKYSLFELENGRKRMLASAGELQKGNELALPSKYVNFLYLASHYEKLKGSPEDNEQKQLFVEQHKHYLDEIIEQISEFSKRVILADANLDKVLSAYNKHRDKPIREQAENIIHLFTLTNLGAPAAFKYFDTTIDRKRYTSTKEVLDATLIHQSITGLYETRIDLSQLGGDGGEAAAKGGGGGVPWLMKKPLQLTVLVPLHEYQERLLQQTALPKEQKELLQKLFLKYDALWQHWENQVGHRRIKPHNIATGTLAPRPQKQYPINPKAKPSIQIVIDDLLKQGVLIQQNSTMNTPVYPVPKPDGKWRMVLDYREVNKTIPLIAAQNQHSAGILSSIYRGKYKTTLDLTNGFWAHPITPESYWLTAFTWQGKQYCWTRLPQGFLNSPALFTADVVDLLKEIPNVQAYVDDIYISHDDPQEHLEQLEKIFSILLNAGYVVSLKKSEIAQREVEFLGFNITKEGRGLTDTFKQKLLNITPPKDLKQLQSILGLLNFARNFIPNYSELVKPLYTIVANANGKFISWTEDNSNQLQHIISVLNQADNLEERNPETRLIIKVNSSPSAGYIRYYNEGSKRPIMYVNYIFSKAEAKFTQTEKLLTTMHKGLIKAMDLAMGQEILVYSPIVSMTKIQRTPLPERKALPVRWITWMTYLEDPRIQFHYDKSLPELQQIPNVTEDVIAKTKHPSEFAMVFYTDGSAIKHPDVNKSHSAGMGIAQVQFIPEYKIVHQWSIPLGDHTAQLAEIAAVEFACKKALKISGPVLIVTDSFYVAESANKELPYWKSNGFLNNKKKPLRHVSKWKSIAECLQLKPDIIIMHEKGHQQPMTTLHTEGNNLADKLATQGSYVVHAGKRTADGSEFEKRTADGSEFESPKKKAKVE

SEQ ID NO: 6701 - protein, 2173 aa, synthetic construct
MPAAKRVKLDGGDKKYSIGLDIGTNSVGWAVITDEYKVPSKKFKVLGNTDRHSIKKNLIGALLFDSGETAEATRLKRTARRRYTRRKNRICYLQEIFSNEMAKVDDSFFHRLEESFLVEEDKKHERHPIFGNIVDEVAYHEKYPTIYHLRKKLVDSTDKADLRLIYLALAHMIKFRGHFLIEGDLNPDNSDVDKLFIQLVQTYNQLFEENPINASGVDAKAILSARLSKSRRLENLIAQLPGEKKNGLFGNLIALSLGLTPNFKSNFDLAEDAKLQLSKDTYDDDLDNLLAQIGDQYADLFLAAKNLSDAILLSDILRVNTEITKAPLSASMIKRYDEHHQDLTLLKALVRQQLPEKYKEIFFDQSKNGYAGYIDGGASQEEFYKFIKPILEKMDGTEELLVKLNREDLLRKQRTFDNGSIPHQIHLGELHAILRRQEDFYPFLKDNREKIEKILTFRIPYYVGPLARGNSRFAWMTRKSEETITPWNFEEVVDKGASAQSFIERMTNFDKNLPNEKVLPKHSLLYEYFTVYNELTKVKYVTEGMRKPAFLSGEQKKAIVDLLFKTNRKVTVKQLKEDYFKKIECFDSVEISGVEDRFNASLGTYHDLLKIIKDKDFLDNEENEDILEDIVLTLTLFEDREMIEERLKTYAHLFDDKVMKQLKRRRYTGWGRLSRKLINGIRDKQSGKTILDFLKSDGFANRNFMQLIHDDSLTFKEDIQKAQVSGQGDSLHEHIANLAGSPAIKKGILQTVKVVDELVKVMGRHKPENIVIEMARENQTTQKGQKNSRERMKRIEEGIKELGSQILKEHPVENTQLQNEKLYLYYLQNGRDMYVDQELDINRLSDYDVDHIVPQSFLKDDSIDNKVLTRSDKARGKSDNVPSEEVVKKMKNYWRQLLNAKLITQRKFDNLTKAERGGLSELDKAGFIKRQLVETRQITKHVAQILDSRMNTKYDENDKLIREVKVITLKSKLVSDFRKDFQFYKVREINNYHHAHDAYLNAVVGTALIKKYPKLESEFVYGDYKVYDVRKMIAKSEQEIGKATAKYFFYSNIMNFFKTEITLANGEIRKRPLIETNGETGEIVWDKGRDFATVRKVLSMPQVNIVKKTEVQTGGFSKESILPKRNSDKLIARKKDWDPKKYGGFDSPTVAYSVLVVAKVEKGKSKKLKSVKELLGITIMERSSFEKNPIDFLEAKGYKEVKKDLIIKLPKYSLFELENGRKRMLASAGELQKGNELALPSKYVNFLYLASHYEKLKGSPEDNEQKQLFVEQHKHYLDEIIEQISEFSKRVILADANLDKVLSAYNKHRDKPIREQAENIIHLFTLTNLGAPAAFKYFDTTIDRKRYTSTKEVLDATLIHQSITGLYETRIDLSQLGGDGGEAAAKGGGGGMDPLQLLQPLEAEIKGTKLKAHWNSGATITCVPQAFLEEEVPIKNIWIKTIHGEKEQPVYYLTFKIQGRKVEAEVISSPYDYILVSPSDIPWLMKKPLQLTTLVPLQEYEERLLKQTMLTGSYKEKLQSLFLKYDALWQHWENQVGHRRIKPHHIATGTVNPRPQKQYPINPKAKASIQTVINDLLKQGVLIQQNSIMNTPVYPVPKPDGKWRMVLDYREVNKTIPLIAAQNQHSAGILSSIFRGKYKTTLDLSNGFWAHSITPESYWLTAFTWLGQQYCWTRLPQGFLNSPALFNADVVDLLKEVPNVQVYVDDIYISHDDPREHLEQLEKVFSLLLNAGYVVSLKKSEIAQHEVEFLGFNITKEGRGLTETFKQKLLNITPPRDLKQLQSILGKLNFARNFIPNFSELVKPLYNIIATAPGKYITWTTDNSQQLQNIISMLNSAENLEERNPEVRLIMKVNTSPSAGYIRFYNEFAKRPIMYLNYVYTKAEVKFTNTEKLLTTIHKGLIKALDLGMGQEILVYSPIVSMTKIQKTPLPERKALPIRWITWMSYLEDPRIQFHYDKTLPELQQVPTVTDDIIAKIKHPSEFSMVFYTDGSAIKHPNVNKSHNAGMGIAQVQFKPEFTVINTWSIPLGDHTAQLAEVAAVEFACKKALKIDGPVLIVTDSFYVAESVNKELPYWQSNGFFNNKKKPLKHVSKWKSIADCIQLKPDIIIIHEKGHQPTASTFHTEGNNLADKLATQGSYVVNAGKRTADGSEFEKRTADGSEFESPKKKAKVE

SEQ ID NO: 6702 - protein, 2091 aa, synthetic construct
MPAAKRVKLDGGDKKYSIGLDIGTNSVGWAVITDEYKVPSKKFKVLGNTDRHSIKKNLIGALLFDSGETAEATRLKRTARRRYTRRKNRICYLQEIFSNEMAKVDDSFFHRLEESFLVEEDKKHERHPIFGNIVDEVAYHEKYPTIYHLRKKLVDSTDKADLRLIYLALAHMIKFRGHFLIEGDLNPDNSDVDKLFIQLVQTYNQLFEENPINASGVDAKAILSARLSKSRRLENLIAQLPGEKKNGLFGNLIALSLGLTPNFKSNFDLAEDAKLQLSKDTYDDDLDNLLAQIGDQYADLFLAAKNLSDAILLSDILRVNTEITKAPLSASMIKRYDEHHQDLTLLKALVRQQLPEKYKEIFFDQSKNGYAGYIDGGASQEEFYKFIKPILEKMDGTEELLVKLNREDLLRKQRTFDNGSIPHQIHLGELHAILRRQEDFYPFLKDNREKIEKILTFRIPYYVGPLARGNSRFAWMTRKSEETITPWNFEEVVDKGASAQSFIERMTNFDKNLPNEKVLPKHSLLYEYFTVYNELTKVKYVTEGMRKPAFLSGEQKKAIVDLLFKTNRKVTVKQLKEDYFKKIECFDSVEISGVEDRFNASLGTYHDLLKIIKDKDFLDNEENEDILEDIVLTLTLFEDREMIEERLKTYAHLFDDKVMKQLKRRRYTGWGRLSRKLINGIRDKQSGKTILDFLKSDGFANRNFMQLIHDDSLTFKEDIQKAQVSGQGDSLHEHIANLAGSPAIKKGILQTVKVVDELVKVMGRHKPENIVIEMARENQTTQKGQKNSRERMKRIEEGIKELGSQILKEHPVENTQLQNEKLYLYYLQNGRDMYVDQELDINRLSDYDVDHIVPQSFLKDDSIDNKVLTRSDKARGKSDNVPSEEVVKKMKNYWRQLLNAKLITQRKFDNLTKAERGGLSELDKAGFIKRQLVETRQITKHVAQILDSRMNTKYDENDKLIREVKVITLKSKLVSDFRKDFQFYKVREINNYHHAHDAYLNAVVGTALIKKYPKLESEFVYGDYKVYDVRKMIAKSEQEIGKATAKYFFYSNIMNFFKTEITLANGEIRKRPLIETNGETGEIVWDKGRDFATVRKVLSMPQVNIVKKTEVQTGGFSKESILPKRNSDKLIARKKDWDPKKYGGFDSPTVAYSVLVVAKVEKGKSKKLKSVKELLGITIMERSSFEKNPIDFLEAKGYKEVKKDLIIKLPKYSLFELENGRKRMLASAGELQKGNELALPSKYVNFLYLASHYEKLKGSPEDNEQKQLFVEQHKHYLDEIIEQISEFSKRVILADANLDKVLSAYNKHRDKPIREQAENIIHLFTLTNLGAPAAFKYFDTTIDRKRYTSTKEVLDATLIHQSITGLYETRIDLSQLGGDGGEAAAKGGGGGVLNLEEEYRLHEKPVPSSIDPSWLQLFPTVWAERAGMGLANQVPPVVVELRSGASPVAVRQYPMSKEAREGIRPHIQRFLDLGVLVPCQSPWNTPLLPVKKPGTNDYRPVQDLREINKRVQDIHPTVPNPYNLLSSLPPSHTWYSVLDLKDAFFCLKLHPNSQPLFAFEWRDPEKGNTGQLTWTRLPQGFKNSPTLFDEALHRDLAPFRALNPQVVLLQYVDDLLVAAPTYRDCKEGTQKLLQELSKLGYRVSAKKAQLCQKEVTYLGYLLKEGKRWLTPARKATVMKIPPPTTPRQVREFLGTAGFCRLWIPGFASLAAPLYPLTKESIPFIWTEEHQKAFDRIKEALLSAPALALPDLTKPFTLYVDERAGVARGVLTQTLGPWRRPVAYLSKKLDPVASGWPTCLKAVAAVALLLKDADKLTLGQNVTVIASHSLESIVRQPPDRWMTNARMTHYQSLLLNERVSFAPPAVLNPATLLPVESEATPVHRCSEILAEETGTRRDLKDQPLPGVPAWYTDGSSFIAEGKRRAGAAIVDGKRTVWASSLPEGTSAQKAELVALTQALRLAEGKDINIYTDSRYAFATAHIHGAIYKQRGLLTSAGKDIKNKEEILALLEAIHLPKRVAIIHCPGHQKGNDPVATGNRRADEAAKQAALSTRVLAETTKPAGKRTADGSEFEKRTADGSEFESPKKKAKVE

SEQ ID NO: 6703 - protein, 2093 aa, synthetic construct
MPAAKRVKLDGGDKKYSIGLDIGTNSVGWAVITDEYKVPSKKFKVLGNTDRHSIKKNLIGALLFDSGETAEATRLKRTARRRYTRRKNRICYLQEIFSNEMAKVDDSFFHRLEESFLVEEDKKHERHPIFGNIVDEVAYHEKYPTIYHLRKKLVDSTDKADLRLIYLALAHMIKFRGHFLIEGDLNPDNSDVDKLFIQLVQTYNQLFEENPINASGVDAKAILSARLSKSRRLENLIAQLPGEKKNGLFGNLIALSLGLTPNFKSNFDLAEDAKLQLSKDTYDDDLDNLLAQIGDQYADLFLAAKNLSDAILLSDILRVNTEITKAPLSASMIKRYDEHHQDLTLLKALVRQQLPEKYKEIFFDQSKNGYAGYIDGGASQEEFYKFIKPILEKMDGTEELLVKLNREDLLRKQRTFDNGSIPHQIHLGELHAILRRQEDFYPFLKDNREKIEKILTFRIPYYVGPLARGNSRFAWMTRKSEETITPWNFEEVVDKGASAQSFIERMTNFDKNLPNEKVLPKHSLLYEYFTVYNELTKVKYVTEGMRKPAFLSGEQKKAIVDLLFKTNRKVTVKQLKEDYFKKIECFDSVEISGVEDRFNASLGTYHDLLKIIKDKDFLDNEENEDILEDIVLTLTLFEDREMIEERLKTYAHLFDDKVMKQLKRRRYTGWGRLSRKLINGIRDKQSGKTILDFLKSDGFANRNFMQLIHDDSLTFKEDIQKAQVSGQGDSLHEHIANLAGSPAIKKGILQTVKVVDELVKVMGRHKPENIVIEMARENQTTQKGQKNSRERMKRIEEGIKELGSQILKEHPVENTQLQNEKLYLYYLQNGRDMYVDQELDINRLSDYDVDHIVPQSFLKDDSIDNKVLTRSDKARGKSDNVPSEEVVKKMKNYWRQLLNAKLITQRKFDNLTKAERGGLSELDKAGFIKRQLVETRQITKHVAQILDSRMNTKYDENDKLIREVKVITLKSKLVSDFRKDFQFYKVREINNYHHAHDAYLNAVVGTALIKKYPKLESEFVYGDYKVYDVRKMIAKSEQEIGKATAKYFFYSNIMNFFKTEITLANGEIRKRPLIETNGETGEIVWDKGRDFATVRKVLSMPQVNIVKKTEVQTGGFSKESILPKRNSDKLIARKKDWDPKKYGGFDSPTVAYSVLVVAKVEKGKSKKLKSVKELLGITIMERSSFEKNPIDFLEAKGYKEVKKDLIIKLPKYSLFELENGRKRMLASAGELQKGNELALPSKYVNFLYLASHYEKLKGSPEDNEQKQLFVEQHKHYLDEIIEQISEFSKRVILADANLDKVLSAYNKHRDKPIREQAENIIHLFTLTNLGAPAAFKYFDTTIDRKRYTSTKEVLDATLIHQSITGLYETRIDLSQLGGDGGGGGPAPGGTAPLEEEYRLFLEAPIQNVTLLEQWKREIPKVWAEINPPGLASTQAPIHVQLLSTALPVRVRQYPITLEAKRSLRETIRKFRAAGILRPVHSPWNTPLLPVRKSGTSEYRMVQDLREVNKRVETIHPTVPNPYTLLSLLPPDRIWYSVLDLKDAFFCIPLAPESQLIFAFEWADAEEGESGQLTWTRLPQGFKNSPTLFNEALNRDLQGFRLDHPSVSLLQYVDDLLIAADTQAACLSATRDLLMTLAELGYRVSGKKAQLCQEEVTYLGFKIHKGSRSLSNSRTQAILQIPVPKTKRQVREFLGTIGYCRLWIPGFAELAQPLYAATRPGNDPLVWGEKEEEAFQSLKLALTQPPALALPSLDKPFQLFVEETSGAAKGVLTQALGPWKRPVAYLSKRLDPVAAGWPRCLRAIAAAALLTREASKLTFGQDIEITSSHNLESLLRSPPDKWLTNARITQYQVLLLDPPRVRFKQTAALNPATLLPETDDTLPIHHCLDTLDSLTSTRPDLTDQPLAQAEATLFTDGSSYIRDGKRYAGAAVVTLDSVIWAEPLPIGTSAQKAELIALTKALEWSKDKSVNIYTDSRYAFATLHVHGMIYRERGWLTAGGKAIKNAPEILALLTAVWLPKRVAVMHCKGHQKDDAPTSTGNRRADEVAREVAIRPLSTQATISAGKRTADGSEFEKRTADGSEFESPKKKAKVE

SEQ ID NO: 6704 - protein, 2082 aa, synthetic construct
MPAAKRVKLDGGDKKYSIGLDIGTNSVGWAVITDEYKVPSKKFKVLGNTDRHSIKKNLIGALLFDSGETAEATRLKRTARRRYTRRKNRICYLQEIFSNEMAKVDDSFFHRLEESFLVEEDKKHERHPIFGNIVDEVAYHEKYPTIYHLRKKLVDSTDKADLRLIYLALAHMIKFRGHFLIEGDLNPDNSDVDKLFIQLVQTYNQLFEENPINASGVDAKAILSARLSKSRRLENLIAQLPGEKKNGLFGNLIALSLGLTPNFKSNFDLAEDAKLQLSKDTYDDDLDNLLAQIGDQYADLFLAAKNLSDAILLSDILRVNTEITKAPLSASMIKRYDEHHQDLTLLKALVRQQLPEKYKEIFFDQSKNGYAGYIDGGASQEEFYKFIKPILEKMDGTEELLVKLNREDLLRKQRTFDNGSIPHQIHLGELHAILRRQEDFYPFLKDNREKIEKILTFRIPYYVGPLARGNSRFAWMTRKSEETITPWNFEEVVDKGASAQSFIERMTNFDKNLPNEKVLPKHSLLYEYFTVYNELTKVKYVTEGMRKPAFLSGEQKKAIVDLLFKTNRKVTVKQLKEDYFKKIECFDSVEISGVEDRFNASLGTYHDLLKIIKDKDFLDNEENEDILEDIVLTLTLFEDREMIEERLKTYAHLFDDKVMKQLKRRRYTGWGRLSRKLINGIRDKQSGKTILDFLKSDGFANRNFMQLIHDDSLTFKEDIQKAQVSGQGDSLHEHIANLAGSPAIKKGILQTVKVVDELVKVMGRHKPENIVIEMARENQTTQKGQKNSRERMKRIEEGIKELGSQILKEHPVENTQLQNEKLYLYYLQNGRDMYVDQELDINRLSDYDVDHIVPQSFLKDDSIDNKVLTRSDKARGKSDNVPSEEVVKKMKNYWRQLLNAKLITQRKFDNLTKAERGGLSELDKAGFIKRQLVETRQITKHVAQILDSRMNTKYDENDKLIREVKVITLKSKLVSDFRKDFQFYKVREINNYHHAHDAYLNAVVGTALIKKYPKLESEFVYGDYKVYDVRKMIAKSEQEIGKATAKYFFYSNIMNFFKTEITLANGEIRKRPLIETNGETGEIVWDKGRDFATVRKVLSMPQVNIVKKTEVQTGGFSKESILPKRNSDKLIARKKDWDPKKYGGFDSPTVAYSVLVVAKVEKGKSKKLKSVKELLGITIMERSSFEKNPIDFLEAKGYKEVKKDLIIKLPKYSLFELENGRKRMLASAGELQKGNELALPSKYVNFLYLASHYEKLKGSPEDNEQKQLFVEQHKHYLDEIIEQISEFSKRVILADANLDKVLSAYNKHRDKPIREQAENIIHLFTLTNLGAPAAFKYFDTTIDRKRYTSTKEVLDATLIHQSITGLYETRIDLSQLGGDGGGGGPAPGGVPWILKKPLELTIKLDLEEQQGTLLNNSILSKKGKEELKQLFEKYSALWQSWENQVGHRRIRPHKIATGTVKPTPQKQYHINPKAKPDIQIVINDLLKQGVLIQKESTMNTPVYPVPKPNGRWRMVLDYRAVNKVTPLIAVQNQHSYGILGSLFKGRYKTTIDLSNGFWAHPIVPEDYWITAFTWQGKQYCWTVLPQGFLNSPGLFTGDVVDLLQGIPNVEVYVDDVYISHDSEKEHLEYLDILFNRLKEAGYIISLKKSNIANSIVDFLGFQITNEGRGLTDTFKEKLENITAPTTLKQLQSILGLLNFARNFIPDFTELIAPLYALIPKSTKNYVPWQIEHSTTLETLITKLNGAEYLQGRKGDKTLIMKVNASYTTGYIRYYNEGEKKPISYVSIVFSKTELKFTELEKLLTTVHKGLLKALDLSMGQNIHVYSPIVSMQNIQKTPQTAKKALASRWLSWLSYLEDPRIRFFYDPQMPALKDLPAVDTGKDNKKHPSNFQHIFYTDGSAITSPTKEGHLNAGMGIVYFINKDGNLQKQQEWSISLGNHTAQFAEIAAFEFALKKCLPLGGNILVVTDSNYVAKAYNEELDVWASNGFVNNRKKPLKHISKWKSVADLKRLRPDVVVTHEPGHQKLDSSPHAYGNNLADQLATQASFKVHAGKRTADGSEFEKRTADGSEFESPKKKAKVE

SEQ ID NO: 6705 - protein, 2213 aa, synthetic construct
MPAAKRVKLDGGDKKYSIGLDIGTNSVGWAVITDEYKVPSKKFKVLGNTDRHSIKKNLIGALLFDSGETAEATRLKRTARRRYTRRKNRICYLQEIFSNEMAKVDDSFFHRLEESFLVEEDKKHERHPIFGNIVDEVAYHEKYPTIYHLRKKLVDSTDKADLRLIYLALAHMIKFRGHFLIEGDLNPDNSDVDKLFIQLVQTYNQLFEENPINASGVDAKAILSARLSKSRRLENLIAQLPGEKKNGLFGNLIALSLGLTPNFKSNFDLAEDAKLQLSKDTYDDDLDNLLAQIGDQYADLFLAAKNLSDAILLSDILRVNTEITKAPLSASMIKRYDEHHQDLTLLKALVRQQLPEKYKEIFFDQSKNGYAGYIDGGASQEEFYKFIKPILEKMDGTEELLVKLNREDLLRKQRTFDNGSIPHQIHLGELHAILRRQEDFYPFLKDNREKIEKILTFRIPYYVGPLARGNSRFAWMTRKSEETITPWNFEEVVDKGASAQSFIERMTNFDKNLPNEKVLPKHSLLYEYFTVYNELTKVKYVTEGMRKPAFLSGEQKKAIVDLLFKTNRKVTVKQLKEDYFKKIECFDSVEISGVEDRFNASLGTYHDLLKIIKDKDFLDNEENEDILEDIVLTLTLFEDREMIEERLKTYAHLFDDKVMKQLKRRRYTGWGRLSRKLINGIRDKQSGKTILDFLKSDGFANRNFMQLIHDDSLTFKEDIQKAQVSGQGDSLHEHIANLAGSPAIKKGILQTVKVVDELVKVMGRHKPENIVIEMARENQTTQKGQKNSRERMKRIEEGIKELGSQILKEHPVENTQLQNEKLYLYYLQNGRDMYVDQELDINRLSDYDVDHIVPQSFLKDDSIDNKVLTRSDKARGKSDNVPSEEVVKKMKNYWRQLLNAKLITQRKFDNLTKAERGGLSELDKAGFIKRQLVETRQITKHVAQILDSRMNTKYDENDKLIREVKVITLKSKLVSDFRKDFQFYKVREINNYHHAHDAYLNAVVGTALIKKYPKLESEFVYGDYKVYDVRKMIAKSEQEIGKATAKYFFYSNIMNFFKTEITLANGEIRKRPLIETNGETGEIVWDKGRDFATVRKVLSMPQVNIVKKTEVQTGGFSKESILPKRNSDKLIARKKDWDPKKYGGFDSPTVAYSVLVVAKVEKGKSKKLKSVKELLGITIMERSSFEKNPIDFLEAKGYKEVKKDLIIKLPKYSLFELENGRKRMLASAGELQKGNELALPSKYVNFLYLASHYEKLKGSPEDNEQKQLFVEQHKHYLDEIIEQISEFSKRVILADANLDKVLSAYNKHRDKPIREQAENIIHLFTLTNLGAPAAFKYFDTTIDRKRYTSTKEVLDATLIHQSITGLYETRIDLSQLGGDGGGGGPAPGGTLGDQGSRGSDPLPEPRVTLTVEGIPTEFLVNTGAEHSVLTKPMGKMGSKRTVVAGATGSKVYPWTTKRLLKIGQKQVTHSFLVIPECPAPLLGRDLLTKLKAQIQFSTEGPQVTWEDRPAMCLVLNLEEEYRLHEKPVPPSIDPSWLQLFPMVWAEKAGMGLANQVPPVVVELKSDASPVAVRQYPMSKEAREGIRPHIQRFLDLGILVPCQSPWNTPLLPVKKPGTNDYRPVQDLREVNKRVQDIHPTVPNPYNLLSSLPPSHTWYSVLDLKDAFFCLKLHPNSQPLFAFEWRDPEKGNTGQLTWTRLPQGFKNSPTLFNEALHRDLASFRALNPQVVMLQYVDDLLVAAPTYRDCKEGTRRLLQELSKLGYRVSAKKAQLCREEVTYLGYLLKGGKRWLTPARKATVMKIPTPTTPRQVREFLGTAGFCRLWIPGFASLAAPLYPLTRPKVPFTWTEAHQEAFGRIKEALLSAPALALPDLTKPFALYVDEKEGVARGVLTQTLGPWRRPVAYLSKKLDPVASGWPTCLKAIAAVALLLKDADKLTLGQNVLVIAPHNLESIVRQPPDRWMTNARMTHYQSLLLNERVSFAPPAILNPATLLPVESDDTPIHICSEILAEETGTRPDLRDQPLPGVPAWYTDGSSFIMDGRRQAGAAIVDNKRTVWASNLPEGTSAQKAELIALTQALRLAEGKSINIYTDSRYAFATAHVHGAIYKQRGWLTSAGKDIKNKEEILALLEAIHLPKRVAIIHCPGHQRGTDPVATGNRKADEAAKQAAQSTRILTETTKNAGKRTADGSEFEKRTADGSEFESPKKKAKVE

SEQ ID NO: 6706 - protein, 2091 aa, synthetic construct
MPAAKRVKLDGGDKKYSIGLDIGTNSVGWAVITDEYKVPSKKFKVLGNTDRHSIKKNLIGALLFDSGETAEATRLKRTARRRYTRRKNRICYLQEIFSNEMAKVDDSFFHRLEESFLVEEDKKHERHPIFGNIVDEVAYHEKYPTIYHLRKKLVDSTDKADLRLIYLALAHMIKFRGHFLIEGDLNPDNSDVDKLFIQLVQTYNQLFEENPINASGVDAKAILSARLSKSRRLENLIAQLPGEKKNGLFGNLIALSLGLTPNFKSNFDLAEDAKLQLSKDTYDDDLDNLLAQIGDQYADLFLAAKNLSDAILLSDILRVNTEITKAPLSASMIKRYDEHHQDLTLLKALVRQQLPEKYKEIFFDQSKNGYAGYIDGGASQEEFYKFIKPILEKMDGTEELLVKLNREDLLRKQRTFDNGSIPHQIHLGELHAILRRQEDFYPFLKDNREKIEKILTFRIPYYVGPLARGNSRFAWMTRKSEETITPWNFEEVVDKGASAQSFIERMTNFDKNLPNEKVLPKHSLLYEYFTVYNELTKVKYVTEGMRKPAFLSGEQKKAIVDLLFKTNRKVTVKQLKEDYFKKIECFDSVEISGVEDRFNASLGTYHDLLKIIKDKDFLDNEENEDILEDIVLTLTLFEDREMIEERLKTYAHLFDDKVMKQLKRRRYTGWGRLSRKLINGIRDKQSGKTILDFLKSDGFANRNFMQLIHDDSLTFKEDIQKAQVSGQGDSLHEHIANLAGSPAIKKGILQTVKVVDELVKVMGRHKPENIVIEMARENQTTQKGQKNSRERMKRIEEGIKELGSQILKEHPVENTQLQNEKLYLYYLQNGRDMYVDQELDINRLSDYDVDHIVPQSFLKDDSIDNKVLTRSDKARGKSDNVPSEEVVKKMKNYWRQLLNAKLITQRKFDNLTKAERGGLSELDKAGFIKRQLVETRQITKHVAQILDSRMNTKYDENDKLIREVKVITLKSKLVSDFRKDFQFYKVREINNYHHAHDAYLNAVVGTALIKKYPKLESEFVYGDYKVYDVRKMIAKSEQEIGKATAKYFFYSNIMNFFKTEITLANGEIRKRPLIETNGETGEIVWDKGRDFATVRKVLSMPQVNIVKKTEVQTGGFSKESILPKRNSDKLIARKKDWDPKKYGGFDSPTVAYSVLVVAKVEKGKSKKLKSVKELLGITIMERSSFEKNPIDFLEAKGYKEVKKDLIIKLPKYSLFELENGRKRMLASAGELQKGNELALPSKYVNFLYLASHYEKLKGSPEDNEQKQLFVEQHKHYLDEIIEQISEFSKRVILADANLDKVLSAYNKHRDKPIREQAENIIHLFTLTNLGAPAAFKYFDTTIDRKRYTSTKEVLDATLIHQSITGLYETRIDLSQLGGDGGGGGPAPGGTLNLEDEYRLYETSAEPEVSPGSTWLSDFPQAWAETGGMGLAVRQAPLIIPLKATSTPVSIKQYPMSQEAKLGIKPHIQRLLDQGILVPCQSPWNTPLLPVKKPGTNDYRPVQDLREVNKRVEDIHPTVPNPYNLLSGLPPSHRWYTVLDLKDAFFCLRLHPTSQPLFAFEWRDPGMGISGQLTWTRLPQGFKNSPTLFNEALHRDLADFRIQHPDLILLQYVDDILLAATSELDCQQGTRALLLTLGNLGYRASAKKAQLCQKQVKYLGYLLKEGQRWLTEARKETVMGQPTPKTPRQLREFLGKAGFCRLFIPGFAEMAAPLYPLTKPGTLFNWGPDQQKAYQEIKQALLTAPALGLPDLTKPFELFVDEKQGYAKGVLTQKLGPWRRPVAYLSKKLDPVAAGWPPCLRMVAAIAVLRKDAGKLTMGQPLVILAPHAVEALVKQPPDRWLSNARMTHYQAMLLDTDRVQFGPVVALNPATLLPLPEEGAPHDCLEILAETHGTRPDLTDQPIPDADHTWYTDGSSFLQEGQRKAGAAVTTETEVIWARALPAGTSAQRAELIALTQALKMAEGKRLNVYTDSRYAFATAHIHGEIYRRRGWLTSEGREIKNKSEILALLKALFLPKRLSIIHCLGHQKGDSAEARGNRLADQAAREAAIKTPPDTSTLLAGKRTADGSEFEKRTADGSEFESPKKKAKVE

SEQ ID NO: 6707 - protein, 2091 aa, synthetic construct
MPAAKRVKLDGGDKKYSIGLDIGTNSVGWAVITDEYKVPSKKFKVLGNTDRHSIKKNLIGALLFDSGETAEATRLKRTARRRYTRRKNRICYLQEIFSNEMAKVDDSFFHRLEESFLVEEDKKHERHPIFGNIVDEVAYHEKYPTIYHLRKKLVDSTDKADLRLIYLALAHMIKFRGHFLIEGDLNPDNSDVDKLFIQLVQTYNQLFEENPINASGVDAKAILSARLSKSRRLENLIAQLPGEKKNGLFGNLIALSLGLTPNFKSNFDLAEDAKLQLSKDTYDDDLDNLLAQIGDQYADLFLAAKNLSDAILLSDILRVNTEITKAPLSASMIKRYDEHHQDLTLLKALVRQQLPEKYKEIFFDQSKNGYAGYIDGGASQEEFYKFIKPILEKMDGTEELLVKLNREDLLRKQRTFDNGSIPHQIHLGELHAILRRQEDFYPFLKDNREKIEKILTFRIPYYVGPLARGNSRFAWMTRKSEETITPWNFEEVVDKGASAQSFIERMTNFDKNLPNEKVLPKHSLLYEYFTVYNELTKVKYVTEGMRKPAFLSGEQKKAIVDLLFKTNRKVTVKQLKEDYFKKIECFDSVEISGVEDRFNASLGTYHDLLKIIKDKDFLDNEENEDILEDIVLTLTLFEDREMIEERLKTYAHLFDDKVMKQLKRRRYTGWGRLSRKLINGIRDKQSGKTILDFLKSDGFANRNFMQLIHDDSLTFKEDIQKAQVSGQGDSLHEHIANLAGSPAIKKGILQTVKVVDELVKVMGRHKPENIVIEMARENQTTQKGQKNSRERMKRIEEGIKELGSQILKEHPVENTQLQNEKLYLYYLQNGRDMYVDQELDINRLSDYDVDHIVPQSFLKDDSIDNKVLTRSDKARGKSDNVPSEEVVKKMKNYWRQLLNAKLITQRKFDNLTKAERGGLSELDKAGFIKRQLVETRQITKHVAQILDSRMNTKYDENDKLIREVKVITLKSKLVSDFRKDFQFYKVREINNYHHAHDAYLNAVVGTALIKKYPKLESEFVYGDYKVYDVRKMIAKSEQEIGKATAKYFFYSNIMNFFKTEITLANGEIRKRPLIETNGETGEIVWDKGRDFATVRKVLSMPQVNIVKKTEVQTGGFSKESILPKRNSDKLIARKKDWDPKKYGGFDSPTVAYSVLVVAKVEKGKSKKLKSVKELLGITIMERSSFEKNPIDFLEAKGYKEVKKDLIIKLPKYSLFELENGRKRMLASAGELQKGNELALPSKYVNFLYLASHYEKLKGSPEDNEQKQLFVEQHKHYLDEIIEQISEFSKRVILADANLDKVLSAYNKHRDKPIREQAENIIHLFTLTNLGAPAAFKYFDTTIDRKRYTSTKEVLDATLIHQSITGLYETRIDLSQLGGDGGGGGPAPGGTLGIEDEYRLHETSTEPDVSLGSTWLSDFPQAWAETGGMGLAVRQAPLIIPLKATSTPVSIQQYPMSHEARLGIKPHIQRLLDQGILVPCQSPWNTPLLPVKKPGTNDYRPVQDLREVNKRVEDIHPTVPNPYNLLSGLPPSHQWYTVLDLKDAFFCLRLHPTSQPLFAFEWRDPGMGISGQLTWTRLPQGFKNSPTLFNEALHRDLADFRIQHPDLILLQYVDDILLAATSELDCQQGTRALLQTLGDLGYRASAKKAQICQKQVKYLGYLLREGQRWLTEARKETVMGQPVPKTPRQLREFLGTAGFCRLWIPGFAEMAAPLYPLTKPGTLFSWGPDQQKAYQEIKQALLTAPALGLPDLTKPFELFVDEKQGYAKGVLTQKLGPWRRPVAYLSKKLDPVAAGWPPCLRMVAAIAVLTKDAGKLTMGQPLVILAPHAVEALVKQPPDRWLSNARMTHYQAMLLDTDRVQFGPVVALNPATLLPLPEEGAPHDCLEILAETHGTRPDLTDQPIPDADHTWYTDGSSFLQEGQRKAGAAVTTETEVIWAGALPAGTSAQRAELIALTQALKMAEGKRLNVYTDSRYAFATAHIHGEIYRRRGWLTSEGREIKNKSEILALLKALFLPKRLSIIHCLGHQKGDSAEARGNRLADQAAREAAIKTPPDTSTLLAGKRTADGSEFEKRTADGSEFESPKKKAKVE

SEQ ID NO: 6708 - protein, 2091 aa, synthetic construct
MPAAKRVKLDGGDKKYSIGLDIGTNSVGWAVITDEYKVPSKKFKVLGNTDRHSIKKNLIGALLFDSGETAEATRLKRTARRRYTRRKNRICYLQEIFSNEMAKVDDSFFHRLEESFLVEEDKKHERHPIFGNIVDEVAYHEKYPTIYHLRKKLVDSTDKADLRLIYLALAHMIKFRGHFLIEGDLNPDNSDVDKLFIQLVQTYNQLFEENPINASGVDAKAILSARLSKSRRLENLIAQLPGEKKNGLFGNLIALSLGLTPNFKSNFDLAEDAKLQLSKDTYDDDLDNLLAQIGDQYADLFLAAKNLSDAILLSDILRVNTEITKAPLSASMIKRYDEHHQDLTLLKALVRQQLPEKYKEIFFDQSKNGYAGYIDGGASQEEFYKFIKPILEKMDGTEELLVKLNREDLLRKQRTFDNGSIPHQIHLGELHAILRRQEDFYPFLKDNREKIEKILTFRIPYYVGPLARGNSRFAWMTRKSEETITPWNFEEVVDKGASAQSFIERMTNFDKNLPNEKVLPKHSLLYEYFTVYNELTKVKYVTEGMRKPAFLSGEQKKAIVDLLFKTNRKVTVKQLKEDYFKKIECFDSVEISGVEDRFNASLGTYHDLLKIIKDKDFLDNEENEDILEDIVLTLTLFEDREMIEERLKTYAHLFDDKVMKQLKRRRYTGWGRLSRKLINGIRDKQSGKTILDFLKSDGFANRNFMQLIHDDSLTFKEDIQKAQVSGQGDSLHEHIANLAGSPAIKKGILQTVKVVDELVKVMGRHKPENIVIEMARENQTTQKGQKNSRERMKRIEEGIKELGSQILKEHPVENTQLQNEKLYLYYLQNGRDMYVDQELDINRLSDYDVDHIVPQSFLKDDSIDNKVLTRSDKARGKSDNVPSEEVVKKMKNYWRQLLNAKLITQRKFDNLTKAERGGLSELDKAGFIKRQLVETRQITKHVAQILDSRMNTKYDENDKLIREVKVITLKSKLVSDFRKDFQFYKVREINNYHHAHDAYLNAVVGTALIKKYPKLESEFVYGDYKVYDVRKMIAKSEQEIGKATAKYFFYSNIMNFFKTEITLANGEIRKRPLIETNGETGEIVWDKGRDFATVRKVLSMPQVNIVKKTEVQTGGFSKESILPKRNSDKLIARKKDWDPKKYGGFDSPTVAYSVLVVAKVEKGKSKKLKSVKELLGITIMERSSFEKNPIDFLEAKGYKEVKKDLIIKLPKYSLFELENGRKRMLASAGELQKGNELALPSKYVNFLYLASHYEKLKGSPEDNEQKQLFVEQHKHYLDEIIEQISEFSKRVILADANLDKVLSAYNKHRDKPIREQAENIIHLFTLTNLGAPAAFKYFDTTIDRKRYTSTKEVLDATLIHQSITGLYETRIDLSQLGGDGGGGGPAPGGTLNIEDEHRLHETSKEPDVSLGSTWLSDFPQAWAETGGMGLAVRQAPLIIPLKATSTPVSIKQYPMSQEARLGIKPHIQRLLDQGILVPCQSPWNTPLLPVKKPGTNDYRPVQDLREVNKRVEDIHPTVPNPYNLLSGLPPSHQWYTVLDLKDAFFCLRLHPTSQPLFAFEWRDPEMGISGQLTWTRLPQGFKNSPTLFNEALHRDLADFRIQHPDLILLQYVDDLLLAATSELDCQQGTRALLQTLGNLGYRASAKKAQICQKQVKYLGYLLKEGQRWLTEARKETVMGQPTPKTPRQLREFLGTAGFCRLWIPGFAEMAAPLYPLTKPGTLFNWGPDQQKAYQEIKQALLTAPALGLPDLTKPFELFVDEKQGYAKGVLTQKLGPWRRPVAYLSKKLDPVAAGWPPCLRMVAAIAVLTKDAGKLTMGQPLVILAPHAVEALVKQPPDRWLSNARMTHYQALLLDTDRVQFGPVVALNPATLLPLPEEGLQHNCLDILAEAHGTRPDLTDQPLPDADHTWYTDGSSLLQEGQRKAGAAVTTETEVIWAKALPAGTSAQRAELIALTQALKMAEGKKLNVYTDSRYAFATAHIHGEIYRRRGWLTSEGKEIKNKDEILALLKALFLPKRLSIIHCPGHQKGHSAEARGNRMADQAARKAAITETPDTSTLLAGKRTADGSEFEKRTADGSEFESPKKKAKVE

SEQ ID NO: 6709 - protein, 2091 aa, synthetic construct; identical to SEQ ID NO: 6708

SEQ ID NO: 6710 - protein, 2085 aa, synthetic construct
MPAAKRVKLDGGDKKYSIGLDIGTNSVGWAVITDEYKVPSKKFKVLGNTDRHSIKKNLIGALLFDSGETAEATRLKRTARRRYTRRKNRICYLQEIFSNEMAKVDDSFFHRLEESFLVEEDKKHERHPIFGNIVDEVAYHEKYPTIYHLRKKLVDSTDKADLRLIYLALAHMIKFRGHFLIEGDLNPDNSDVDKLFIQLVQTYNQLFEENPINASGVDAKAILSARLSKSRRLENLIAQLPGEKKNGLFGNLIALSLGLTPNFKSNFDLAEDAKLQLSKDTYDDDLDNLLAQIGDQYADLFLAAKNLSDAILLSDILRVNTEITKAPLSASMIKRYDEHHQDLTLLKALVRQQLPEKYKEIFFDQSKNGYAGYIDGGASQEEFYKFIKPILEKMDGTEELLVKLNREDLLRKQRTFDNGSIPHQIHLGELHAILRRQEDFYPFLKDNREKIEKILTFRIPYYVGPLARGNSRFAWMTRKSEETITPWNFEEVVDKGASAQSFIERMTNFDKNLPNEKVLPKHSLLYEYFTVYNELTKVKYVTEGMRKPAFLSGEQKKAIVDLLFKTNRKVTVKQLKEDYFKKIECFDSVEISGVEDRFNASLGTYHDLLKIIKDKDFLDNEENEDILEDIVLTLTLFEDREMIEERLKTYAHLFDDKVMKQLKRRRYTGWGRLSRKLINGIRDKQSGKTILDFLKSDGFANRNFMQLIHDDSLTFKEDIQKAQVSGQGDSLHEHIANLAGSPAIKKGILQTVKVVDELVKVMGRHKPENIVIEMARENQTTQKGQKNSRERMKRIEEGIKELGSQILKEHPVENTQLQNEKLYLYYLQNGRDMYVDQELDINRLSDYDVDHIVPQSFLKDDSIDNKVLTRSDKARGKSDNVPSEEVVKKMKNYWRQLLNAKLITQRKFDNLTKAERGGLSELDKAGFIKRQLVETRQITKHVAQILDSRMNTKYDENDKLIREVKVITLKSKLVSDFRKDFQFYKVREINNYHHAHDAYLNAVVGTALIKKYPKLESEFVYGDYKVYDVRKMIAKSEQEIGKATAKYFFYSNIMNFFKTEITLANGEIRKRPLIETNGETGEIVWDKGRDFATVRKVLSMPQVNIVKKTEVQTGGFSKESILPKRNSDKLIARKKDWDPKKYGGFDSPTVAYSVLVVAKVEKGKSKKLKSVKELLGITIMERSSFEKNPIDFLEAKGYKEVKKDLIIKLPKYSLFELENGRKRMLASAGELQKGNELALPSKYVNFLYLASHYEKLKGSPEDNEQKQLFVEQHKHYLDEIIEQISEFSKRVILADANLDKVLSAYNKHRDKPIREQAENIIHLFTLTNLGAPAAFKYFDTTIDRKRYTSTKEVLDATLIHQSITGLYETRIDLSQLGGDGGGGGPAPGGTLQLDDEYRLYSPLVKPDQNIQFWLEQFPQAWAETAGMGLAKQVPPQVIQLKASATPVSVRQYPLSKEAQEGIRPHVQRLIQQGILVPVQSPWNTPLLPVRKPGTNDYRPVQDLREVNKRVQDIHPTVPNPYNLLCALPPQRSWYTVLDLKDAFFCLRLHPTSQPLFAFEWRDPGTGRTGQLTWTRLPQGFKNSPTIFDEALHRDLANFRIQHPQVTLLQYVDDLLLAGATKQDCLEGTKALLLELSDLGYRASAKKAQICRREVTYLGYSLRDGQRWLTEARKKTVVQIPAPTTAKQVREFLGTAGFCRLWIPGFATLAAPLYPLTKEKGEFSWAPEHQKAFDAIKKALLSAPALALPDVTKPFTLYVDERKGVARGVLTQTLGPWRRPVAYLSKKLDPVASGWPVCLKAIAAVAILVKDADKLTLGQNITVIAPHALENIVRQPPDRWMTNARMTHYQSLLLTERVTFAPPAALNPATLLPEETDEPVTHDCHQLLIEETGVRKDLTDIPLTGEVLTWFTDGSSYVVEGKRMAGAAVVDGTRTIWASSLPEGTSAQKAELMALTQALRLAEGKSINIYTDSRYAFATAHVHGAIYKQRGLLTSAGREIKNKEEILSLLEALHLPKRLAIIHCPGHQKAKDPISRGNQMADRVAKQAAQGVNLLAGKRTADGSEFEKRTADGSEFESPKKKAKVE

SEQ ID NO: 6711 - protein, 2085 aa, synthetic construct; identical to SEQ ID NO: 6710

SEQ ID NO: 6712 - protein, 2171 aa, synthetic construct
MPAAKRVKLDGGDKKYSIGLDIGTNSVGWAVITDEYKVPSKKFKVLGNTDRHSIKKNLIGALLFDSGETAEATRLKRTARRRYTRRKNRICYLQEIFSNEMAKVDDSFFHRLEESFLVEEDKKHERHPIFGNIVDEVAYHEKYPTIYHLRKKLVDSTDKADLRLIYLALAHMIKFRGHFLIEGDLNPDNSDVDKLFIQLVQTYNQLFEENPINASGVDAKAILSARLSKSRRLENLIAQLPGEKKNGLFGNLIALSLGLTPNFKSNFDLAEDAKLQLSKDTYDDDLDNLLAQIGDQYADLFLAAKNLSDAILLSDILRVNTEITKAPLSASMIKRYDEHHQDLTLLKALVRQQLPEKYKEIFFDQSKNGYAGYIDGGASQEEFYKFIKPILEKMDGTEELLVKLNREDLLRKQRTFDNGSIPHQIHLGELHAILRRQEDFYPFLKDNREKIEKILTFRIPYYVGPLARGNSRFAWMTRKSEETITPWNFEEVVDKGASAQSFIERMTNFDKNLPNEKVLPKHSLLYEYFTVYNELTKVKYVTEGMRKPAFLSGEQKKAIVDLLFKTNRKVTVKQLKEDYFKKIECFDSVEISGVEDRFNASLGTYHDLLKIIKDKDFLDNEENEDILEDIVLTLTLFEDREMIEERLKTYAHLFDDKVMKQLKRRRYTGWGRLSRKLINGIRDKQSGKTILDFLKSDGFANRNFMQLIHDDSLTFKEDIQKAQVSGQGDSLHEHIANLAGSPAIKKGILQTVKVVDELVKVMGRHKPENIVIEMARENQTTQKGQKNSRERMKRIEEGIKELGSQILKEHPVENTQLQNEKLYLYYLQNGRDMYVDQELDINRLSDYDVDHIVPQSFLKDDSIDNKVLTRSDKARGKSDNVPSEEVVKKMKNYWRQLLNAKLITQRKFDNLTKAERGGLSELDKAGFIKRQLVETRQITKHVAQILDSRMNTKYDENDKLIREVKVITLKSKLVSDFRKDFQFYKVREINNYHHAHDAYLNAVVGTALIKKYPKLESEFVYGDYKVYDVRKMIAKSEQEIGKATAKYFFYSNIMNFFKTEITLANGEIRKRPLIETNGETGEIVWDKGRDFATVRKVLSMPQVNIVKKTEVQTGGFSKESILPKRNSDKLIARKKDWDPKKYGGFDSPTVAYSVLVVAKVEKGKSKKLKSVKELLGITIMERSSFEKNPIDFLEAKGYKEVKKDLIIKLPKYSLFELENGRKRMLASAGELQKGNELALPSKYVNFLYLASHYEKLKGSPEDNEQKQLFVEQHKHYLDEIIEQISEFSKRVILADANLDKVLSAYNKHRDKPIREQAENIIHLFTLTNLGAPAAFKYFDTTIDRKRYTSTKEVLDATLIHQSITGLYETRIDLSQLGGDGGGGGPAPGGMDPLQLLQPLEAEIKGTKLKAHWNSGATITCVPEAFLEDERPIQTMLIKTIHGEKQQDVYYLTFKVQGRKVEAEVLASPYDYILLNPSDVPWLMKKPLQLTVLVPLHEYQERLLQQTALPKEQKELLQKLFLKYDALWQHWENQVGHRRIKPHNIATGTLAPRPQKQYPINPKAKPSIQIVIDDLLKQGVLIQQNSTMNTPVYPVPKPDGKWRMVLDYREVNKTIPLIAAQNQHSAGILSSIYRGKYKTTLDLTNGFWAHPITPESYWLTAFTWQGKQYCWTRLPQGFLNSPALFNADVVDLLKEIPNVQAYVDDIYISHDDPQEHLEQLEKIFSILLNAGYVVSLKKSEIAQREVEFLGFNITKEGRGLTDTFKQKLLNITPPKDLKQLQSILGKLNFARNFIPNYSELVKPLYTIVAPANGKFISWTEDNSNQLQHIISVLNQADNLEERNPETRLIIKVNSSPSAGYIRYYNEGSKRPIMYVNYIFSKAEAKFTQTEKLLTTMHKGLIKAMDLAMGQEILVYSPIVSMTKIQRTPLPERKALPVRWITWMTYLEDPRIQFHYDKSLPELQQIPNVTEDVIAKTKHPSEFAMVFYTDGSAIKHPDVNKSHSAGMGIAQVQFIPEYKIVHQWSIPLGDHTAQLAEIAAVEFACKKALKISGPVLIVTDSFYVAESANKELPYWKSNGFLNNKKKPLRHVSKWKSIAECLQLKPDIIIMHEKGHQQPMTTLHTEGNNLADKLATQGSYVVHAGKRTADGSEFEKRTADGSEFESPKKKAKVE

SEQ ID NO: 6713 - protein, 2082 aa, synthetic construct
MPAAKRVKLDGGDKKYSIGLDIGTNSVGWAVITDEYKVPSKKFKVLGNTDRHSIKKNLIGALLFDSGETAEATRLKRTARRRYTRRKNRICYLQEIFSNEMAKVDDSFFHRLEESFLVEEDKKHERHPIFGNIVDEVAYHEKYPTIYHLRKKLVDSTDKADLRLIYLALAHMIKFRGHFLIEGDLNPDNSDVDKLFIQLVQTYNQLFEENPINASGVDAKAILSARLSKSRRLENLIAQLPGEKKNGLFGNLIALSLGLTPNFKSNFDLAEDAKLQLSKDTYDDDLDNLLAQIGDQYADLFLAAKNLSDAILLSDILRVNTEITKAPLSASMIKRYDEHHQDLTLLKALVRQQLPEKYKEIFFDQSKNGYAGYIDGGASQEEFYKFIKPILEKMDGTEELLVKLNREDLLRKQRTFDNGSIPHQIHLGELHAILRRQEDFYPFLKDNREKIEKILTFRIPYYVGPLARGNSRFAWMTRKSEETITPWNFEEVVDKGASAQSFIERMTNFDKNLPNEKVLPKHSLLYEYFTVYNELTKVKYVTEGMRKPAFLSGEQKKAIVDLLFKTNRKVTVKQLKEDYFKKIECFDSVEISGVEDRFNASLGTYHDLLKIIKDKDFLDNEENEDILEDIVLTLTLFEDREMIEERLKTYAHLFDDKVMKQLKRRRYTGWGRLSRKLINGIRDKQSGKTILDFLKSDGFANRNFMQLIHDDSLTFKEDIQKAQVSGQGDSLHEHIANLAGSPAIKKGILQTVKVVDELVKVMGRHKPENIVIEMARENQTTQKGQKNSRERMKRIEEGIKELGSQILKEHPVENTQLQNEKLYLYYLQNGRDMYVDQELDINRLSDYDVDHIVPQSFLKDDSIDNKVLTRSDKARGKSDNVPSEEVVKKMKNYWRQLLNAKLITQRKFDNLTKAERGGLSELDKAGFIKRQLVETRQITKHVAQILDSRMNTKYDENDKLIREVKVITLKSKLVSDFRKDFQFYKVREINNYHHAHDAYLNAVVGTALIKKYPKLESEFVYGDYKVYDVRKMIAKSEQEIGKATAKYFFYSNIMNFFKTEITLANGEIRKRPLIETNGETGEIVWDKGRDFATVRKVLSMPQVNIVKKTEVQTGGFSKESILPKRNSDKLIARKKDWDPKKYGGFDSPTVAYSVLVVAKVEKGKSKKLKSVKELLGITIMERSSFEKNPIDFLEAKGYKEVKKDLIIKLPKYSLFELENGRKRMLASAGELQKGNELALPSKYVNFLYLASHYEKLKGSPEDNEQKQLFVEQHKHYLDEIIEQISEFSKRVILADANLDKVLSAYNKHRDKPIREQAENIIHLFTLTNLGAPAAFKYFDTTIDRKRYTSTKEVLDATLIHQSITGLYETRIDLSQLGGDGGGGGPAPGGIPWLMKKPLQLTTLVPLQEYEERLLKQTMLTGSYKEKLQSLFLKYDALWQHWENQVGHRRIKPHHIATGTVNPRPQKQYPINPKAKASIQTVINDLLKQGVLIQQNSIMNTPVYPVPKPDGKWRMVLDYREVNKTIPLIAAQNQHSAGILSSIFRGKYKTTLDLSNGFWAHSITPESYWLTAFTWLGQQYCWTRLPQGFLNSPALFNADVVDLLKEVPNVQVYVDDIYISHDDPREHLEQLEKVFSLLLNAGYVVSLKKSEIAQHEVEFLGFNITKEGRGLTETFKQKLLNITPPRDLKQLQSILGLLNFARNFIPNFSELVKPLYNIIATAPGKYITWTTDNSQQLQNIISMLNSAENLEERNPEVRLIMKVNTSPSAGYIRFYNEFAKRPIMYLNYVYTKAEVKFTNTEKLLTTIHKGLIKALDLGMGQEILVYSPIVSMTKIQKTPLPERKALPIRWITWMSYLEDPRIQFHYDKTLPELQQVPTVTDDIIAKIKHPSEFSMVFYTDGSAIKHPNVNKSHNAGMGIAQVQFKPEFTVINTWSIPLGDHTAQLAEVAAVEFACKKALKIDGPVLIVTDSFYVAESVNKELPYWQSNGFFNNKKKPLKHVSKWKSIADCIQLKPDIIIIHEKGHQPTASTFHTEGNNLADKLATQGSYVVNAGKRTADGSEFEKRTADGSEFESPKKKAKVE

SEQ ID NO: 6714 - protein, 2171 aa, synthetic construct
MPAAKRVKLDGGDKKYSIGLDIGTNSVGWAVITDEYKVPSKKFKVLGNTDRHSIKKNLIGALLFDSGETAEATRLKRTARRRYTRRKNRICYLQEIFSNEMAKVDDSFFHRLEESFLVEEDKKHERHPIFGNIVDEVAYHEKYPTIYHLRKKLVDSTDKADLRLIYLALAHMIKFRGHFLIEGDLNPDNSDVDKLFIQLVQTYNQLFEENPINASGVDAKAILSARLSKSRRLENLIAQLPGEKKNGLFGNLIALSLGLTPNFKSNFDLAEDAKLQLSKDTYDDDLDNLLAQIGDQYADLFLAAKNLSDAILLSDILRVNTEITKAPLSASMIKRYDEHHQDLTLLKALVRQQLPEKYKEIFFDQSKNGYAGYIDGGASQEEFYKFIKPILEKMDGTEELLVKLNREDLLRKQRTFDNGSIPHQIHLGELHAILRRQEDFYPFLKDNREKIEKILTFRIPYYVGPLARGNSRFAWMTRKSEETITPWNFEEVVDKGASAQSFIERMTNFDKNLPNEKVLPKHSLLYEYFTVYNELTKVKYVTEGMRKPAFLSGEQKKAIVDLLFKTNRKVTVKQLKEDYFKKIECFDSVEISGVEDRFNASLGTYHDLLKIIKDKDFLDNEENEDILEDIVLTLTLFEDREMIEERLKTYAHLFDDKVMKQLKRRRYTGWGRLSRKLINGIRDKQSGKTILDFLKSDGFANRNFMQLIHDDSLTFKEDIQKAQVSGQGDSLHEHIANLAGSPAIKKGILQTVKVVDELVKVMGRHKPENIVIEMARENQTTQKGQKNSRERMKRIEEGIKELGSQILKEHPVENTQLQNEKLYLYYLQNGRDMYVDQELDINRLSDYDVDHIVPQSFLKDDSIDNKVLTRSDKARGKSDNVPSEEVVKKMKNYWRQLLNAKLITQRKFDNLTKAERGGLSELDKAGFIKRQLVETRQITKHVAQILDSRMNTKYDENDKLIREVKVITLKSKLVSDFRKDFQFYKVREINNYHHAHDAYLNAVVGTALIKKYPKLESEFVYGDYKVYDVRKMIAKSEQEIGKATAKYFFYSNIMNFFKTEITLANGEIRKRPLIETNGETGEIVWDKGRDFATVRKVLSMPQVNIVKKTEVQTGGFSKESILPKRNSDKLIARKKDWDPKKYGGFDSPTVAYSVLVVAKVEKGKSKKLKSVKELLGITIMERSSFEKNPIDFLEAKGYKEVKKDLIIKLPKYSLFELENGRKRMLASAGELQKGNELALPSKYVNFLYLASHYEKLKGSPEDNEQKQLFVEQHKHYLDEIIEQISEFSKRVILADANLDKVLSAYNKHRDKPIREQAENIIHLFTLTNLGAPAAFKYFDTTIDRKRYTSTKEVLDATLIHQSITGLYETRIDLSQLGGDGGGGGPAPGGMNPLQLLQPLPAEVKGTKLLAHWNSGATITCIPESFLEDEQPIKQTLIKTIHGEKQQNVYYLTFKVKGRKVEAEVIASPYEYILLSPTDVPWLTQQPLQLTILVPLQEYQDRILNKTALPEEQKQQLKALFTKYDNLWQHWENQVGHRKIRPHNIATGDYPPRPQKQYPINPKAKPSIQIVIDDLLKQGVLTPQNSTMNTPVYPVPKPDGRWRMVLDYREVNKTIPLTAAQNQHSAGILATIVRQKYKTTLDLANGFWAHPITPDSYWLTAFTWQGKQYCWTRLPQGFLNSPALFTADAVDLLKEVPNVQVYVDDIYLSHDNPHEHIQQLEKVFQILLQAGYVVSLKKSEIGQRTVEFLGFNITKEGRGLTDTFKTKLLNVTPPKDLKQLQSILGLLNFARNFIPNFAELVQTLYNLIASSKGKYIEWTEDNTKQLNKVIEALNTASNLEERLPDQRLVIKVNTSPSAGYVRYYNESGKKPIMYLNYVFSKAELKFSMLEKLLTTMHKALIKAMDLAMGQEILVYSPIVSMTKIQKTPLPERKALPIRWITWMTYLEDPRIQFHYDKTLPELKHIPDVYTSSIPPLKHPSQYEGVFCTDGSAIKSPDPTKSNNAGMGIVHAIYNPEYKILNQWSIPLGHHTAQMAEIAAVEFACKKALKVPGPVLVITDSFYVAESANKELPYWKSNGFVNNKKEPLKHISKWKSIAECLSIKPDITIQHEKGHQPINTSIHTEGNALADKLATQGSYVVNAGKRTADGSEFEKRTADGSEFESPKKKAKVE

SEQ ID NO: 6715 - protein, 2089 aa, synthetic construct
MPAAKRVKLDGGDKKYSIGLDIGTNSVGWAVITDEYKVPSKKFKVLGNTDRHSIKKNLIGALLFDSGETAEATRLKRTARRRYTRRKNRICYLQEIFSNEMAKVDDSFFHRLEESFLVEEDKKHERHPIFGNIVDEVAYHEKYPTIYHLRKKLVDSTDKADLRLIYLALAHMIKFRGHFLIEGDLNPDNSDVDKLFIQLVQTYNQLFEENPINASGVDAKAILSARLSKSRRLENLIAQLPGEKKNGLFGNLIALSLGLTPNFKSNFDLAEDAKLQLSKDTYDDDLDNLLAQIGDQYADLFLAAKNLSDAILLSDILRVNTEITKAPLSASMIKRYDEHHQDLTLLKALVRQQLPEKYKEIFFDQSKNGYAGYIDGGASQEEFYKFIKPILEKMDGTEELLVKLNREDLLRKQRTFDNGSIPHQIHLGELHAILRRQEDFYPFLKDNREKIEKILTFRIPYYVGPLARGNSRFAWMTRKSEETITPWNFEEVVDKGASAQSFIERMTNFDKNLPNEKVLPKHSLLYEYFTVYNELTKVKYVTEGMRKPAFLSGEQKKAIVDLLFKTNRKVTVKQLKEDYFKKIECFDSVEISGVEDRFNASLGTYHDLLKIIKDKDFLDNEENEDILEDIVLTLTLFEDREMIEERLKTYAHLFDDKVMKQLKRRRYTGWGRLSRKLINGIRDKQSGKTILDFLKSDGFANRNFMQLIHDDSLTFKEDIQKAQVSGQGDSLHEHIANLAGSPAIKKGILQTVKVVDELVKVMGRHKPENIVIEMARENQTTQKGQKNSRERMKRIEEGIKELGSQILKEHPVENTQLQNEKLYLYYLQNGRDMYVDQELDINRLSDYDVDHIVPQSFLKDDSIDNKVLTRSDKARGKSDNVPSEEVVKKMKNYWRQLLNAKLITQRKFDNLTKAERGGLSELDKAGFIKRQLVETRQITKHVAQILDSRMNTKYDENDKLIREVKVITLKSKLVSDFRKDFQFYKVREINNYHHAHDAYLNAVVGTALIKKYPKLESEFVYGDYKVYDVRKMIAKSEQEIGKATAKYFFYSNIMNFFKTEITLANGEIRKRPLIETNGETGEIVWDKGRDFATVRKVLSMPQVNIVKKTEVQTGGFSKESILPKRNSDKLIARKKDWDPKKYGGFDSPTVAYSVLVVAKVEKGKSKKLKSVKELLGITIMERSSFEKNPIDFLEAKGYKEVKKDLIIKLPKYSLFELENGRKRMLASAGELQKGNELALPSKYVNFLYLASHYEKLKGSPEDNEQKQLFVEQHKHYLDEIIEQISEFSKRVILADANLDKVLSAYNKHRDKPIREQAENIIHLFTLTNLGAPAAFKYFDTTIDRKRYTSTKEVLDATLIHQSITGLYETRIDLSQLGGDGGGGGPAPGGVLNLEEEYRLHEKPVPSSIDPSWLQLFPTVWAERAGMGLANQVPPVVVELRSGASPVAVRQYPMSKEAREGIRPHIQRFLDLGVLVPCQSPWNTPLLPVKKPGTNDYRPVQDLREINKRVQDIHPTVPNPYNLLSSLPPSHTWYSVLDLKDAFFCLKLHPNSQPLFAFEWRDPEKGNTGQLTWTRLPQGFKNSPTLFNEALHRDLAPFRALNPQVVLLQYVDDLLVAAPTYRDCKEGTQKLLQELSKLGYRVSAKKAQLCQKEVTYLGYLLKEGKRWLTPARKATVMKIPPPTTPRQVREFLGTAGFCRLWIPGFASLAAPLYPLTKPSIPFIWTEEHQKAFDRIKEALLSAPALALPDLTKPFTLYVDERAGVARGVLTQTLGPWRRPVAYLSKKLDPVASGWPTCLKAVAAVALLLKDADKLTLGQNVTVIASHSLESIVRQPPDRWMTNARMTHYQSLLLNERVSFAPPAVLNPATLLPVESEATPVHRCSEILAEETGTRRDLKDQPLPGVPAWYTDGSSFIAEGKRRAGAAIVDGKRTVWASSLPEGTSAQKAELVALTQALRLAEGKDINIYTDSRYAFATAHIHGAIYKQRGWLTSAGKDIKNKEEILALLEAIHLPKRVAIIHCPGHQKGNDPVATGNRRADEAAKQAALSTRVLAETTKPAGKRTADGSEFEKRTADGSEFESPKKKAKVE

SEQ ID NO: 6716 - protein, 2091 aa, synthetic construct
MPAAKRVKLDGGDKKYSIGLDIGTNSVGWAVITDEYKVPSKKFKVLGNTDRHSIKKNLIGALLFDSGETAEATRLKRTARRRYTRRKNRICYLQEIFSNEMAKVDDSFFHRLEESFLVEEDKKHERHPIFGNIVDEVAYHEKYPTIYHLRKKLVDSTDKADLRLIYLALAHMIKFRGHFLIEGDLNPDNSDVDKLFIQLVQTYNQLFEENPINASGVDAKAILSARLSKSRRLENLIAQLPGEKKNGLFGNLIALSLGLTPNFKSNFDLAEDAKLQLSKDTYDDDLDNLLAQIGDQYADLFLAAKNLSDAILLSDILRVNTEITKAPLSASMIKRYDEHHQDLTLLKALVRQQLPEKYKEIFFDQSKNGYAGYIDGGASQEEFYKFIKPILEKMDGTEELLVKLNREDLLRKQRTFDNGSIPHQIHLGELHAILRRQEDFYPFLKDNREKIEKILTFRIPYYVGPLARGNSRFAWMTRKSEETITPWNFEEVVDKGASAQSFIERMTNFDKNLPNEKVLPKHSLLYEYFTVYNELTKVKYVTEGMRKPAFLSGEQKKAIVDLLFKTNRKVTVKQLKEDYFKKIECFDSVEISGVEDRFNASLGTYHDLLKIIKDKDFLDNEENEDILEDIVLTLTLFEDREMIEERLKTYAHLFDDKVMKQLKRRRYTGWGRLSRKLINGIRDKQSGKTILDFLKSDGFANRNFMQLIHDDSLTFKEDIQKAQVSGQGDSLHEHIANLAGSPAIKKGILQTVKVVDELVKVMGRHKPENIVIEMARENQTTQKGQKNSRERMKRIEEGIKELGSQILKEHPVENTQLQNEKLYLYYLQNGRDMYVDQELDINRLSDYDVDHIVPQSFLKDDSIDNKVLTRSDKARGKSDNVPSEEVVKKMKNYWRQLLNAKLITQRKFDNLTKAERGGLSELDKAGFIKRQLVETRQITKHVAQILDSRMNTKYDENDKLIREVKVITLKSKLVSDFRKDFQFYKVREINNYHHAHDAYLNAVVGTALIKKYPKLESEFVYGDYKVYDVRKMIAKSEQEIGKATAKYFFYSNIMNFFKTEITLANGEIRKRPLIETNGETGEIVWDKGRDFATVRKVLSMPQVNIVKKTEVQTGGFSKESILPKRNSDKLIARKKDWDPKKYGGFDSPTVAYSVLVVAKVEKGKSKKLKSVKELLGITIMERSSFEKNPIDFLEAKGYKEVKKDLIIKLPKYSLFELENGRKRMLASAGELQKGNELALPSKYVNFLYLASHYEKLKGSPEDNEQKQLFVEQHKHYLDEIIEQISEFSKRVILADANLDKVLSAYNKHRDKPIREQAENIIHLFTLTNLGAPAAFKYFDTTIDRKRYTSTKEVLDATLIHQSITGLYETRIDLSQLGGDGGGGGPAPGGTLNIEDEYRLHETSKEPDVPLGSTWLSDFPQAWAETGGMGLAVRQAPLIIPLKATSTPVSIKQYPMSQEARLGIKPHIQRLLDQGILVPCQSPWNTPLLPVKKPGTNDYRPVQDLREVNKRVEDIHPTVPNPYNLLSGLPPSHQWYTVLDLKDAFFCLRLHPTSQPLFAFEWRDPEMGISGQLTWTRLPQGFKNSPTLFNEALHRDLADFRIQHPDLILLQYVDDLLLAATSEQDCQRGTRALLQTLGNLGYRASAKKAQICQKQVKYLGYLLKEGQRWLTEARKETVMGQPTPKTPRQLREFLGTAGFCRLWIPGFAEMAAPLYPLTKPGTLFNWGPDQQKAYQEIKQALLTAPALGLPDLTKPFELFVDEKQGYAKGVLTQKLGPWRRPVAYLSKKLDPVAAGWPPCLRMVAAIAVLTKDAGKLTMGQPLVILAPHAVEALVKQPPDRWLSNARMTHYQAMLLDTDRVQFGPVVALNPATLLPLPEKEAPHDCLEILAETHGTRPDLTDQPIPDADYTWYTDGSSFLQEGQRRAGAAVTTETEVIWARALPAGTSAQRAELIALTQALKMAEGKKLNVYTDSRYAFATAHVHGEIYRRRGWLTSEGREIKNKNEILALLKALFLPKRLSIIHCPGHQKGNSAEARGNRMADQAAREAAMKAVLETSTLLAGKRTADGSEFEKRTADGSEFESPKKKAKVE

SEQ ID NO: 6717 - protein, 2091 aa, synthetic construct
MPAAKRVKLDGGDKKYSIGLDIGTNSVGWAVITDEYKVPSKKFKVLGNTDRHSIKKNLIGALLFDSGETAEATRLKRTARRRYTRRKNRICYLQEIFSNEMAKVDDSFFHRLEESFLVEEDKKHERHPIFGNIVDEVAYHEKYPTIYHLRKKLVDSTDKADLRLIYLALAHMIKFRGHFLIEGDLNPDNSDVDKLFIQLVQTYNQLFEENPINASGVDAKAILSARLSKSRRLENLIAQLPGEKKNGLFGNLIALSLGLTPNFKSNFDLAEDAKLQLSKDTYDDDLDNLLAQIGDQYADLFLAAKNLSDAILLSDILRVNTEITKAPLSASMIKRYDEHHQDLTLLKALVRQQLPEKYKEIFFDQSKNGYAGYIDGGASQEEFYKFIKPILEKMDGTEELLVKLNREDLLRKQRTFDNGSIPHQIHLGELHAILRRQEDFYPFLKDNREKIEKILTFRIPYYVGPLARGNSRFAWMTRKSEETITPWNFEEVVDKGASAQSFIERMTNFDKNLPNEKVLPKHSLLYEYFTVYNELTKVKYVTEGMRKPAFLSGEQKKAIVDLLFKTNRKVTVKQLKEDYFKKIECFDSVEISGVEDRFNASLGTYHDLLKIIKDKDFLDNEENEDILEDIVLTLTLFEDREMIEERLKTYAHLFDDKVMKQLKRRRYTGWGRLSRKLINGIRDKQSGKTILDFLKSDGFANRNFMQLIHDDSLTFKEDIQKAQVSGQGDSLHEHIANLAGSPAIKKGILQTVKVVDELVKVMGRHKPENIVIEMARENQTTQKGQKNSRERMKRIEEGIKELGSQILKEHPVENTQLQNEKLYLYYLQNGRDMYVDQELDINRLSDYDVDHIVPQSFLKDDSIDNKVLTRSDKARGKSDNVPSEEVVKKMKNYWRQLLNAKLITQRKFDNLTKAERGGLSELDKAGFIKRQLVETRQITKHVAQILDSRMNTKYDENDKLIREVKVITLKSKLVSDFRKDFQFYKVREINNYHHAHDAYLNAVVGTALIKKYPKLESEFVYGDYKVYDVRKMIAKSEQEIGKATAKYFFYSNIMNFFKTEITLANGEIRKRPLIETNGETGEIVWDKGRDFATVRKVLSMPQVNIVKKTEVQTGGFSKESILPKRNSDKLIARKKDWDPKKYGGFDSPTVAYSVLVVAKVEKGKSKKLKSVKELLGITIMERSSFEKNPIDFLEAKGYKEVKKDLIIKLPKYSLFELENGRKRMLASAGELQKGNELALPSKYVNFLYLASHYEKLKGSPEDNEQKQLFVEQHKHYLDEIIEQISEFSKRVILADANLDKVLSAYNKHRDKPIREQAENIIHLFTLTNLGAPAAFKYFDTTIDRKRYTSTKEVLDATLIHQSITGLYETRIDLSQLGGDGGGGGPAPGGTLNIEDEYRLHETSKEPDVPLGSTWLSDFPQAWAETGGMGLAVRQAPLIIPLKATSTPVSIKQYPMSQEARLGIKPHIQRLLDQGILVPCQSPWNTPLLPVKKPGTNDYRPVQDLREVNKRVEDIHPTVPNPYNLLSGLPPSHQWYTVLDLKDAFFCLRLHPTSQPLFAFEWRDPEMGISGQLTWTRLPQGFKNSPTLFNEALHRDLADFRIQHPDLILLQYVDDLLLAATSEQDCQRGTRALLQTLGNLGYRASAKKAQICQKQVKYLGYLLKEGQRWLTEARKETVMGQPTPKTPRQLREFLGKAGFCRLFIPGFAEMAAPLYPLTKPGTLFNWGPDQQKAYQEIKQALLTAPALGLPDLTKPFELFVDEKQGYAKGVLTQKLGPWRRPVAYLSKKLDPVAAGWPPCLRMVAAIAVLTKDAGKLTMGQPLVILAPHAVEALVKQPPDRWLSNARMTHYQAMLLDTDRVQFGPVVALNPATLLPLPEKEAPHDCLEILAETHGTRPDLTDQPIPDADYTWYTDGSSFLQEGQRRAGAAVTTETEVIWARALPAGTSAQRAELIALTQALKMAEGKKLNVYTDSRYAFATAHVHGEIYRRRGWLTSEGREIKNKNEILALLKALFLPKRLSIIHCPGHQKGNSAEARGNRMADQAAREAAMKAVLETSTLLAGKRTADGSEFEKRTADGSEFESPKKKAKVE

SEQ ID NO: 6718 - protein, 2122 aa, synthetic construct
MPAAKRVKLDGGDKKYSIGLDIGTNSVGWAVITDEYKVPSKKFKVLGNTDRHSIKKNLIGALLFDSGETAEATRLKRTARRRYTRRKNRICYLQEIFSNEMAKVDDSFFHRLEESFLVEEDKKHERHPIFGNIVDEVAYHEKYPTIYHLRKKLVDSTDKADLRLIYLALAHMIKFRGHFLIEGDLNPDNSDVDKLFIQLVQTYNQLFEENPINASGVDAKAILSARLSKSRRLENLIAQLPGEKKNGLFGNLIALSLGLTPNFKSNFDLAEDAKLQLSKDTYDDDLDNLLAQIGDQYADLFLAAKNLSDAILLSDILRVNTEITKAPLSASMIKRYDEHHQDLTLLKALVRQQLPEKYKEIFFDQSKNGYAGYIDGGASQEEFYKFIKPILEKMDGTEELLVKLNREDLLRKQRTFDNGSIPHQIHLGELHAILRRQEDFYPFLKDNREKIEKILTFRIPYYVGPLARGNSRFAWMTRKSEETITPWNFEEVVDKGASAQSFIERMTNFDKNLPNEKVLPKHSLLYEYFTVYNELTKVKYVTEGMRKPAFLSGEQKKAIVDLLFKTNRKVTVKQLKEDYFKKIECFDSVEISGVEDRFNASLGTYHDLLKIIKDKDFLDNEENEDILEDIVLTLTLFEDREMIEERLKTYAHLFDDKVMKQLKRRRYTGWGRLSRKLINGIRDKQSGKTILDFLKSDGFANRNFMQLIHDDSLTFKEDIQKAQVSGQGDSLHEHIANLAGSPAIKKGILQTVKVVDELVKVMGRHKPENIVIEMARENQTTQKGQKNSRERMKRIEEGIKELGSQILKEHPVENTQLQNEKLYLYYLQNGRDMYVDQELDINRLSDYDVDHIVPQSFLKDDSIDNKVLTRSDKARGKSDNVPSEEVVKKMKNYWRQLLNAKLITQRKFDNLTKAERGGLSELDKAGFIKRQLVETRQITKHVAQILDSRMNTKYDENDKLIREVKVITLKSKLVSDFRKDFQFYKVREINNYHHAHDAYLNAVVGTALIKKYPKLESEFVYGDYKVYDVRKMIAKSEQEIGKATAKYFFYSNIMNFFKTEITLANGEIRKRPLIETNGETGEIVWDKGRDFATVRKVLSMPQVNIVKKTEVQTGGFSKESILPKRNSDKLIARKKDWDPKKYGGFDSPTVAYSVLVVAKVEKGKSKKLKSVKELLGITIMERSSFEKNPIDFLEAKGYKEVKKDLIIKLPKYSLFELENGRKRMLASAGELQKGNELALPSKYVNFLYLASHYEKLKGSPEDNEQKQLFVEQHKHYLDEIIEQISEFSKRVILADANLDKVLSAYNKHRDKPIREQAENIIHLFTLTNLGAPAAFKYFDTTIDRKRYTSTKEVLDATLIHQSITGLYETRIDLSQLGGDGGPAPGGGGGLLGRDLLTKLKAQIQFSTEGPQVTWEDRPAMCLVLNLEEEYRLHEKPVPPSIDPSWLQLFPMVWAEKAGMGLANQVPPVVVELKSDASPVAVRQYPMSKEAREGIRPHIQRFLDLGILVPCQSPWNTPLLPVKKPGTNDYRPVQDLREVNKRVQDIHPTVPNPYNLLSSLPPSHTWYSVLDLKDAFFCLKLHPNSQPLFAFEWRDPEKGNTGQLTWTRLPQGFKNSPTLFNEALHRDLASFRALNPQVVMLQYVDDLLVAAPTYRDCKEGTRRLLQELSKLGYRVSAKKAQLCREEVTYLGYLLKGGKRWLTPARKATVMKIPTPTTPRQVREFLGTAGFCRLWIPGFASLAAPLYPLTRPKVPFTWTEAHQEAFGRIKEALLSAPALALPDLTKPFALYVDEKEGVARGVLTQTLGPWRRPVAYLSKKLDPVASGWPTCLKAIAAVALLLKDADKLTLGQNVLVIAPHNLESIVRQPPDRWMTNARMTHYQSLLLNERVSFAPPAILNPATLLPVESDDTPIHICSEILAEETGTRPDLRDQPLPGVPAWYTDGSSFIMDGRRQAGAAIVDNKRTVWASNLPEGTSAQKAELIALTQALRLAEGKSINIYTDSRYAFATAHVHGAIYKQRGWLTSAGKDIKNKEEILALLEAIHLPKRVAIIHCPGHQRGTDPVATGNRKADEAAKQAAQSTRILTETTKNAGKRTADGSEFEKRTADGSEFESPKKKAKVE

SEQ ID NO: 6719 - protein, 2122 aa, synthetic construct
MPAAKRVKLDGGDKKYSIGLDIGTNSVGWAVITDEYKVPSKKFKVLGNTDRHSIKKNLIGALLFDSGETAEATRLKRTARRRYTRRKNRICYLQEIFSNEMAKVDDSFFHRLEESFLVEEDKKHERHPIFGNIVDEVAYHEKYPTIYHLRKKLVDSTDKADLRLIYLALAHMIKFRGHFLIEGDLNPDNSDVDKLFIQLVQTYNQLFEENPINASGVDAKAILSARLSKSRRLENLIAQLPGEKKNGLFGNLIALSLGLTPNFKSNFDLAEDAKLQLSKDTYDDDLDNLLAQIGDQYADLFLAAKNLSDAILLSDILRVNTEITKAPLSASMIKRYDEHHQDLTLLKALVRQQLPEKYKEIFFDQSKNGYAGYIDGGASQEEFYKFIKPILEKMDGTEELLVKLNREDLLRKQRTFDNGSIPHQIHLGELHAILRRQEDFYPFLKDNREKIEKILTFRIPYYVGPLARGNSRFAWMTRKSEETITPWNFEEVVDKGASAQSFIERMTNFDKNLPNEKVLPKHSLLYEYFTVYNELTKVKYVTEGMRKPAFLSGEQKKAIVDLLFKTNRKVTVKQLKEDYFKKIECFDSVEISGVEDRFNASLGTYHDLLKIIKDKDFLDNEENEDILEDIVLTLTLFEDREMIEERLKTYAHLFDDKVMKQLKRRRYTGWGRLSRKLINGIRDKQSGKTILDFLKSDGFANRNFMQLIHDDSLTFKEDIQKAQVSGQGDSLHEHIANLAGSPAIKKGILQTVKVVDELVKVMGRHKPENIVIEMARENQTTQKGQKNSRERMKRIEEGIKELGSQILKEHPVENTQLQNEKLYLYYLQNGRDMYVDQELDINRLSDYDVDHIVPQSFLKDDSIDNKVLTRSDKARGKSDNVPSEEVVKKMKNYWRQLLNAKLITQRKFDNLTKAERGGLSELDKAGFIKRQLVETRQITKHVAQILDSRMNTKYDENDKLIREVKVITLKSKLVSDFRKDFQFYKVREINNYHHAHDAYLNAVVGTALIKKYPKLESEFVYGDYKVYDVRKMIAKSEQEIGKATAKYFFYSNIMNFFKTEITLANGEIRKRPLIETNGETGEIVWDKGRDFATVRKVLSMPQVNIVKKTEVQTGGFSKESILPKRNSDKLIARKKDWDPKKYGGFDSPTVAYSVLVVAKVEKGKSKKLKSVKELLGITIMERSSFEKNPIDFLEAKGYKEVKKDLIIKLPKYSLFELENGRKRMLASAGELQKGNELALPSKYVNFLYLASHYEKLKGSPEDNEQKQLFVEQHKHYLDEIIEQISEFSKRVILADANLDKVLSAYNKHRDKPIREQAENIIHLFTLTNLGAPAAFKYFDTTIDRKRYTSTKEVLDATLIHQSITGLYETRIDLSQLGGDGGPAPGGGGGLLGRDLLTKLKAQIQFSTEGPQVTWEDRPAMCLVLNLEEEYRLHEKPVPPSIDPSWLQLFPMVWAEKAGMGLANQVPPVVVELKSDASPVAVRQYPMSKEAREGIRPHIQRFLDLGILVPCQSPWNTPLLPVKKPGTNDYRPVQDLREVNKRVQDIHPTVPNPYNLLSSLPPSHTWYSVLDLKDAFFCLKLHPNSQPLFAFEWRDPEKGNTGQLTWTRLPQGFKNSPTLFNEALHRDLASFRALNPQVVMLQYVDDLLVAAPTYRDCKEGTRRLLQELSKLGYRVSAKKAQLCREEVTYLGYLLKGGKRWLTPARKATVMKIPTPTTPRQVREFLGKAGFCRLFIPGFASLAAPLYPLTRPKVPFTWTEAHQEAFGRIKEALLSAPALALPDLTKPFALYVDEKEGVARGVLTQTLGPWRRPVAYLSKKLDPVASGWPTCLKAIAAVALLLKDADKLTLGQNVLVIAPHNLESIVRQPPDRWMTNARMTHYQSLLLNERVSFAPPAILNPATLLPVESDDTPIHICSEILAEETGTRPDLRDQPLPGVPAWYTDGSSFIMDGRRQAGAAIVDNKRTVWASNLPEGTSAQKAELIALTQALRLAEGKSINIYTDSRYAFATAHVHGAIYKQRGWLTSAGKDIKNKEEILALLEAIHLPKRVAIIHCPGHQRGTDPVATGNRKADEAAKQAAQSTRILTETTKNAGKRTADGSEFEKRTADGSEFESPKKKAKVE

SEQ ID NO: 6720 - protein, 2213 aa, synthetic construct
MPAAKRVKLDGGDKKYSIGLDIGTNSVGWAVITDEYKVPSKKFKVLGNTDRHSIKKNLIGALLFDSGETAEATRLKRTARRRYTRRKNRICYLQEIFSNEMAKVDDSFFHRLEESFLVEEDKKHERHPIFGNIVDEVAYHEKYPTIYHLRKKLVDSTDKADLRLIYLALAHMIKFRGHFLIEGDLNPDNSDVDKLFIQLVQTYNQLFEENPINASGVDAKAILSARLSKSRRLENLIAQLPGEKKNGLFGNLIALSLGLTPNFKSNFDLAEDAKLQLSKDTYDDDLDNLLAQIGDQYADLFLAAKNLSDAILLSDILRVNTEITKAPLSASMIKRYDEHHQDLTLLKALVRQQLPEKYKEIFFDQSKNGYAGYIDGGASQEEFYKFIKPILEKMDGTEELLVKLNREDLLRKQRTFDNGSIPHQIHLGELHAILRRQEDFYPFLKDNREKIEKILTFRIPYYVGPLARGNSRFAWMTRKSEETITPWNFEEVVDKGASAQSFIERMTNFDKNLPNEKVLPKHSLLYEYFTVYNELTKVKYVTEGMRKPAFLSGEQKKAIVDLLFKTNRKVTVKQLKEDYFKKIECFDSVEISGVEDRFNASLGTYHDLLKIIKDKDFLDNEENEDILEDIVLTLTLFEDREMIEERLKTYAHLFDDKVMKQLKRRRYTGWGRLSRKLINGIRDKQSGKTILDFLKSDGFANRNFMQLIHDDSLTFKEDIQKAQVSGQGDSLHEHIANLAGSPAIKKGILQTVKVVDELVKVMGRHKPENIVIEMARENQTTQKGQKNSRERMKRIEEGIKELGSQILKEHPVENTQLQNEKLYLYYLQNGRDMYVDQELDINRLSDYDVDHIVPQSFLKDDSIDNKVLTRSDKARGKSDNVPSEEVVKKMKNYWRQLLNAKLITQRKFDNLTKAERGGLSELDKAGFIKRQLVETRQITKHVAQILDSRMNTKYDENDKLIREVKVITLKSKLVSDFRKDFQFYKVREINNYHHAHDAYLNAVVGTALIKKYPKLESEFVYGDYKVYDVRKMIAKSEQEIGKATAKYFFYSNIMNFFKTEITLANGEIRKRPLIETNGETGEIVWDKGRDFATVRKVLSMPQVNIVKKTEVQTGGFSKESILPKRNSDKLIARKKDWDPKKYGGFDSPTVAYSVLVVAKVEKGKSKKLKSVKELLGITIMERSSFEKNPIDFLEAKGYKEVKKDLIIKLPKYSLFELENGRKRMLASAGELQKGNELALPSKYVNFLYLASHYEKLKGSPEDNEQKQLFVEQHKHYLDEIIEQISEFSKRVILADANLDKVLSAYNKHRDKPIREQAENIIHLFTLTNLGAPAAFKYFDTTIDRKRYTSTKEVLDATLIHQSITGLYETRIDLSQLGGDGGPAPGGGGGTLGDQGSRGSDPLPEPRVTLTVEGIPTEFLVNTGAEHSVLTKPMGKMGSKRTVVAGATGSKVYPWTTKRLLKIGQKQVTHSFLVIPECPAPLLGRDLLTKLKAQIQFSTEGPQVTWEDRPAMCLVLNLEEEYRLHEKPVPPSIDPSWLQLFPMVWAEKAGMGLANQVPPVVVELKSDASPVAVRQYPMSKEAREGIRPHIQRFLDLGILVPCQSPWNTPLLPVKKPGTNDYRPVQDLREVNKRVQDIHPTVPNPYNLLSSLPPSHTWYSVLDLKDAFFCLKLHPNSQPLFAFEWRDPEKGNTGQLTWTRLPQGFKNSPTLFNEALHRDLASFRALNPQVVMLQYVDDLLVAAPTYRDCKEGTRRLLQELSKLGYRVSAKKAQLCREEVTYLGYLLKGGKRWLTPARKATVMKIPTPTTPRQVREFLGTAGFCRLWIPGFASLAAPLYPLTRPKVPFTWTEAHQEAFGRIKEALLSAPALALPDLTKPFALYVDEKEGVARGVLTQTLGPWRRPVAYLSKKLDPVASGWPTCLKAIAAVALLLKDADKLTLGQNVLVIAPHNLESIVRQPPDRWMTNARMTHYQSLLLNERVSFAPPAILNPATLLPVESDDTPIHICSEILAEETGTRPDLRDQPLPGVPAWYTDGSSFIMDGRRQAGAAIVDNKRTVWASNLPEGTSAQKAELIALTQALRLAEGKSINIYTDSRYAFATAHVHGAIYKQRGWLTSAGKDIKNKEEILALLEAIHLPKRVAIIHCPGHQRGTDPVATGNRKADEAAKQAAQSTRILTETTKNAGKRTADGSEFEKRTADGSEFESPKKKAKVE

SEQ ID NO: 6721 - protein, 2091 aa, synthetic construct
MPAAKRVKLDGGDKKYSIGLDIGTNSVGWAVITDEYKVPSKKFKVLGNTDRHSIKKNLIGALLFDSGETAEATRLKRTARRRYTRRKNRICYLQEIFSNEMAKVDDSFFHRLEESFLVEEDKKHERHPIFGNIVDEVAYHEKYPTIYHLRKKLVDSTDKADLRLIYLALAHMIKFRGHFLIEGDLNPDNSDVDKLFIQLVQTYNQLFEENPINASGVDAKAILSARLSKSRRLENLIAQLPGEKKNGLFGNLIALSLGLTPNFKSNFDLAEDAKLQLSKDTYDDDLDNLLAQIGDQYADLFLAAKNLSDAILLSDILRVNTEITKAPLSASMIKRYDEHHQDLTLLKALVRQQLPEKYKEIFFDQSKNGYAGYIDGGASQEEFYKFIKPILEKMDGTEELLVKLNREDLLRKQRTFDNGSIPHQIHLGELHAILRRQEDFYPFLKDNREKIEKILTFRIPYYVGPLARGNSRFAWMTRKSEETITPWNFEEVVDKGASAQSFIERMTNFDKNLPNEKVLPKHSLLYEYFTVYNELTKVKYVTEGMRKPAFLSGEQKKAIVDLLFKTNRKVTVKQLKEDYFKKIECFDSVEISGVEDRFNASLGTYHDLLKIIKDKDFLDNEENEDILEDIVLTLTLFEDREMIEERLKTYAHLFDDKVMKQLKRRRYTGWGRLSRKLINGIRDKQSGKTILDFLKSDGFANRNFMQLIHDDSLTFKEDIQKAQVSGQGDSLHEHIANLAGSPAIKKGILQTVKVVDELVKVMGRHKPENIVIEMARENQTTQKGQKNSRERMKRIEEGIKELGSQILKEHPVENTQLQNEKLYLYYLQNGRDMYVDQELDINRLSDYDVDHIVPQSFLKDDSIDNKVLTRSDKARGKSDNVPSEEVVKKMKNYWRQLLNAKLITQRKFDNLTKAERGGLSELDKAGFIKRQLVETRQITKHVAQILDSRMNTKYDENDKLIREVKVITLKSKLVSDFRKDFQFYKVREINNYHHAHDAYLNAVVGTALIKKYPKLESEFVYGDYKVYDVRKMIAKSEQEIGKATAKYFFYSNIMNFFKTEITLANGEIRKRPLIETNGETGEIVWDKGRDFATVRKVLSMPQVNIVKKTEVQTGGFSKESILPKRNSDKLIARKKDWDPKKYGGFDSPTVAYSVLVVAKVEKGKSKKLKSVKELLGITIMERSSFEKNPIDFLEAKGYKEVKKDLIIKLPKYSLFELENGRKRMLASAGELQKGNELALPSKYVNFLYLASHYEKLKGSPEDNEQKQLFVEQHKHYLDEIIEQISEFSKRVILADANLDKVLSAYNKHRDKPIREQAENIIHLFTLTNLGAPAAFKYFDTTIDRKRYTSTKEVLDATLIHQSITGLYETRIDLSQLGGDGGPAPGGGGGTLGIEDEYRLHETSTEPDVSLGSTWLSDFPQAWAETGGMGLAVRQAPLIIPLKATSTPVSIQQYPMSHEARLGIKPHIQRLLDQGILVPCQSPWNTPLLPVKKPGTNDYRPVQDLREVNKRVEDIHPTVPNPYNLLSGLPPSHQWYTVLDLKDAFFCLRLHPTSQPLFAFEWRDPGMGISGQLTWTRLPQGFKNSPTLFNEALHRDLADFRIQHPDLILLQYVDDILLAATSELDCQQGTRALLQTLGDLGYRASAKKAQICQKQVKYLGYLLREGQRWLTEARKETVMGQPVPKTPRQLREFLGTAGFCRLWIPGFAEMAAPLYPLTKPGTLFSWGPDQQKAYQEIKQALLTAPALGLPDLTKPFELFVDEKQGYAKGVLTQKLGPWRRPVAYLSKKLDPVAAGWPPCLRMVAAIAVLTKDAGKLTMGQPLVILAPHAVEALVKQPPDRWLSNARMTHYQAMLLDTDRVQFGPVVALNPATLLPLPEEGAPHDCLEILAETHGTRPDLTDQPIPDADHTWYTDGSSFLQEGQRKAGAAVTTETEVIWAGALPAGTSAQRAELIALTQALKMAEGKRLNVYTDSRYAFATAHIHGEIYRRRGWLTSEGREIKNKSEILALLKALFLPKRLSIIHCLGHQKGDSAEARGNRLADQAAREAAIKTPPDTSTLLAGKRTADGSEFEKRTADGSEFESPKKKAKVE

SEQ ID NO: 6722 - protein, 2085 aa, synthetic construct
MPAAKRVKLDGGDKKYSIGLDIGTNSVGWAVITDEYKVPSKKFKVLGNTDRHSIKKNLIGALLFDSGETAEATRLKRTARRRYTRRKNRICYLQEIFSNEMAKVDDSFFHRLEESFLVEEDKKHERHPIFGNIVDEVAYHEKYPTIYHLRKKLVDSTDKADLRLIYLALAHMIKFRGHFLIEGDLNPDNSDVDKLFIQLVQTYNQLFEENPINASGVDAKAILSARLSKSRRLENLIAQLPGEKKNGLFGNLIALSLGLTPNFKSNFDLAEDAKLQLSKDTYDDDLDNLLAQIGDQYADLFLAAKNLSDAILLSDILRVNTEITKAPLSASMIKRYDEHHQDLTLLKALVRQQLPEKYKEIFFDQSKNGYAGYIDGGASQEEFYKFIKPILEKMDGTEELLVKLNREDLLRKQRTFDNGSIPHQIHLGELHAILRRQEDFYPFLKDNREKIEKILTFRIPYYVGPLARGNSRFAWMTRKSEETITPWNFEEVVDKGASAQSFIERMTNFDKNLPNEKVLPKHSLLYEYFTVYNELTKVKYVTEGMRKPAFLSGEQKKAIVDLLFKTNRKVTVKQLKEDYFKKIECFDSVEISGVEDRFNASLGTYHDLLKIIKDKDFLDNEENEDILEDIVLTLTLFEDREMIEERLKTYAHLFDDKVMKQLKRRRYTGWGRLSRKLINGIRDKQSGKTILDFLKSDGFANRNFMQLIHDDSLTFKEDIQKAQVSGQGDSLHEHIANLAGSPAIKKGILQTVKVVDELVKVMGRHKPENIVIEMARENQTTQKGQKNSRERMKRIEEGIKELGSQILKEHPVENTQLQNEKLYLYYLQNGRDMYVDQELDINRLSDYDVDHIVPQSFLKDDSIDNKVLTRSDKARGKSDNVPSEEVVKKMKNYWRQLLNAKLITQRKFDNLTKAERGGLSELDKAGFIKRQLVETRQITKHVAQILDSRMNTKYDENDKLIREVKVITLKSKLVSDFRKDFQFYKVREINNYHHAHDAYLNAVVGTALIKKYPKLESEFVYGDYKVYDVRKMIAKSEQEIGKATAKYFFYSNIMNFFKTEITLANGEIRKRPLIETNGETGEIVWDKGRDFATVRKVLSMPQVNIVKKTEVQTGGFSKESILPKRNSDKLIARKKDWDPKKYGGFDSPTVAYSVLVVAKVEKGKSKKLKSVKELLGITIMERSSFEKNPIDFLEAKGYKEVKKDLIIKLPKYSLFELENGRKRMLASAGELQKGNELALPSKYVNFLYLASHYEKLKGSPEDNEQKQLFVEQHKHYLDEIIEQISEFSKRVILADANLDKVLSAYNKHRDKPIREQAENIIHLFTLTNLGAPAAFKYFDTTIDRKRYTSTKEVLDATLIHQSITGLYETRIDLSQLGGDGGPAPGGGGGTLQLDDEYRLYSPLVKPDQNIQFWLEQFPQAWAETAGMGLAKQVPPQVIQLKASATPVSVRQYPLSKEAQEGIRPHVQRLIQQGILVPVQSPWNTPLLPVRKPGTNDYRPVQDLREVNKRVQDIHPTVPNPYNLLCALPPQRSWYTVLDLKDAFFCLRLHPTSQPLFAFEWRDPGTGRTGQLTWTRLPQGFKNSPTIFDEALHRDLANFRIQHPQVTLLQYVDDLLLAGATKQDCLEGTKALLLELSDLGYRASAKKAQICRREVTYLGYSLRDGQRWLTEARKKTVVQIPAPTTAKQVREFLGTAGFCRLWIPGFATLAAPLYPLTKEKGEFSWAPEHQKAFDAIKKALLSAPALALPDVTKPFTLYVDERKGVARGVLTQTLGPWRRPVAYLSKKLDPVASGWPVCLKAIAAVAILVKDADKLTLGQNITVIAPHALENIVRQPPDRWMTNARMTHYQSLLLTERVTFAPPAALNPATLLPEETDEPVTHDCHQLLIEETGVRKDLTDIPLTGEVLTWFTDGSSYVVEGKRMAGAAVVDGTRTIWASSLPEGTSAQKAELMALTQALRLAEGKSINIYTDSRYAFATAHVHGAIYKQRGLLTSAGREIKNKEEILSLLEALHLPKRLAIIHCPGHQKAKDPISRGNQMADRVAKQAAQGVNLLAGKRTADGSEFEKRTADGSEFESPKKKAKVE

SEQ ID NO: 6723 - protein, 2082 aa, synthetic construct
MPAAKRVKLDGGDKKYSIGLDIGTNSVGWAVITDEYKVPSKKFKVLGNTDRHSIKKNLIGALLFDSGETAEATRLKRTARRRYTRRKNRICYLQEIFSNEMAKVDDSFFHRLEESFLVEEDKKHERHPIFGNIVDEVAYHEKYPTIYHLRKKLVDSTDKADLRLIYLALAHMIKFRGHFLIEGDLNPDNSDVDKLFIQLVQTYNQLFEENPINASGVDAKAILSARLSKSRRLENLIAQLPGEKKNGLFGNLIALSLGLTPNFKSNFDLAEDAKLQLSKDTYDDDLDNLLAQIGDQYADLFLAAKNLSDAILLSDILRVNTEITKAPLSASMIKRYDEHHQDLTLLKALVRQQLPEKYKEIFFDQSKNGYAGYIDGGASQEEFYKFIKPILEKMDGTEELLVKLNREDLLRKQRTFDNGSIPHQIHLGELHAILRRQEDFYPFLKDNREKIEKILTFRIPYYVGPLARGNSRFAWMTRKSEETITPWNFEEVVDKGASAQSFIERMTNFDKNLPNEKVLPKHSLLYEYFTVYNELTKVKYVTEGMRKPAFLSGEQKKAIVDLLFKTNRKVTVKQLKEDYFKKIECFDSVEISGVEDRFNASLGTYHDLLKIIKDKDFLDNEENEDILEDIVLTLTLFEDREMIEERLKTYAHLFDDKVMKQLKRRRYTGWGRLSRKLINGIRDKQSGKTILDFLKSDGFANRNFMQLIHDDSLTFKEDIQKAQVSGQGDSLHEHIANLAGSPAIKKGILQTVKVVDELVKVMGRHKPENIVIEMARENQTTQKGQKNSRERMKRIEEGIKELGSQILKEHPVENTQLQNEKLYLYYLQNGRDMYVDQELDINRLSDYDVDHIVPQSFLKDDSIDNKVLTRSDKARGKSDNVPSEEVVKKMKNYWRQLLNAKLITQRKFDNLTKAERGGLSELDKAGFIKRQLVETRQITKHVAQILDSRMNTKYDENDKLIREVKVITLKSKLVSDFRKDFQFYKVREINNYHHAHDAYLNAVVGTALIKKYPKLESEFVYGDYKVYDVRKMIAKSEQEIGKATAKYFFYSNIMNFFKTEITLANGEIRKRPLIETNGETGEIVWDKGRDFATVRKVLSMPQVNIVKKTEVQTGGFSKESILPKRNSDKLIARKKDWDPKKYGGFDSPTVAYSVLVVAKVEKGKSKKLKSVKELLGITIMERSSFEKNPIDFLEAKGYKEVKKDLIIKLPKYSLFELENGRKRMLASAGELQKGNELALPSKYVNFLYLASHYEKLKGSPEDNEQKQLFVEQHKHYLDEIIEQISEFSKRVILADANLDKVLSAYNKHRDKPIREQAENIIHLFTLTNLGAPAAFKYFDTTIDRKRYTSTKEVLDATLIHQSITGLYETRIDLSQLGGDGGPAPGGGGGIPWLMKKPLQLTTLVPLQEYEERLLKQTMLTGSYKEKLQSLFLKYDALWQHWENQVGHRRIKPHHIATGTVNPRPQKQYPINPKAKASIQTVINDLLKQGVLIQQNSIMNTPVYPVPKPDGKWRMVLDYREVNKTIPLIAAQNQHSAGILSSIFRGKYKTTLDLSNGFWAHSITPESYWLTAFTWLGQQYCWTRLPQGFLNSPALFNADVVDLLKEVPNVQVYVDDIYISHDDPREHLEQLEKVFSLLLNAGYVVSLKKSEIAQHEVEFLGFNITKEGRGLTETFKQKLLNITPPRDLKQLQSILGLLNFARNFIPNFSELVKPLYNIIATAPGKYITWTTDNSQQLQNIISMLNSAENLEERNPEVRLIMKVNTSPSAGYIRFYNEFAKRPIMYLNYVYTKAEVKFTNTEKLLTTIHKGLIKALDLGMGQEILVYSPIVSMTKIQKTPLPERKALPIRWITWMSYLEDPRIQFHYDKTLPELQQVPTVTDDIIAKIKHPSEFSMVFYTDGSAIKHPNVNKSHNAGMGIAQVQFKPEFTVINTWSIPLGDHTAQLAEVAAVEFACKKALKIDGPVLIVTDSFYVAESVNKELPYWQSNGFFNNKKKPLKHVSKWKSIADCIQLKPDIIIIHEKGHQPTASTFHTEGNNLADKLATQGSYVVNAGKRTADGSEFEKRTADGSEFESPKKKAKVE

SEQ ID NO: 6724 - protein, 2082 aa, synthetic construct
MPAAKRVKLDGGDKKYSIGLDIGTNSVGWAVITDEYKVPSKKFKVLGNTDRHSIKKNLIGALLFDSGETAEATRLKRTARRRYTRRKNRICYLQEIFSNEMAKVDDSFFHRLEESFLVEEDKKHERHPIFGNIVDEVAYHEKYPTIYHLRKKLVDSTDKADLRLIYLALAHMIKFRGHFLIEGDLNPDNSDVDKLFIQLVQTYNQLFEENPINASGVDAKAILSARLSKSRRLENLIAQLPGEKKNGLFGNLIALSLGLTPNFKSNFDLAEDAKLQLSKDTYDDDLDNLLAQIGDQYADLFLAAKNLSDAILLSDILRVNTEITKAPLSASMIKRYDEHHQDLTLLKALVRQQLPEKYKEIFFDQSKNGYAGYIDGGASQEEFYKFIKPILEKMDGTEELLVKLNREDLLRKQRTFDNGSIPHQIHLGELHAILRRQEDFYPFLKDNREKIEKILTFRIPYYVGPLARGNSRFAWMTRKSEETITPWNFEEVVDKGASAQSFIERMTNFDKNLPNEKVLPKHSLLYEYFTVYNELTKVKYVTEGMRKPAFLSGEQKKAIVDLLFKTNRKVTVKQLKEDYFKKIECFDSVEISGVEDRFNASLGTYHDLLKIIKDKDFLDNEENEDILEDIVLTLTLFEDREMIEERLKTYAHLFDDKVMKQLKRRRYTGWGRLSRKLINGIRDKQSGKTILDFLKSDGFANRNFMQLIHDDSLTFKEDIQKAQVSGQGDSLHEHIANLAGSPAIKKGILQTVKVVDELVKVMGRHKPENIVIEMARENQTTQKGQKNSRERMKRIEEGIKELGSQILKEHPVENTQLQNEKLYLYYLQNGRDMYVDQELDINRLSDYDVDHIVPQSFLKDDSIDNKVLTRSDKARGKSDNVPSEEVVKKMKNYWRQLLNAKLITQRKFDNLTKAERGGLSELDKAGFIKRQLVETRQITKHVAQILDSRMNTKYDENDKLIREVKVITLKSKLVSDFRKDFQFYKVREINNYHHAHDAYLNAVVGTALIKKYPKLESEFVYGDYKVYDVRKMIAKSEQEIGKATAKYFFYSNIMNFFKTEITLANGEIRKRPLIETNGETGEIVWDKGRDFATVRKVLSMPQVNIVKKTEVQTGGFSKESILPKRNSDKLIARKKDWDPKKYGGFDSPTVAYSVLVVAKVEKGKSKKLKSVKELLGITIMERSSFEKNPIDFLEAKGYKEVKKDLIIKLPKYSLFELENGRKRMLASAGELQKGNELALPSKYVNFLYLASHYEKLKGSPEDNEQKQLFVEQHKHYLDEIIEQISEFSKRVILADANLDKVLSAYNKHRDKPIREQAENIIHLFTLTNLGAPAAFKYFDTTIDRKRYTSTKEVLDATLIHQSITGLYETRIDLSQLGGDGGPAPGGGGGIPWLMKKPLQLTTLVPLQEYEERLLKQTMLTGSYKEKLQSLFLKYDALWQHWENQVGHRRIKPHHIATGTVNPRPQKQYPINPKAKASIQTVINDLLKQGVLIQQNSIMNTPVYPVPKPDGKWRMVLDYREVNKTIPLIAAQNQHSAGILSSIFRGKYKTTLDLSNGFWAHSITPESYWLTAFTWLGQQYCWTRLPQGFLNSPALFNADVVDLLKEVPNVQVYVDDIYISHDDPREHLEQLEKVFSLLLNAGYVVSLKKSEIAQHEVEFLGFNITKEGRGLTETFKQKLLNITPPRDLKQLQSILGKLNFARNFIPNFSELVKPLYNIIATAPGKYITWTTDNSQQLQNIISMLNSAENLEERNPEVRLIMKVNTSPSAGYIRFYNEFAKRPIMYLNYVYTKAEVKFTNTEKLLTTIHKGLIKALDLGMGQEILVYSPIVSMTKIQKTPLPERKALPIRWITWMSYLEDPRIQFHYDKTLPELQQVPTVTDDIIAKIKHPSEFSMVFYTDGSAIKHPNVNKSHNAGMGIAQVQFKPEFTVINTWSIPLGDHTAQLAEVAAVEFACKKALKIDGPVLIVTDSFYVAESVNKELPYWQSNGFFNNKKKPLKHVSKWKSIADCIQLKPDIIIIHEKGHQPTASTFHTEGNNLADKLATQGSYVVNAGKRTADGSEFEKRTADGSEFESPKKKAKVE

SEQ ID NO: 6725 - protein, 2091 aa, synthetic construct
MPAAKRVKLDGGDKKYSIGLDIGTNSVGWAVITDEYKVPSKKFKVLGNTDRHSIKKNLIGALLFDSGETAEATRLKRTARRRYTRRKNRICYLQEIFSNEMAKVDDSFFHRLEESFLVEEDKKHERHPIFGNIVDEVAYHEKYPTIYHLRKKLVDSTDKADLRLIYLALAHMIKFRGHFLIEGDLNPDNSDVDKLFIQLVQTYNQLFEENPINASGVDAKAILSARLSKSRRLENLIAQLPGEKKNGLFGNLIALSLGLTPNFKSNFDLAEDAKLQLSKDTYDDDLDNLLAQIGDQYADLFLAAKNLSDAILLSDILRVNTEITKAPLSASMIKRYDEHHQDLTLLKALVRQQLPEKYKEIFFDQSKNGYAGYIDGGASQEEFYKFIKPILEKMDGTEELLVKLNREDLLRKQRTFDNGSIPHQIHLGELHAILRRQEDFYPFLKDNREKIEKILTFRIPYYVGPLARGNSRFAWMTRKSEETITPWNFEEVVDKGASAQSFIERMTNFDKNLPNEKVLPKHSLLYEYFTVYNELTKVKYVTEGMRKPAFLSGEQKKAIVDLLFKTNRKVTVKQLKEDYFKKIECFDSVEISGVEDRFNASLGTYHDLLKIIKDKDFLDNEENEDILEDIVLTLTLFEDREMIEERLKTYAHLFDDKVMKQLKRRRYTGWGRLSRKLINGIRDKQSGKTILDFLKSDGFANRNFMQLIHDDSLTFKEDIQKAQVSGQGDSLHEHIANLAGSPAIKKGILQTVKVVDELVKVMGRHKPENIVIEMARENQTTQKGQKNSRERMKRIEEGIKELGSQILKEHPVENTQLQNEKLYLYYLQNGRDMYVDQELDINRLSDYDVDHIVPQSFLKDDSIDNKVLTRSDKARGKSDNVPSEEVVKKMKNYWRQLLNAKLITQRKFDNLTKAERGGLSELDKAGFIKRQLVETRQITKHVAQILDSRMNTKYDENDKLIREVKVITLKSKLVSDFRKDFQFYKVREINNYHHAHDAYLNAVVGTALIKKYPKLESEFVYGDYKVYDVRKMIAKSEQEIGKATAKYFFYSNIMNFFKTEITLANGEIRKRPLIETNGETGEIVWDKGRDFATVRKVLSMPQVNIVKKTEVQTGGFSKESILPKRNSDKLIARKKDWDPKKYGGFDSPTVAYSVLVVAKVEKGKSKKLKSVKELLGITIMERSSFEKNPIDFLEAKGYKEVKKDLIIKLPKYSLFELENGRKRMLASAGELQKGNELALPSKYVNFLYLASHYEKLKGSPEDNEQKQLFVEQHKHYLDEIIEQISEFSKRVILADANLDKVLSAYNKHRDKPIREQAENIIHLFTLTNLGAPAAFKYFDTTIDRKRYTSTKEVLDATLIHQSITGLYETRIDLSQLGGDGGPAPGGGGGTLNIEDEYRLHETSKEPDVPLGSTWLSDFPQAWAETGGMGLAVRQAPLIIPLKATSTPVSIKQYPMSQEARLGIKPHIQRLLDQGILVPCQSPWNTPLLPVKKPGTNDYRPVQDLREVNKRVEDIHPTVPNPYNLLSGLPPSHQWYTVLDLKDAFFCLRLHPTSQPLFAFEWRDPEMGISGQLTWTRLPQGFKNSPTLFNEALHRDLADFRIQHPDLILLQYVDDLLLAATSEQDCQRGTRALLQTLGNLGYRASAKKAQICQKQVKYLGYLLKEGQRWLTEARKETVMGQPTPKTPRQLREFLGTAGFCRLWIPGFAEMAAPLYPLTKPGTLFNWGPDQQKAYQEIKQALLTAPALGLPDLTKPFELFVDEKQGYAKGVLTQKLGPWRRPVAYLSKKLDPVAAGWPPCLRMVAAIAVLTKDAGKLTMGQPLVILAPHAVEALVKQPPDRWLSNARMTHYQAMLLDTDRVQFGPVVALNPATLLPLPEKEAPHDCLEILAETHGTRPDLTDQPIPDADYTWYTDGSSFLQEGQRRAGAAVTTETEVIWARALPAGTSAQRAELIALTQALKMAEGKKLNVYTDSRYAFATAHVHGEIYRRRGWLTSEGREIKNKNEILALLKALFLPKRLSIIHCPGHQKGNSAEARGNRMADQAAREAAMKAVLETSTLLAGKRTADGSEFEKRTADGSEFESPKKKAKVE

SEQ ID NO: 6726 - protein, 2091 aa, synthetic construct
MPAAKRVKLDGGDKKYSIGLDIGTNSVGWAVITDEYKVPSKKFKVLGNTDRHSIKKNLIGALLFDSGETAEATRLKRTARRRYTRRKNRICYLQEIFSNEMAKVDDSFFHRLEESFLVEEDKKHERHPIFGNIVDEVAYHEKYPTIYHLRKKLVDSTDKADLRLIYLALAHMIKFRGHFLIEGDLNPDNSDVDKLFIQLVQTYNQLFEENPINASGVDAKAILSARLSKSRRLENLIAQLPGEKKNGLFGNLIALSLGLTPNFKSNFDLAEDAKLQLSKDTYDDDLDNLLAQIGDQYADLFLAAKNLSDAILLSDILRVNTEITKAPLSASMIKRYDEHHQDLTLLKALVRQQLPEKYKEIFFDQSKNGYAGYIDGGASQEEFYKFIKPILEKMDGTEELLVKLNREDLLRKQRTFDNGSIPHQIHLGELHAILRRQEDFYPFLKDNREKIEKILTFRIPYYVGPLARGNSRFAWMTRKSEETITPWNFEEVVDKGASAQSFIERMTNFDKNLPNEKVLPKHSLLYEYFTVYNELTKVKYVTEGMRKPAFLSGEQKKAIVDLLFKTNRKVTVKQLKEDYFKKIECFDSVEISGVEDRFNASLGTYHDLLKIIKDKDFLDNEENEDILEDIVLTLTLFEDREMIEERLKTYAHLFDDKVMKQLKRRRYTGWGRLSRKLINGIRDKQSGKTILDFLKSDGFANRNFMQLIHDDSLTFKEDIQKAQVSGQGDSLHEHIANLAGSPAIKKGILQTVKVVDELVKVMGRHKPENIVIEMARENQTTQKGQKNSRERMKRIEEGIKELGSQILKEHPVENTQLQNEKLYLYYLQNGRDMYVDQELDINRLSDYDVDHIVPQSFLKDDSIDNKVLTRSDKARGKSDNVPSEEVVKKMKNYWRQLLNAKLITQRKFDNLTKAERGGLSELDKAGFIKRQLVETRQITKHVAQILDSRMNTKYDENDKLIREVKVITLKSKLVSDFRKDFQFYKVREINNYHHAHDAYLNAVVGTALIKKYPKLESEFVYGDYKVYDVRKMIAKSEQEIGKATAKYFFYSNIMNFFKTEITLANGEIRKRPLIETNGETGEIVWDKGRDFATVRKVLSMPQVNIVKKTEVQTGGFSKESILPKRNSDKLIARKKDWDPKKYGGFDSPTVAYSVLVVAKVEKGKSKKLKSVKELLGITIMERSSFEKNPIDFLEAKGYKEVKKDLIIKLPKYSLFELENGRKRMLASAGELQKGNELALPSKYVNFLYLASHYEKLKGSPEDNEQKQLFVEQHKHYLDEIIEQISEFSKRVILADANLDKVLSAYNKHRDKPIREQAENIIHLFTLTNLGAPAAFKYFDTTIDRKRYTSTKEVLDATLIHQSITGLYETRIDLSQLGGDGGPAPGGGGGTLNIEDEYRLHETSKEPDVPLGSTWLSDFPQAWAETGGMGLAVRQAPLIIPLKATSTPVSIKQYPMSQEARLGIKPHIQRLLDQGILVPCQSPWNTPLLPVKKPGTNDYRPVQDLREVNKRVEDIHPTVPNPYNLLSGLPPSHQWYTVLDLKDAFFCLRLHPTSQPLFAFEWRDPEMGISGQLTWTRLPQGFKNSPTLFNEALHRDLADFRIQHPDLILLQYVDDLLLAATSEQDCQRGTRALLQTLGNLGYRASAKKAQICQKQVKYLGYLLKEGQRWLTEARKETVMGQPTPKTPRQLREFLGKAGFCRLFIPGFAEMAAPLYPLTKPGTLFNWGPDQQKAYQEIKQALLTAPALGLPDLTKPFELFVDEKQGYAKGVLTQKLGPWRRPVAYLSKKLDPVAAGWPPCLRMVAAIAVLTKDAGKLTMGQPLVILAPHAVEALVKQPPDRWLSNARMTHYQAMLLDTDRVQFGPVVALNPATLLPLPEKEAPHDCLEILAETHGTRPDLTDQPIPDADYTWYTDGSSFLQEGQRRAGAAVTTETEVIWARALPAGTSAQRAELIALTQALKMAEGKKLNVYTDSRYAFATAHVHGEIYRRRGWLTSEGREIKNKNEILALLKALFLPKRLSIIHCPGHQKGNSAEARGNRMADQAAREAAMKAVLETSTLLAGKRTADGSEFEKRTADGSEFESPKKKAKVE

SEQ ID NO: 6727 - protein, 2095 aa, synthetic construct
MPAAKRVKLDGGDKKYSIGLDIGTNSVGWAVITDEYKVPSKKFKVLGNTDRHSIKKNLIGALLFDSGETAEATRLKRTARRRYTRRKNRICYLQEIFSNEMAKVDDSFFHRLEESFLVEEDKKHERHPIFGNIVDEVAYHEKYPTIYHLRKKLVDSTDKADLRLIYLALAHMIKFRGHFLIEGDLNPDNSDVDKLFIQLVQTYNQLFEENPINASGVDAKAILSARLSKSRRLENLIAQLPGEKKNGLFGNLIALSLGLTPNFKSNFDLAEDAKLQLSKDTYDDDLDNLLAQIGDQYADLFLAAKNLSDAILLSDILRVNTEITKAPLSASMIKRYDEHHQDLTLLKALVRQQLPEKYKEIFFDQSKNGYAGYIDGGASQEEFYKFIKPILEKMDGTEELLVKLNREDLLRKQRTFDNGSIPHQIHLGELHAILRRQEDFYPFLKDNREKIEKILTFRIPYYVGPLARGNSRFAWMTRKSEETITPWNFEEVVDKGASAQSFIERMTNFDKNLPNEKVLPKHSLLYEYFTVYNELTKVKYVTEGMRKPAFLSGEQKKAIVDLLFKTNRKVTVKQLKEDYFKKIECFDSVEISGVEDRFNASLGTYHDLLKIIKDKDFLDNEENEDILEDIVLTLTLFEDREMIEERLKTYAHLFDDKVMKQLKRRRYTGWGRLSRKLINGIRDKQSGKTILDFLKSDGFANRNFMQLIHDDSLTFKEDIQKAQVSGQGDSLHEHIANLAGSPAIKKGILQTVKVVDELVKVMGRHKPENIVIEMARENQTTQKGQKNSRERMKRIEEGIKELGSQILKEHPVENTQLQNEKLYLYYLQNGRDMYVDQELDINRLSDYDVDHIVPQSFLKDDSIDNKVLTRSDKARGKSDNVPSEEVVKKMKNYWRQLLNAKLITQRKFDNLTKAERGGLSELDKAGFIKRQLVETRQITKHVAQILDSRMNTKYDENDKLIREVKVITLKSKLVSDFRKDFQFYKVREINNYHHAHDAYLNAVVGTALIKKYPKLESEFVYGDYKVYDVRKMIAKSEQEIGKATAKYFFYSNIMNFFKTEITLANGEIRKRPLIETNGETGEIVWDKGRDFATVRKVLSMPQVNIVKKTEVQTGGFSKESILPKRNSDKLIARKKDWDPKKYGGFDSPTVAYSVLVVAKVEKGKSKKLKSVKELLGITIMERSSFEKNPIDFLEAKGYKEVKKDLIIKLPKYSLFELENGRKRMLASAGELQKGNELALPSKYVNFLYLASHYEKLKGSPEDNEQKQLFVEQHKHYLDEIIEQISEFSKRVILADANLDKVLSAYNKHRDKPIREQAENIIHLFTLTNLGAPAAFKYFDTTIDRKRYTSTKEVLDATLIHQSITGLYETRIDLSQLGGDGGGSSEAAAKGGTAPLEEEYRLFLEAPIQNVTLLEQWKREIPKVWAEINPPGLASTQAPIHVQLLSTALPVRVRQYPITLEAKRSLRETIRKFRAAGILRPVHSPWNTPLLPVRKSGTSEYRMVQDLREVNKRVETIHPTVPNPYTLLSLLPPDRIWYSVLDLKDAFFCIPLAPESQLIFAFEWADAEEGESGQLTWTRLPQGFKNSPTLFNEALNRDLQGFRLDHPSVSLLQYVDDLLIAADTQAACLSATRDLLMTLAELGYRVSGKKAQLCQEEVTYLGFKIHKGSRSLSNSRTQAILQIPVPKTKRQVREFLGTIGYCRLWIPGFAELAQPLYAATRPGNDPLVWGEKEEEAFQSLKLALTQPPALALPSLDKPFQLFVEETSGAAKGVLTQALGPWKRPVAYLSKRLDPVAAGWPRCLRAIAAAALLTREASKLTFGQDIEITSSHNLESLLRSPPDKWLTNARITQYQVLLLDPPRVRFKQTAALNPATLLPETDDTLPIHHCLDTLDSLTSTRPDLTDQPLAQAEATLFTDGSSYIRDGKRYAGAAVVTLDSVIWAEPLPIGTSAQKAELIALTKALEWSKDKSVNIYTDSRYAFATLHVHGMIYRERGWLTAGGKAIKNAPEILALLTAVWLPKRVAVMHCKGHQKDDAPTSTGNRRADEVAREVAIRPLSTQATISAGKRTADGSEFEKRTADGSEFESPKKKAKVE

SEQ ID NO: 6728 - protein, 2099 aa, synthetic construct
MPAAKRVKLDGGDKKYSIGLDIGTNSVGWAVITDEYKVPSKKFKVLGNTDRHSIKKNLIGALLFDSGETAEATRLKRTARRRYTRRKNRICYLQEIFSNEMAKVDDSFFHRLEESFLVEEDKKHERHPIFGNIVDEVAYHEKYPTIYHLRKKLVDSTDKADLRLIYLALAHMIKFRGHFLIEGDLNPDNSDVDKLFIQLVQTYNQLFEENPINASGVDAKAILSARLSKSRRLENLIAQLPGEKKNGLFGNLIALSLGLTPNFKSNFDLAEDAKLQLSKDTYDDDLDNLLAQIGDQYADLFLAAKNLSDAILLSDILRVNTEITKAPLSASMIKRYDEHHQDLTLLKALVRQQLPEKYKEIFFDQSKNGYAGYIDGGASQEEFYKFIKPILEKMDGTEELLVKLNREDLLRKQRTFDNGSIPHQIHLGELHAILRRQEDFYPFLKDNREKIEKILTFRIPYYVGPLARGNSRFAWMTRKSEETITPWNFEEVVDKGASAQSFIERMTNFDKNLPNEKVLPKHSLLYEYFTVYNELTKVKYVTEGMRKPAFLSGEQKKAIVDLLFKTNRKVTVKQLKEDYFKKIECFDSVEISGVEDRFNASLGTYHDLLKIIKDKDFLDNEENEDILEDIVLTLTLFEDREMIEERLKTYAHLFDDKVMKQLKRRRYTGWGRLSRKLINGIRDKQSGKTILDFLKSDGFANRNFMQLIHDDSLTFKEDIQKAQVSGQGDSLHEHIANLAGSPAIKKGILQTVKVVDELVKVMGRHKPENIVIEMARENQTTQKGQKNSRERMKRIEEGIKELGSQILKEHPVENTQLQNEKLYLYYLQNGRDMYVDQELDINRLSDYDVDHIVPQSFLKDDSIDNKVLTRSDKARGKSDNVPSEEVVKKMKNYWRQLLNAKLITQRKFDNLTKAERGGLSELDKAGFIKRQLVETRQITKHVAQILDSRMNTKYDENDKLIREVKVITLKSKLVSDFRKDFQFYKVREINNYHHAHDAYLNAVVGTALIKKYPKLESEFVYGDYKVYDVRKMIAKSEQEIGKATAKYFFYSNIMNFFKTEITLANGEIRKRPLIETNGETGEIVWDKGRDFATVRKVLSMPQVNIVKKTEVQTGGFSKESILPKRNSDKLIARKKDWDPKKYGGFDSPTVAYSVLVVAKVEKGKSKKLKSVKELLGITIMERSSFEKNPIDFLEAKGYKEVKKDLIIKLPKYSLFELENGRKRMLASAGELQKGNELALPSKYVNFLYLASHYEKLKGSPEDNEQKQLFVEQHKHYLDEIIEQISEFSKRVILADANLDKVLSAYNKHRDKPIREQAENIIHLFTLTNLGAPAAFKYFDTTIDRKRYTSTKEVLDATLIHQSITGLYETRIDLSQLGGDGGGSSEAAAKGGTVSLQDEHRLFDIPVTTSLPDVWLQDFPQAWAETGGLGRAKCQAPIIIDLKPTAVPVSIKQYPMSLEAHMGIRQHIIKFLELGVLRPCRSPWNTPLLPVKKPGTQDYRPVQDLREINKRTVDIHPTVPNPYNLLSTLKPDYSWYTVLDLKDAFFCLPLAPQSQELFAFEWKDPERGISGQLTWTRLPQGFKNSPTLFNEALHRDLTDFRTQHPEVTLLQYVDDLLLAAPTKKACTQGTRHLLQELGEKGYRASAKKAQICQTKVTYLGYILSEGKRWLTPGRIETVARIPPPRNPREVREFLGTAGFCRLWIPGFAELAAPLYALTKPSTPFTWQTEHQLAFEALKKALLSAPALGLPDTSKPFTLFLDERQGIAKGVLTQKLGPWKRPVAYLSKKLDPVAAGWPPCLRIMAATAMLVKDSAKLTLGQPLTVITPHTLEAIVRQPPDRWITNARLTHYQALLLDTDRVQFGPPVTLNPATLLPVPENQPSPHDCRQVLAETHGTREDLKDQELPDADHTWYTDGSSYLDSGTRRAGAAVVDGHNTIWAQSLPPGTSAQKAELIALTKALELSKGKKANIYTDSRYAFATAHTHGSIYERRGWLTSEGKEIKNKAEIIALLKALFLPQEVAIIHCPGHQKGQDPVAVGNRQADRVARQAAMAEVLTLATEPDNTSHITAGKRTADGSEFEKRTADGSEFESPKKKAKVE

SEQ ID NO: 6729 - protein, 2124 aa, synthetic construct
MPAAKRVKLDGGDKKYSIGLDIGTNSVGWAVITDEYKVPSKKFKVLGNTDRHSIKKNLIGALLFDSGETAEATRLKRTARRRYTRRKNRICYLQEIFSNEMAKVDDSFFHRLEESFLVEEDKKHERHPIFGNIVDEVAYHEKYPTIYHLRKKLVDSTDKADLRLIYLALAHMIKFRGHFLIEGDLNPDNSDVDKLFIQLVQTYNQLFEENPINASGVDAKAILSARLSKSRRLENLIAQLPGEKKNGLFGNLIALSLGLTPNFKSNFDLAEDAKLQLSKDTYDDDLDNLLAQIGDQYADLFLAAKNLSDAILLSDILRVNTEITKAPLSASMIKRYDEHHQDLTLLKALVRQQLPEKYKEIFFDQSKNGYAGYIDGGASQEEFYKFIKPILEKMDGTEELLVKLNREDLLRKQRTFDNGSIPHQIHLGELHAILRRQEDFYPFLKDNREKIEKILTFRIPYYVGPLARGNSRFAWMTRKSEETITPWNFEEVVDKGASAQSFIERMTNFDKNLPNEKVLPKHSLLYEYFTVYNELTKVKYVTEGMRKPAFLSGEQKKAIVDLLFKTNRKVTVKQLKEDYFKKIECFDSVEISGVEDRFNASLGTYHDLLKIIKDKDFLDNEENEDILEDIVLTLTLFEDREMIEERLKTYAHLFDDKVMKQLKRRRYTGWGRLSRKLINGIRDKQSGKTILDFLKSDGFANRNFMQLIHDDSLTFKEDIQKAQVSGQGDSLHEHIANLAGSPAIKKGILQTVKVVDELVKVMGRHKPENIVIEMARENQTTQKGQKNSRERMKRIEEGIKELGSQILKEHPVENTQLQNEKLYLYYLQNGRDMYVDQELDINRLSDYDVDHIVPQSFLKDDSIDNKVLTRSDKARGKSDNVPSEEVVKKMKNYWRQLLNAKLITQRKFDNLTKAERGGLSELDKAGFIKRQLVETRQITKHVAQILDSRMNTKYDENDKLIREVKVITLKSKLVSDFRKDFQFYKVREINNYHHAHDAYLNAVVGTALIKKYPKLESEFVYGDYKVYDVRKMIAKSEQEIGKATAKYFFYSNIMNFFKTEITLANGEIRKRPLIETNGETGEIVWDKGRDFATVRKVLSMPQVNIVKKTEVQTGGFSKESILPKRNSDKLIARKKDWDPKKYGGFDSPTVAYSVLVVAKVEKGKSKKLKSVKELLGITIMERSSFEKNPIDFLEAKGYKEVKKDLIIKLPKYSLFELENGRKRMLASAGELQKGNELALPSKYVNFLYLASHYEKLKGSPEDNEQKQLFVEQHKHYLDEIIEQISEFSKRVILADANLDKVLSAYNKHRDKPIREQAENIIHLFTLTNLGAPAAFKYFDTTIDRKRYTSTKEVLDATLIHQSITGLYETRIDLSQLGGDGGGSSEAAAKGGLLGRDLLTKLKAQIQFSTEGPQVTWEDRPAMCLVLNLEEEYRLHEKPVPPSIDPSWLQLFPMVWAEKAGMGLANQVPPVVVELKSDASPVAVRQYPMSKEAREGIRPHIQRFLDLGILVPCQSPWNTPLLPVKKPGTNDYRPVQDLREVNKRVQDIHPTVPNPYNLLSSLPPSHTWYSVLDLKDAFFCLKLHPNSQPLFAFEWRDPEKGNTGQLTWTRLPQGFKNSPTLFNEALHRDLASFRALNPQVVMLQYVDDLLVAAPTYRDCKEGTRRLLQELSKLGYRVSAKKAQLCREEVTYLGYLLKGGKRWLTPARKATVMKIPTPTTPRQVREFLGTAGFCRLWIPGFASLAAPLYPLTRPKVPFTWTEAHQEAFGRIKEALLSAPALALPDLTKPFALYVDEKEGVARGVLTQTLGPWRRPVAYLSKKLDPVASGWPTCLKAIAAVALLLKDADKLTLGQNVLVIAPHNLESIVRQPPDRWMTNARMTHYQSLLLNERVSFAPPAILNPATLLPVESDDTPIHICSEILAEETGTRPDLRDQPLPGVPAWYTDGSSFIMDGRRQAGAAIVDNKRTVWASNLPEGTSAQKAELIALTQALRLAEGKSINIYTDSRYAFATAHVHGAIYKQRGWLTSAGKDIKNKEEILALLEAIHLPKRVAIIHCPGHQRGTDPVATGNRKADEAAKQAAQSTRILTETTKNAGKRTADGSEFEKRTADGSEFESPKKKAKVE

SEQ ID NO: 6730 - protein, 2093 aa, synthetic construct
MPAAKRVKLDGGDKKYSIGLDIGTNSVGWAVITDEYKVPSKKFKVLGNTDRHSIKKNLIGALLFDSGETAEATRLKRTARRRYTRRKNRICYLQEIFSNEMAKVDDSFFHRLEESFLVEEDKKHERHPIFGNIVDEVAYHEKYPTIYHLRKKLVDSTDKADLRLIYLALAHMIKFRGHFLIEGDLNPDNSDVDKLFIQLVQTYNQLFEENPINASGVDAKAILSARLSKSRRLENLIAQLPGEKKNGLFGNLIALSLGLTPNFKSNFDLAEDAKLQLSKDTYDDDLDNLLAQIGDQYADLFLAAKNLSDAILLSDILRVNTEITKAPLSASMIKRYDEHHQDLTLLKALVRQQLPEKYKEIFFDQSKNGYAGYIDGGASQEEFYKFIKPILEKMDGTEELLVKLNREDLLRKQRTFDNGSIPHQIHLGELHAILRRQEDFYPFLKDNREKIEKILTFRIPYYVGPLARGNSRFAWMTRKSEETITPWNFEEVVDKGASAQSFIERMTNFDKNLPNEKVLPKHSLLYEYFTVYNELTKVKYVTEGMRKPAFLSGEQKKAIVDLLFKTNRKVTVKQLKEDYFKKIECFDSVEISGVEDRFNASLGTYHDLLKIIKDKDFLDNEENEDILEDIVLTLTLFEDREMIEERLKTYAHLFDDKVMKQLKRRRYTGWGRLSRKLINGIRDKQSGKTILDFLKSDGFANRNFMQLIHDDSLTFKEDIQKAQVSGQGDSLHEHIANLAGSPAIKKGILQTVKVVDELVKVMGRHKPENIVIEMARENQTTQKGQKNSRERMKRIEEGIKELGSQILKEHPVENTQLQNEKLYLYYLQNGRDMYVDQELDINRLSDYDVDHIVPQSFLKDDSIDNKVLTRSDKARGKSDNVPSEEVVKKMKNYWRQLLNAKLITQRKFDNLTKAERGGLSELDKAGFIKRQLVETRQITKHVAQILDSRMNTKYDENDKLIREVKVITLKSKLVSDFRKDFQFYKVREINNYHHAHDAYLNAVVGTALIKKYPKLESEFVYGDYKVYDVRKMIAKSEQEIGKATAKYFFYSNIMNFFKTEITLANGEIRKRPLIETNGETGEIVWDKGRDFATVRKVLSMPQVNIVKKTEVQTGGFSKESILPKRNSDKLIARKKDWDPKKYGGFDSPTVAYSVLVVAKVEKGKSKKLKSVKELLGITIMERSSFEKNPIDFLEAKGYKEVKKDLIIKLPKYSLFELENGRKRMLASAGELQKGNELALPSKYVNFLYLASHYEKLKGSPEDNEQKQLFVEQHKHYLDEIIEQISEFSKRVILADANLDKVLSAYNKHRDKPIREQAENIIHLFTLTNLGAPAAFKYFDTTIDRKRYTSTKEVLDATLIHQSITGLYETRIDLSQLGGDGGGSSEAAAKGGTLNLEDEYRLYETSAEPEVSPGSTWLSDFPQAWAETGGMGLAVRQAPLIIPLKATSTPVSIKQYPMSQEAKLGIKPHIQRLLDQGILVPCQSPWNTPLLPVKKPGTNDYRPVQDLREVNKRVEDIHPTVPNPYNLLSGLPPSHRWYTVLDLKDAFFCLRLHPTSQPLFAFEWRDPGMGISGQLTWTRLPQGFKNSPTLFNEALHRDLADFRIQHPDLILLQYVDDILLAATSELDCQQGTRALLLTLGNLGYRASAKKAQLCQKQVKYLGYLLKEGQRWLTEARKETVMGQPTPKTPRQLREFLGTAGFCRLWIPGFAEMAAPLYPLTKPGTLFNWGPDQQKAYQEIKQALLTAPALGLPDLTKPFELFVDEKQGYAKGVLTQKLGPWRRPVAYLSKKLDPVAAGWPPCLRMVAAIAVLRKDAGKLTMGQPLVILAPHAVEALVKQPPDRWLSNARMTHYQAMLLDTDRVQFGPVVALNPATLLPLPEEGAPHDCLEILAETHGTRPDLTDQPIPDADHTWYTDGSSFLQEGQRKAGAAVTTETEVIWARALPAGTSAQRAELIALTQALKMAEGKRLNVYTDSRYAFATAHIHGEIYRRRGWLTSEGREIKNKSEILALLKALFLPKRLSIIHCLGHQKGDSAEARGNRLADQAAREAAIKTPPDTSTLLAGKRTADGSEFEKRTADGSEFESPKKKAKVE

SEQ ID NO: 6731 - protein, 2093 aa, synthetic construct
MPAAKRVKLDGGDKKYSIGLDIGTNSVGWAVITDEYKVPSKKFKVLGNTDRHSIKKNLIGALLFDSGETAEATRLKRTARRRYTRRKNRICYLQEIFSNEMAKVDDSFFHRLEESFLVEEDKKHERHPIFGNIVDEVAYHEKYPTIYHLRKKLVDSTDKADLRLIYLALAHMIKFRGHFLIEGDLNPDNSDVDKLFIQLVQTYNQLFEENPINASGVDAKAILSARLSKSRRLENLIAQLPGEKKNGLFGNLIALSLGLTPNFKSNFDLAEDAKLQLSKDTYDDDLDNLLAQIGDQYADLFLAAKNLSDAILLSDILRVNTEITKAPLSASMIKRYDEHHQDLTLLKALVRQQLPEKYKEIFFDQSKNGYAGYIDGGASQEEFYKFIKPILEKMDGTEELLVKLNREDLLRKQRTFDNGSIPHQIHLGELHAILRRQEDFYPFLKDNREKIEKILTFRIPYYVGPLARGNSRFAWMTRKSEETITPWNFEEVVDKGASAQSFIERMTNFDKNLPNEKVLPKHSLLYEYFTVYNELTKVKYVTEGMRKPAFLSGEQKKAIVDLLFKTNRKVTVKQLKEDYFKKIECFDSVEISGVEDRFNASLGTYHDLLKIIKDKDFLDNEENEDILEDIVLTLTLFEDREMIEERLKTYAHLFDDKVMKQLKRRRYTGWGRLSRKLINGIRDKQSGKTILDFLKSDGFANRNFMQLIHDDSLTFKEDIQKAQVSGQGDSLHEHIANLAGSPAIKKGILQTVKVVDELVKVMGRHKPENIVIEMARENQTTQKGQKNSRERMKRIEEGIKELGSQILKEHPVENTQLQNEKLYLYYLQNGRDMYVDQELDINRLSDYDVDHIVPQSFLKDDSIDNKVLTRSDKARGKSDNVPSEEVVKKMKNYWRQLLNAKLITQRKFDNLTKAERGGLSELDKAGFIKRQLVETRQITKHVAQILDSRMNTKYDENDKLIREVKVITLKSKLVSDFRKDFQFYKVREINNYHHAHDAYLNAVVGTALIKKYPKLESEFVYGDYKVYDVRKMIAKSEQEIGKATAKYFFYSNIMNFFKTEITLANGEIRKRPLIETNGETGEIVWDKGRDFATVRKVLSMPQVNIVKKTEVQTGGFSKESILPKRNSDKLIARKKDWDPKKYGGFDSPTVAYSVLVVAKVEKGKSKKLKSVKELLGITIMERSSFEKNPIDFLEAKGYKEVKKDLIIKLPKYSLFELENGRKRMLASAGELQKGNELALPSKYVNFLYLASHYEKLKGSPEDNEQKQLFVEQHKHYLDEIIEQISEFSKRVILADANLDKVLSAYNKHRDKPIREQAENIIHLFTLTNLGAPAAFKYFDTTIDRKRYTSTKEVLDATLIHQSITGLYETRIDLSQLGGDGGGSSEAAAKGGTLNIEDEYRLHETSKEPDVPLGSTWLSDFPQAWAETGGMGLAVRQAPLIIPLKATSTPVSIKQYPMSQEARLGIKPHIQRLLDQGILVPCQSPWNTPLLPVKKPGTNDYRPVQDLREVNKRVEDIHPTVPNPYNLLSGLPPSHQWYTVLDLKDAFFCLRLHPTSQPLFAFEWRDPEMGISGQLTWTRLPQGFKNSPTLFNEALHRDLADFRIQHPDLILLQYVDDLLLAATSEQDCQRGTRALLQTLGNLGYRASAKKAQICQKQVKYLGYLLKEGQRWLTEARKETVMGQPTPKTPRQLREFLGKAGFCRLFIPGFAEMAAPLYPLTKPGTLFNWGPDQQKAYQEIKQALLTAPALGLPDLTKPFELFVDEKQGYAKGVLTQKLGPWRRPVAYLSKKLDPVAAGWPPCLRMVAAIAVLTKDAGKLTMGQPLVILAPHAVEALVKQPPDRWLSNARMTHYQAMLLDTDRVQFGPVVALNPATLLPLPEKEAPHDCLEILAETHGTRPDLTDQPIPDADYTWYTDGSSFLQEGQRRAGAAVTTETEVIWARALPAGTSAQRAELIALTQALKMAEGKKLNVYTDSRYAFATAHVHGEIYRRRGWLTSEGREIKNKNEILALLKALFLPKRLSIIHCPGHQKGNSAEARGNRMADQAAREAAMKAVLETSTLLAGKRTADGSEFEKRTADGSEFESPKKKAKVE

SEQ ID NO: 6732 - protein, 2095 aa, synthetic construct
MPAAKRVKLDGGDKKYSIGLDIGTNSVGWAVITDEYKVPSKKFKVLGNTDRHSIKKNLIGALLFDSGETAEATRLKRTARRRYTRRKNRICYLQEIFSNEMAKVDDSFFHRLEESFLVEEDKKHERHPIFGNIVDEVAYHEKYPTIYHLRKKLVDSTDKADLRLIYLALAHMIKFRGHFLIEGDLNPDNSDVDKLFIQLVQTYNQLFEENPINASGVDAKAILSARLSKSRRLENLIAQLPGEKKNGLFGNLIALSLGLTPNFKSNFDLAEDAKLQLSKDTYDDDLDNLLAQIGDQYADLFLAAKNLSDAILLSDILRVNTEITKAPLSASMIKRYDEHHQDLTLLKALVRQQLPEKYKEIFFDQSKNGYAGYIDGGASQEEFYKFIKPILEKMDGTEELLVKLNREDLLRKQRTFDNGSIPHQIHLGELHAILRRQEDFYPFLKDNREKIEKILTFRIPYYVGPLARGNSRFAWMTRKSEETITPWNFEEVVDKGASAQSFIERMTNFDKNLPNEKVLPKHSLLYEYFTVYNELTKVKYVTEGMRKPAFLSGEQKKAIVDLLFKTNRKVTVKQLKEDYFKKIECFDSVEISGVEDRFNASLGTYHDLLKIIKDKDFLDNEENEDILEDIVLTLTLFEDREMIEERLKTYAHLFDDKVMKQLKRRRYTGWGRLSRKLINGIRDKQSGKTILDFLKSDGFANRNFMQLIHDDSLTFKEDIQKAQVSGQGDSLHEHIANLAGSPAIKKGILQTVKVVDELVKVMGRHKPENIVIEMARENQTTQKGQKNSRERMKRIEEGIKELGSQILKEHPVENTQLQNEKLYLYYLQNGRDMYVDQELDINRLSDYDVDHIVPQSFLKDDSIDNKVLTRSDKARGKSDNVPSEEVVKKMKNYWRQLLNAKLITQRKFDNLTKAERGGLSELDKAGFIKRQLVETRQITKHVAQILDSRMNTKYDENDKLIREVKVITLKSKLVSDFRKDFQFYKVREINNYHHAHDAYLNAVVGTALIKKYPKLESEFVYGDYKVYDVRKMIAKSEQEIGKATAKYFFYSNIMNFFKTEITLANGEIRKRPLIETNGETGEIVWDKGRDFATVRKVLSMPQVNIVKKTEVQTGGFSKESILPKRNSDKLIARKKDWDPKKYGGFDSPTVAYSVLVVAKVEKGKSKKLKSVKELLGITIMERSSFEKNPIDFLEAKGYKEVKKDLIIKLPKYSLFELENGRKRMLASAGELQKGNELALPSKYVNFLYLASHYEKLKGSPEDNEQKQLFVEQHKHYLDEIIEQISEFSKRVILADANLDKVLSAYNKHRDKPIREQAENIIHLFTLTNLGAPAAFKYFDTTIDRKRYTSTKEVLDATLIHQSITGLYETRIDLSQLGGDGGEAAAKGSSGGTAPLEEEYRLFLEAPIQNVTLLEQWKREIPKVWAEINPPGLASTQAPIHVQLLSTALPVRVRQYPITLEAKRSLRETIRKFRAAGILRPVHSPWNTPLLPVRKSGTSEYRMVQDLREVNKRVETIHPTVPNPYTLLSLLPPDRIWYSVLDLKDAFFCIPLAPESQLIFAFEWADAEEGESGQLTWTRLPQGFKNSPTLFNEALNRDLQGFRLDHPSVSLLQYVDDLLIAADTQAACLSATRDLLMTLAELGYRVSGKKAQLCQEEVTYLGFKIHKGSRSLSNSRTQAILQIPVPKTKRQVREFLGTIGYCRLWIPGFAELAQPLYAATRPGNDPLVWGEKEEEAFQSLKLALTQPPALALPSLDKPFQLFVEETSGAAKGVLTQALGPWKRPVAYLSKRLDPVAAGWPRCLRAIAAAALLTREASKLTFGQDIEITSSHNLESLLRSPPDKWLTNARITQYQVLLLDPPRVRFKQTAALNPATLLPETDDTLPIHHCLDTLDSLTSTRPDLTDQPLAQAEATLFTDGSSYIRDGKRYAGAAVVTLDSVIWAEPLPIGTSAQKAELIALTKALEWSKDKSVNIYTDSRYAFATLHVHGMIYRERGWLTAGGKAIKNAPEILALLTAVWLPKRVAVMHCKGHQKDDAPTSTGNRRADEVAREVAIRPLSTQATISAGKRTADGSEFEKRTADGSEFESPKKKAKVE

SEQ ID NO: 6733 - protein, 2095 aa, synthetic construct
MPAAKRVKLDGGDKKYSIGLDIGTNSVGWAVITDEYKVPSKKFKVLGNTDRHSIKKNLIGALLFDSGETAEATRLKRTARRRYTRRKNRICYLQEIFSNEMAKVDDSFFHRLEESFLVEEDKKHERHPIFGNIVDEVAYHEKYPTIYHLRKKLVDSTDKADLRLIYLALAHMIKFRGHFLIEGDLNPDNSDVDKLFIQLVQTYNQLFEENPINASGVDAKAILSARLSKSRRLENLIAQLPGEKKNGLFGNLIALSLGLTPNFKSNFDLAEDAKLQLSKDTYDDDLDNLLAQIGDQYADLFLAAKNLSDAILLSDILRVNTEITKAPLSASMIKRYDEHHQDLTLLKALVRQQLPEKYKEIFFDQSKNGYAGYIDGGASQEEFYKFIKPILEKMDGTEELLVKLNREDLLRKQRTFDNGSIPHQIHLGELHAILRRQEDFYPFLKDNREKIEKILTFRIPYYVGPLARGNSRFAWMTRKSEETITPWNFEEVVDKGASAQSFIERMTNFDKNLPNEKVLPKHSLLYEYFTVYNELTKVKYVTEGMRKPAFLSGEQKKAIVDLLFKTNRKVTVKQLKEDYFKKIECFDSVEISGVEDRFNASLGTYHDLLKIIKDKDFLDNEENEDILEDIVLTLTLFEDREMIEERLKTYAHLFDDKVMKQLKRRRYTGWGRLSRKLINGIRDKQSGKTILDFLKSDGFANRNFMQLIHDDSLTFKEDIQKAQVSGQGDSLHEHIANLAGSPAIKKGILQTVKVVDELVKVMGRHKPENIVIEMARENQTTQKGQKNSRERMKRIEEGIKELGSQILKEHPVENTQLQNEKLYLYYLQNGRDMYVDQELDINRLSDYDVDHIVPQSFLKDDSIDNKVLTRSDKARGKSDNVPSEEVVKKMKNYWRQLLNAKLITQRKFDNLTKAERGGLSELDKAGFIKRQLVETRQITKHVAQILDSRMNTKYDENDKLIREVKVITLKSKLVSDFRKDFQFYKVREINNYHHAHDAYLNAVVGTALIKKYPKLESEFVYGDYKVYDVRKMIAKSEQEIGKATAKYFFYSNIMNFFKTEITLANGEIRKRPLIETNGETGEIVWDKGRDFATVRKVLSMPQVNIVKKTEVQTGGFSKESILPKRNSDKLIARKKDWDPKKYGGFDSPTVAYSVLVVAKVEKGKSKKLKSVKELLGITIMERSSFEKNPIDFLEAKGYKEVKKDLIIKLPKYSLFELENGRKRMLASAGELQKGNELALPSKYVNFLYLASHYEKLKGSPEDNEQKQLFVEQHKHYLDEIIEQISEFSKRVILADANLDKVLSAYNKHRDKPIREQAENIIHLFTLTNLGAPAAFKYFDTTIDRKRYTSTKEVLDATLIHQSITGLYETRIDLSQLGGDGGEAAAKGSSGGTAPLEEEYRLFLEAPIQNVTLLEQWKREIPKVWAEINPPGLASTQAPIHVQLLSTALPVRVRQYPITLEAKRSLRETIRKFRAAGILRPVHSPWNTPLLPVRKSGTSEYRMVQDLREVNKRVETIHPTVPNPYTLLSLLPPDRIWYSVLDLKDAFFCIPLAPESQLIFAFEWADAEEGESGQLTWTRLPQGFKNSPTLFNEALNRDLQGFRLDHPSVSLLQYVDDLLIAADTQAACLSATRDLLMTLAELGYRVSGKKAQLCQEEVTYLGFKIHKGSRSLSNSRTQAILQIPVPKTKRQVREFLGKIGYCRLFIPGFAELAQPLYAATRPGNDPLVWGEKEEEAFQSLKLALTQPPALALPSLDKPFQLFVEETSGAAKGVLTQALGPWKRPVAYLSKRLDPVAAGWPRCLRAIAAAALLTREASKLTFGQDIEITSSHNLESLLRSPPDKWLTNARITQYQVLLLDPPRVRFKQTAALNPATLLPETDDTLPIHHCLDTLDSLTSTRPDLTDQPLAQAEATLFTDGSSYIRDGKRYAGAAVVTLDSVIWAEPLPIGTSAQKAELIALTKALEWSKDKSVNIYTDSRYAFATLHVHGMIYRERGWLTAGGKAIKNAPEILALLTAVWLPKRVAVMHCKGHQKDDAPTSTGNRRADEVAREVAIRPLSTQATISAGKRTADGSEFEKRTADGSEFESPKKKAKVE

SEQ ID NO: 6734 - protein, 2092 aa, synthetic construct
MPAAKRVKLDGGDKKYSIGLDIGTNSVGWAVITDEYKVPSKKFKVLGNTDRHSIKKNLIGALLFDSGETAEATRLKRTARRRYTRRKNRICYLQEIFSNEMAKVDDSFFHRLEESFLVEEDKKHERHPIFGNIVDEVAYHEKYPTIYHLRKKLVDSTDKADLRLIYLALAHMIKFRGHFLIEGDLNPDNSDVDKLFIQLVQTYNQLFEENPINASGVDAKAILSARLSKSRRLENLIAQLPGEKKNGLFGNLIALSLGLTPNFKSNFDLAEDAKLQLSKDTYDDDLDNLLAQIGDQYADLFLAAKNLSDAILLSDILRVNTEITKAPLSASMIKRYDEHHQDLTLLKALVRQQLPEKYKEIFFDQSKNGYAGYIDGGASQEEFYKFIKPILEKMDGTEELLVKLNREDLLRKQRTFDNGSIPHQIHLGELHAILRRQEDFYPFLKDNREKIEKILTFRIPYYVGPLARGNSRFAWMTRKSEETITPWNFEEVVDKGASAQSFIERMTNFDKNLPNEKVLPKHSLLYEYFTVYNELTKVKYVTEGMRKPAFLSGEQKKAIVDLLFKTNRKVTVKQLKEDYFKKIECFDSVEISGVEDRFNASLGTYHDLLKIIKDKDFLDNEENEDILEDIVLTLTLFEDREMIEERLKTYAHLFDDKVMKQLKRRRYTGWGRLSRKLINGIRDKQSGKTILDFLKSDGFANRNFMQLIHDDSLTFKEDIQKAQVSGQGDSLHEHIANLAGSPAIKKGILQTVKVVDELVKVMGRHKPENIVIEMARENQTTQKGQKNSRERMKRIEEGIKELGSQILKEHPVENTQLQNEKLYLYYLQNGRDMYVDQELDINRLSDYDVDHIVPQSFLKDDSIDNKVLTRSDKARGKSDNVPSEEVVKKMKNYWRQLLNAKLITQRKFDNLTKAERGGLSELDKAGFIKRQLVETRQITKHVAQILDSRMNTKYDENDKLIREVKVITLKSKLVSDFRKDFQFYKVREINNYHHAHDAYLNAVVGTALIKKYPKLESEFVYGDYKVYDVRKMIAKSEQEIGKATAKYFFYSNIMNFFKTEITLANGEIRKRPLIETNGETGEIVWDKGRDFATVRKVLSMPQVNIVKKTEVQTGGFSKESILPKRNSDKLIARKKDWDPKKYGGFDSPTVAYSVLVVAKVEKGKSKKLKSVKELLGITIMERSSFEKNPIDFLEAKGYKEVKKDLIIKLPKYSLFELENGRKRMLASAGELQKGNELALPSKYVNFLYLASHYEKLKGSPEDNEQKQLFVEQHKHYLDEIIEQISEFSKRVILADANLDKVLSAYNKHRDKPIREQAENIIHLFTLTNLGAPAAFKYFDTTIDRKRYTSTKEVLDATLIHQSITGLYETRIDLSQLGGDGGEAAAKGSSGGTLQLEEEYRLFEPESTQKQEMDIWLKNFPQAWAETGGMGTAHCQAPVLIQLKATATPISIRQYPMPHEAYQGIKPHIRRMLDQGILKPCQSPWNTPLLPVKKPGTEDYRPVQDLREVNKRVEDIHPTVPNPYNLLSTLPPSHPWYTVLDLKDAFFCLRLHSESQLLFAFEWRDPEIGLSGQLTWTRLPQGFKNSPTLFNEALHSDLADFRVRYPALVLLQYVDDLLLAAATRTECLEGTKALLETLGNKGYRASAKKAQICLQEVTYLGYSLKDGQRWLTKARKEAILSIPVPKNSRQVREFLGKAGYCRLFIPGFAELAAPLYPLTRPGTLFQWGTEQQLAFEDIKKALLSSPALGLPDITKPFELFIDENSGFAKGVLVQKLGPWKRPVAYLSKKLDTVASGWPPCLRMVAAIAILVKDAGKLTLGQPLTILTSHPVEALVRQPPNKWLSNARMTHYQAMLLDAERVHFGPTVSLNPATLLPLPSGGNHHDCLQILAETHGTRPDLTDQPLPDADLTWYTDGSSFIRNGEREAGAAVTTESEVIWAAPLPPGTSAQRAELIALTQALKMAEGKKLTVYTDSRYAFATTHVHGEIYRRRGWLTSEGKEIKNKNEILALLEALFLPKRLSIIHCPGHQKGDSPQAKGNRLADDTAKKAATETHSSLTVLPAGKRTADGSEFEKRTADGSEFESPKKKAKVE

SEQ ID NO: 6735 - protein, 2091 aa, synthetic construct
MPAAKRVKLDGGDKKYSIGLDIGTNSVGWAVITDEYKVPSKKFKVLGNTDRHSIKKNLIGALLFDSGETAEATRLKRTARRRYTRRKNRICYLQEIFSNEMAKVDDSFFHRLEESFLVEEDKKHERHPIFGNIVDEVAYHEKYPTIYHLRKKLVDSTDKADLRLIYLALAHMIKFRGHFLIEGDLNPDNSDVDKLFIQLVQTYNQLFEENPINASGVDAKAILSARLSKSRRLENLIAQLPGEKKNGLFGNLIALSLGLTPNFKSNFDLAEDAKLQLSKDTYDDDLDNLLAQIGDQYADLFLAAKNLSDAILLSDILRVNTEITKAPLSASMIKRYDEHHQDLTLLKALVRQQLPEKYKEIFFDQSKNGYAGYIDGGASQEEFYKFIKPILEKMDGTEELLVKLNREDLLRKQRTFDNGSIPHQIHLGELHAILRRQEDFYPFLKDNREKIEKILTFRIPYYVGPLARGNSRFAWMTRKSEETITPWNFEEVVDKGASAQSFIERMTNFDKNLPNEKVLPKHSLLYEYFTVYNELTKVKYVTEGMRKPAFLSGEQKKAIVDLLFKTNRKVTVKQLKEDYFKKIECFDSVEISGVEDRFNASLGTYHDLLKIIKDKDFLDNEENEDILEDIVLTLTLFEDREMIEERLKTYAHLFDDKVMKQLKRRRYTGWGRLSRKLINGIRDKQSGKTILDFLKSDGFANRNFMQLIHDDSLTFKEDIQKAQVSGQGDSLHEHIANLAGSPAIKKGILQTVKVVDELVKVMGRHKPENIVIEMARENQTTQKGQKNSRERMKRIEEGIKELGSQILKEHPVENTQLQNEKLYLYYLQNGRDMYVDQELDINRLSDYDVDHIVPQSFLKDDSIDNKVLTRSDKARGKSDNVPSEEVVKKMKNYWRQLLNAKLITQRKFDNLTKAERGGLSELDKAGFIKRQLVETRQITKHVAQILDSRMNTKYDENDKLIREVKVITLKSKLVSDFRKDFQFYKVREINNYHHAHDAYLNAVVGTALIKKYPKLESEFVYGDYKVYDVRKMIAKSEQEIGKATAKYFFYSNIMNFFKTEITLANGEIRKRPLIETNGETGEIVWDKGRDFATVRKVLSMPQVNIVKKTEVQTGGFSKESILPKRNSDKLIARKKDWDPKKYGGFDSPTVAYSVLVVAKVEKGKSKKLKSVKELLGITIMERSSFEKNPIDFLEAKGYKEVKKDLIIKLPKYSLFELENGRKRMLASAGELQKGNELALPSKYVNFLYLASHYEKLKGSPEDNEQKQLFVEQHKHYLDEIIEQISEFSKRVILADANLDKVLSAYNKHRDKPIREQAENIIHLFTLTNLGAPAAFKYFDTTIDRKRYTSTKEVLDATLIHQSITGLYETRIDLSQLGGDGGEAAAKGSSGGVLNLEEEYRLHEKPVPSSIDPSWLQLFPTVWAERAGMGLANQVPPVVVELRSGASPVAVRQYPMSKEAREGIRPHIQKFLDLGVLVPCRSPWNTPLLPVKKPGTNDYRPVQDLREINKRVQDIHPTVPNPYNLLSSLPPSYTWYSVLDLKDAFFCLRLHPNSQPLFAFEWKDPEKGNTGQLTWTRLPQGFKNSPTLFNEALHRDLAPFRALNPQVVLLQYVDDLLVAAPTYEDCKKGTQKLLQELSKLGYRVSAKKAQLCQREVTYLGYLLKEGKRWLTPARKATVMKIPVPTTPRQVREFLGKAGFCRLFIPGFASLAAPLYPLTKPSIPFIWTEEHQQAFDHIKKALLSAPALALPDLTKPFTLYIDERAGVARGVLTQTLGPWRRPVAYLSKKLDPVASGWPTCLKAVAAVALLLKDADKLTLGQNVTVIASHSLESIVRQPPDRWMTNARMTHYQSLLLNERVSFAPPAVLNPATLLPVESEATPVHRCSEILAEETGTRRDLEDQPLPGVPTWYTDGSSFITEGKRRAGAPIVDGKRTVWASSLPEGTSAQKAELVALTQALRLAEGKNINIYTDSRYAFATAHIHGAIYKQRGWLTSAGKDIKNKEEILALLEAIHLPRRVAIIHCPGHQRGSNPVATGNRRADEAAKQAALSTRVLAGTTKPAGKRTADGSEFEKRTADGSEFESPKKKAKVE

SEQ ID NO: 6736 - protein, 2215 aa, synthetic construct
MPAAKRVKLDGGDKKYSIGLDIGTNSVGWAVITDEYKVPSKKFKVLGNTDRHSIKKNLIGALLFDSGETAEATRLKRTARRRYTRRKNRICYLQEIFSNEMAKVDDSFFHRLEESFLVEEDKKHERHPIFGNIVDEVAYHEKYPTIYHLRKKLVDSTDKADLRLIYLALAHMIKFRGHFLIEGDLNPDNSDVDKLFIQLVQTYNQLFEENPINASGVDAKAILSARLSKSRRLENLIAQLPGEKKNGLFGNLIALSLGLTPNFKSNFDLAEDAKLQLSKDTYDDDLDNLLAQIGDQYADLFLAAKNLSDAILLSDILRVNTEITKAPLSASMIKRYDEHHQDLTLLKALVRQQLPEKYKEIFFDQSKNGYAGYIDGGASQEEFYKFIKPILEKMDGTEELLVKLNREDLLRKQRTFDNGSIPHQIHLGELHAILRRQEDFYPFLKDNREKIEKILTFRIPYYVGPLARGNSRFAWMTRKSEETITPWNFEEVVDKGASAQSFIERMTNFDKNLPNEKVLPKHSLLYEYFTVYNELTKVKYVTEGMRKPAFLSGEQKKAIVDLLFKTNRKVTVKQLKEDYFKKIECFDSVEISGVEDRFNASLGTYHDLLKIIKDKDFLDNEENEDILEDIVLTLTLFEDREMIEERLKTYAHLFDDKVMKQLKRRRYTGWGRLSRKLINGIRDKQSGKTILDFLKSDGFANRNFMQLIHDDSLTFKEDIQKAQVSGQGDSLHEHIANLAGSPAIKKGILQTVKVVDELVKVMGRHKPENIVIEMARENQTTQKGQKNSRERMKRIEEGIKELGSQILKEHPVENTQLQNEKLYLYYLQNGRDMYVDQELDINRLSDYDVDHIVPQSFLKDDSIDNKVLTRSDKARGKSDNVPSEEVVKKMKNYWRQLLNAKLITQRKFDNLTKAERGGLSELDKAGFIKRQLVETRQITKHVAQILDSRMNTKYDENDKLIREVKVITLKSKLVSDFRKDFQFYKVREINNYHHAHDAYLNAVVGTALIKKYPKLESEFVYGDYKVYDVRKMIAKSEQEIGKATAKYFFYSNIMNFFKTEITLANGEIRKRPLIETNGETGEIVWDKGRDFATVRKVLSMPQVNIVKKTEVQTGGFSKESILPKRNSDKLIARKKDWDPKKYGGFDSPTVAYSVLVVAKVEKGKSKKLKSVKELLGITIMERSSFEKNPIDFLEAKGYKEVKKDLIIKLPKYSLFELENGRKRMLASAGELQKGNELALPSKYVNFLYLASHYEKLKGSPEDNEQKQLFVEQHKHYLDEIIEQISEFSKRVILADANLDKVLSAYNKHRDKPIREQAENIIHLFTLTNLGAPAAFKYFDTTIDRKRYTSTKEVLDATLIHQSITGLYETRIDLSQLGGDGGEAAAKGSSGGTLGDQGSRGSDPLPEPRVTLTVEGIPTEFLVNTGAEHSVLTKPMGKMGSKRTVVAGATGSKVYPWTTKRLLKIGQKQVTHSFLVIPECPAPLLGRDLLTKLKAQIQFSTEGPQVTWEDRPAMCLVLNLEEEYRLHEKPVPPSIDPSWLQLFPMVWAEKAGMGLANQVPPVVVELKSDASPVAVRQYPMSKEAREGIRPHIQRFLDLGILVPCQSPWNTPLLPVKKPGTNDYRPVQDLREVNKRVQDIHPTVPNPYNLLSSLPPSHTWYSVLDLKDAFFCLKLHPNSQPLFAFEWRDPEKGNTGQLTWTRLPQGFKNSPTLFNEALHRDLASFRALNPQVVMLQYVDDLLVAAPTYRDCKEGTRRLLQELSKLGYRVSAKKAQLCREEVTYLGYLLKGGKRWLTPARKATVMKIPTPTTPRQVREFLGKAGFCRLFIPGFASLAAPLYPLTRPKVPFTWTEAHQEAFGRIKEALLSAPALALPDLTKPFALYVDEKEGVARGVLTQTLGPWRRPVAYLSKKLDPVASGWPTCLKAIAAVALLLKDADKLTLGQNVLVIAPHNLESIVRQPPDRWMTNARMTHYQSLLLNERVSFAPPAILNPATLLPVESDDTPIHICSEILAEETGTRPDLRDQPLPGVPAWYTDGSSFIMDGRRQAGAAIVDNKRTVWASNLPEGTSAQKAELIALTQALRLAEGKSINIYTDSRYAFATAHVHGAIYKQRGWLTSAGKDIKNKEEILALLEAIHLPKRVAIIHCPGHQRGTDPVATGNRKADEAAKQAAQSTRILTETTKNAGKRTADGSEFEKRTADGSEFESPKKKAKVE

SEQ ID NO: 6737 - protein, 2093 aa, synthetic construct
MPAAKRVKLDGGDKKYSIGLDIGTNSVGWAVITDEYKVPSKKFKVLGNTDRHSIKKNLIGALLFDSGETAEATRLKRTARRRYTRRKNRICYLQEIFSNEMAKVDDSFFHRLEESFLVEEDKKHERHPIFGNIVDEVAYHEKYPTIYHLRKKLVDSTDKADLRLIYLALAHMIKFRGHFLIEGDLNPDNSDVDKLFIQLVQTYNQLFEENPINASGVDAKAILSARLSKSRRLENLIAQLPGEKKNGLFGNLIALSLGLTPNFKSNFDLAEDAKLQLSKDTYDDDLDNLLAQIGDQYADLFLAAKNLSDAILLSDILRVNTEITKAPLSASMIKRYDEHHQDLTLLKALVRQQLPEKYKEIFFDQSKNGYAGYIDGGASQEEFYKFIKPILEKMDGTEELLVKLNREDLLRKQRTFDNGSIPHQIHLGELHAILRRQEDFYPFLKDNREKIEKILTFRIPYYVGPLARGNSRFAWMTRKSEETITPWNFEEVVDKGASAQSFIERMTNFDKNLPNEKVLPKHSLLYEYFTVYNELTKVKYVTEGMRKPAFLSGEQKKAIVDLLFKTNRKVTVKQLKEDYFKKIECFDSVEISGVEDRFNASLGTYHDLLKIIKDKDFLDNEENEDILEDIVLTLTLFEDREMIEERLKTYAHLFDDKVMKQLKRRRYTGWGRLSRKLINGIRDKQSGKTILDFLKSDGFANRNFMQLIHDDSLTFKEDIQKAQVSGQGDSLHEHIANLAGSPAIKKGILQTVKVVDELVKVMGRHKPENIVIEMARENQTTQKGQKNSRERMKRIEEGIKELGSQILKEHPVENTQLQNEKLYLYYLQNGRDMYVDQELDINRLSDYDVDHIVPQSFLKDDSIDNKVLTRSDKARGKSDNVPSEEVVKKMKNYWRQLLNAKLITQRKFDNLTKAERGGLSELDKAGFIKRQLVETRQITKHVAQILDSRMNTKYDENDKLIREVKVITLKSKLVSDFRKDFQFYKVREINNYHHAHDAYLNAVVGTALIKKYPKLESEFVYGDYKVYDVRKMIAKSEQEIGKATAKYFFYSNIMNFFKTEITLANGEIRKRPLIETNGETGEIVWDKGRDFATVRKVLSMPQVNIVKKTEVQTGGFSKESILPKRNSDKLIARKKDWDPKKYGGFDSPTVAYSVLVVAKVEKGKSKKLKSVKELLGITIMERSSFEKNPIDFLEAKGYKEVKKDLIIKLPKYSLFELENGRKRMLASAGELQKGNELALPSKYVNFLYLASHYEKLKGSPEDNEQKQLFVEQHKHYLDEIIEQISEFSKRVILADANLDKVLSAYNKHRDKPIREQAENIIHLFTLTNLGAPAAFKYFDTTIDRKRYTSTKEVLDATLIHQSITGLYETRIDLSQLGGDGGEAAAKGSSGGTLNLEDEYRLYETSAEPEVSPGSTWLSDFPQAWAETGGMGLAVRQAPLIIPLKATSTPVSIKQYPMSQEAKLGIKPHIQRLLDQGILVPCQSPWNTPLLPVKKPGTNDYRPVQDLREVNKRVEDIHPTVPNPYNLLSGLPPSHRWYTVLDLKDAFFCLRLHPTSQPLFAFEWRDPGMGISGQLTWTRLPQGFKNSPTLFNEALHRDLADFRIQHPDLILLQYVDDILLAATSELDCQQGTRALLLTLGNLGYRASAKKAQLCQKQVKYLGYLLKEGQRWLTEARKETVMGQPTPKTPRQLREFLGTAGFCRLWIPGFAEMAAPLYPLTKPGTLFNWGPDQQKAYQEIKQALLTAPALGLPDLTKPFELFVDEKQGYAKGVLTQKLGPWRRPVAYLSKKLDPVAAGWPPCLRMVAAIAVLRKDAGKLTMGQPLVILAPHAVEALVKQPPDRWLSNARMTHYQAMLLDTDRVQFGPVVALNPATLLPLPEEGAPHDCLEILAETHGTRPDLTDQPIPDADHTWYTDGSSFLQEGQRKAGAAVTTETEVIWARALPAGTSAQRAELIALTQALKMAEGKRLNVYTDSRYAFATAHIHGEIYRRRGWLTSEGREIKNKSEILALLKALFLPKRLSIIHCLGHQKGDSAEARGNRLADQAAREAAIKTPPDTSTLLAGKRTADGSEFEKRTADGSEFESPKKKAKVE

SEQ ID NO: 6738 - protein, 2093 aa, synthetic construct; identical to SEQ ID NO: 4512

SEQ ID NO: 6739 - protein, 2093 aa, synthetic construct
MPAAKRVKLDGGDKKYSIGLDIGTNSVGWAVITDEYKVPSKKFKVLGNTDRHSIKKNLIGALLFDSGETAEATRLKRTARRRYTRRKNRICYLQEIFSNEMAKVDDSFFHRLEESFLVEEDKKHERHPIFGNIVDEVAYHEKYPTIYHLRKKLVDSTDKADLRLIYLALAHMIKFRGHFLIEGDLNPDNSDVDKLFIQLVQTYNQLFEENPINASGVDAKAILSARLSKSRRLENLIAQLPGEKKNGLFGNLIALSLGLTPNFKSNFDLAEDAKLQLSKDTYDDDLDNLLAQIGDQYADLFLAAKNLSDAILLSDILRVNTEITKAPLSASMIKRYDEHHQDLTLLKALVRQQLPEKYKEIFFDQSKNGYAGYIDGGASQEEFYKFIKPILEKMDGTEELLVKLNREDLLRKQRTFDNGSIPHQIHLGELHAILRRQEDFYPFLKDNREKIEKILTFRIPYYVGPLARGNSRFAWMTRKSEETITPWNFEEVVDKGASAQSFIERMTNFDKNLPNEKVLPKHSLLYEYFTVYNELTKVKYVTEGMRKPAFLSGEQKKAIVDLLFKTNRKVTVKQLKEDYFKKIECFDSVEISGVEDRFNASLGTYHDLLKIIKDKDFLDNEENEDILEDIVLTLTLFEDREMIEERLKTYAHLFDDKVMKQLKRRRYTGWGRLSRKLINGIRDKQSGKTILDFLKSDGFANRNFMQLIHDDSLTFKEDIQKAQVSGQGDSLHEHIANLAGSPAIKKGILQTVKVVDELVKVMGRHKPENIVIEMARENQTTQKGQKNSRERMKRIEEGIKELGSQILKEHPVENTQLQNEKLYLYYLQNGRDMYVDQELDINRLSDYDVDHIVPQSFLKDDSIDNKVLTRSDKARGKSDNVPSEEVVKKMKNYWRQLLNAKLITQRKFDNLTKAERGGLSELDKAGFIKRQLVETRQITKHVAQILDSRMNTKYDENDKLIREVKVITLKSKLVSDFRKDFQFYKVREINNYHHAHDAYLNAVVGTALIKKYPKLESEFVYGDYKVYDVRKMIAKSEQEIGKATAKYFFYSNIMNFFKTEITLANGEIRKRPLIETNGETGEIVWDKGRDFATVRKVLSMPQVNIVKKTEVQTGGFSKESILPKRNSDKLIARKKDWDPKKYGGFDSPTVAYSVLVVAKVEKGKSKKLKSVKELLGITIMERSSFEKNPIDFLEAKGYKEVKKDLIIKLPKYSLFELENGRKRMLASAGELQKGNELALPSKYVNFLYLASHYEKLKGSPEDNEQKQLFVEQHKHYLDEIIEQISEFSKRVILADANLDKVLSAYNKHRDKPIREQAENIIHLFTLTNLGAPAAFKYFDTTIDRKRYTSTKEVLDATLIHQSITGLYETRIDLSQLGGDGGEAAAKGSSGGTLGIEDEYRLHETSTEPDVSLGSTWLSDFPQAWAETGGMGLAVRQAPLIIPLKATSTPVSIQQYPMSHEARLGIKPHIQRLLDQGILVPCQSPWNTPLLPVKKPGTNDYRPVQDLREVNKRVEDIHPTVPNPYNLLSGLPPSHQWYTVLDLKDAFFCLRLHPTSQPLFAFEWRDPGMGISGQLTWTRLPQGFKNSPTLFDEALHRDLADFRIQHPDLILLQYVDDILLAATSELDCQQGTRALLQTLGDLGYRASAKKAQICQKQVKYLGYLLREGQRWLTEARKETVMGQPVPKTPRQLREFLGTAGFCRLWIPGFAEMAAPLYPLTKTGTLFSWGPDQQKAYQEIKQALLTAPALGLPDLTKPFELFVDEKQGYAKGVLTQKLGPWRRPVAYLSKKLDPVAAGWPPCLRMVAAIAVLTKDAGKLTMGQPLVILAPHAVEALVKQPPDRWLSNARMTHYQAMLLDTDRVQFGPVVALNPATLLPLPEEGAPHDCLEILAETHGTRPDLTDQPIPDADHTWYTDGSSFLQEGQRKAGAAVTTETEVIWAGALPAGTSAQRAELIALTQALKMAEGKRLNVYTDSRYAFATAHIHGEIYRRRGLLTSEGREIKNKSEILALLKALFLPKRLSIIHCLGHQKGDSAEARGNRLADQAAREAAIKTPPDTSTLLAGKRTADGSEFEKRTADGSEFESPKKKAKVE

SEQ ID NO: 6740 - protein, 2093 aa, synthetic construct
MPAAKRVKLDGGDKKYSIGLDIGTNSVGWAVITDEYKVPSKKFKVLGNTDRHSIKKNLIGALLFDSGETAEATRLKRTARRRYTRRKNRICYLQEIFSNEMAKVDDSFFHRLEESFLVEEDKKHERHPIFGNIVDEVAYHEKYPTIYHLRKKLVDSTDKADLRLIYLALAHMIKFRGHFLIEGDLNPDNSDVDKLFIQLVQTYNQLFEENPINASGVDAKAILSARLSKSRRLENLIAQLPGEKKNGLFGNLIALSLGLTPNFKSNFDLAEDAKLQLSKDTYDDDLDNLLAQIGDQYADLFLAAKNLSDAILLSDILRVNTEITKAPLSASMIKRYDEHHQDLTLLKALVRQQLPEKYKEIFFDQSKNGYAGYIDGGASQEEFYKFIKPILEKMDGTEELLVKLNREDLLRKQRTFDNGSIPHQIHLGELHAILRRQEDFYPFLKDNREKIEKILTFRIPYYVGPLARGNSRFAWMTRKSEETITPWNFEEVVDKGASAQSFIERMTNFDKNLPNEKVLPKHSLLYEYFTVYNELTKVKYVTEGMRKPAFLSGEQKKAIVDLLFKTNRKVTVKQLKEDYFKKIECFDSVEISGVEDRFNASLGTYHDLLKIIKDKDFLDNEENEDILEDIVLTLTLFEDREMIEERLKTYAHLFDDKVMKQLKRRRYTGWGRLSRKLINGIRDKQSGKTILDFLKSDGFANRNFMQLIHDDSLTFKEDIQKAQVSGQGDSLHEHIANLAGSPAIKKGILQTVKVVDELVKVMGRHKPENIVIEMARENQTTQKGQKNSRERMKRIEEGIKELGSQILKEHPVENTQLQNEKLYLYYLQNGRDMYVDQELDINRLSDYDVDHIVPQSFLKDDSIDNKVLTRSDKARGKSDNVPSEEVVKKMKNYWRQLLNAKLITQRKFDNLTKAERGGLSELDKAGFIKRQLVETRQITKHVAQILDSRMNTKYDENDKLIREVKVITLKSKLVSDFRKDFQFYKVREINNYHHAHDAYLNAVVGTALIKKYPKLESEFVYGDYKVYDVRKMIAKSEQEIGKATAKYFFYSNIMNFFKTEITLANGEIRKRPLIETNGETGEIVWDKGRDFATVRKVLSMPQVNIVKKTEVQTGGFSKESILPKRNSDKLIARKKDWDPKKYGGFDSPTVAYSVLVVAKVEKGKSKKLKSVKELLGITIMERSSFEKNPIDFLEAKGYKEVKKDLIIKLPKYSLFELENGRKRMLASAGELQKGNELALPSKYVNFLYLASHYEKLKGSPEDNEQKQLFVEQHKHYLDEIIEQISEFSKRVILADANLDKVLSAYNKHRDKPIREQAENIIHLFTLTNLGAPAAFKYFDTTIDRKRYTSTKEVLDATLIHQSITGLYETRIDLSQLGGDGGEAAAKGSSGGTLNIEDEYRLHEISTEPDVSPGSTWLSDFPQAWAETGGMGLAVRQAPLIIPLKATSTPVSIKQYPMSQEAKLGIKPHIQRLLDQGILVPCQSPWNTPLLPVKKPGTNDYRPVQGLREVNKRVEDIHPTVPNPYNLLSGLPTSHRWYTVLDLKDAFFCLRLHPTSQPLFASEWRDPGMGISGQLTWTRLPQGFKNSPTLFNEALHRGLADFRIQHPDLILLQYVDDLLLAATSELDCQQGTRALLKTLGNLGYRASAKKAQICQKQVKYLGYLLREGQRWLTEARKETVMGQPTPKTPRQLREFLGTAGFCRLWIPRFAEMAAPLYPLTKPGTLFNWGPDQQKAYHEIKQALLTAPALGLPDLTKPFELFVDEKQGYAKGVLTQKLGPWRRPVAYLSKKLDPVAAGWPPCLRMVAAIAVLTKDAGKLTMGQPLVILAPHAVEALVKQPPDRWLSNARMTHYQAMLLDTDRVQFGPVVALNPATLLPLPEEGAPHDCLEILAETHGTEPDLTDQPIPDADHTWYTDGSSFLQEGQRKAGAAVTTETEVIWARALPAGTSAQRAELIALTQALKMAEGKRLNVYTDSRYAFATAHIHGEIYKRRGWLTSEGREIKNKSEILALLKALFLPKRLSIIHCLGHQKGDSAEARGNRLADQAAREAAIKTPPDTSTLLAGKRTADGSEFEKRTADGSEFESPKKKAKVE

SEQ ID NO: 6741 - protein, 2087 aa, synthetic construct
MPAAKRVKLDGGDKKYSIGLDIGTNSVGWAVITDEYKVPSKKFKVLGNTDRHSIKKNLIGALLFDSGETAEATRLKRTARRRYTRRKNRICYLQEIFSNEMAKVDDSFFHRLEESFLVEEDKKHERHPIFGNIVDEVAYHEKYPTIYHLRKKLVDSTDKADLRLIYLALAHMIKFRGHFLIEGDLNPDNSDVDKLFIQLVQTYNQLFEENPINASGVDAKAILSARLSKSRRLENLIAQLPGEKKNGLFGNLIALSLGLTPNFKSNFDLAEDAKLQLSKDTYDDDLDNLLAQIGDQYADLFLAAKNLSDAILLSDILRVNTEITKAPLSASMIKRYDEHHQDLTLLKALVRQQLPEKYKEIFFDQSKNGYAGYIDGGASQEEFYKFIKPILEKMDGTEELLVKLNREDLLRKQRTFDNGSIPHQIHLGELHAILRRQEDFYPFLKDNREKIEKILTFRIPYYVGPLARGNSRFAWMTRKSEETITPWNFEEVVDKGASAQSFIERMTNFDKNLPNEKVLPKHSLLYEYFTVYNELTKVKYVTEGMRKPAFLSGEQKKAIVDLLFKTNRKVTVKQLKEDYFKKIECFDSVEISGVEDRFNASLGTYHDLLKIIKDKDFLDNEENEDILEDIVLTLTLFEDREMIEERLKTYAHLFDDKVMKQLKRRRYTGWGRLSRKLINGIRDKQSGKTILDFLKSDGFANRNFMQLIHDDSLTFKEDIQKAQVSGQGDSLHEHIANLAGSPAIKKGILQTVKVVDELVKVMGRHKPENIVIEMARENQTTQKGQKNSRERMKRIEEGIKELGSQILKEHPVENTQLQNEKLYLYYLQNGRDMYVDQELDINRLSDYDVDHIVPQSFLKDDSIDNKVLTRSDKARGKSDNVPSEEVVKKMKNYWRQLLNAKLITQRKFDNLTKAERGGLSELDKAGFIKRQLVETRQITKHVAQILDSRMNTKYDENDKLIREVKVITLKSKLVSDFRKDFQFYKVREINNYHHAHDAYLNAVVGTALIKKYPKLESEFVYGDYKVYDVRKMIAKSEQEIGKATAKYFFYSNIMNFFKTEITLANGEIRKRPLIETNGETGEIVWDKGRDFATVRKVLSMPQVNIVKKTEVQTGGFSKESILPKRNSDKLIARKKDWDPKKYGGFDSPTVAYSVLVVAKVEKGKSKKLKSVKELLGITIMERSSFEKNPIDFLEAKGYKEVKKDLIIKLPKYSLFELENGRKRMLASAGELQKGNELALPSKYVNFLYLASHYEKLKGSPEDNEQKQLFVEQHKHYLDEIIEQISEFSKRVILADANLDKVLSAYNKHRDKPIREQAENIIHLFTLTNLGAPAAFKYFDTTIDRKRYTSTKEVLDATLIHQSITGLYETRIDLSQLGGDGGEAAAKGSSGGTLQLDDEYRLYSPLVKPDQNIQFWLEQFPQAWAETAGMGLAKQVPPQVIQLKASATPVSVRQYPLSKEAQEGIRPHVQRLIQQGILVPVQSPWNTPLLPVRKPGTNDYRPVQDLREVNKRVQDIHPTVPNPYNLLCALPPQRSWYTVLDLKDAFFCLRLHPTSQPLFAFEWRDPGTGRTGQLTWTRLPQGFKNSPTIFDEALHRDLANFRIQHPQVTLLQYVDDLLLAGATKQDCLEGTKALLLELSDLGYRASAKKAQICRREVTYLGYSLRDGQRWLTEARKKTVVQIPAPTTAKQVREFLGTAGFCRLWIPGFATLAAPLYPLTKEKGEFSWAPEHQKAFDAIKKALLSAPALALPDVTKPFTLYVDERKGVARGVLTQTLGPWRRPVAYLSKKLDPVASGWPVCLKAIAAVAILVKDADKLTLGQNITVIAPHALENIVRQPPDRWMTNARMTHYQSLLLTERVTFAPPAALNPATLLPEETDEPVTHDCHQLLIEETGVRKDLTDIPLTGEVLTWFTDGSSYVVEGKRMAGAAVVDGTRTIWASSLPEGTSAQKAELMALTQALRLAEGKSINIYTDSRYAFATAHVHGAIYKQRGLLTSAGREIKNKEEILSLLEALHLPKRLAIIHCPGHQKAKDPISRGNQMADRVAKQAAQGVNLLAGKRTADGSEFEKRTADGSEFESPKKKAKVE

SEQ ID NO: 6742 - protein, 2014 aa, synthetic construct
MPAAKRVKLDGGDKKYSIGLDIGTNSVGWAVITDEYKVPSKKFKVLGNTDRHSIKKNLIGALLFDSGETAEATRLKRTARRRYTRRKNRICYLQEIFSNEMAKVDDSFFHRLEESFLVEEDKKHERHPIFGNIVDEVAYHEKYPTIYHLRKKLVDSTDKADLRLIYLALAHMIKFRGHFLIEGDLNPDNSDVDKLFIQLVQTYNQLFEENPINASGVDAKAILSARLSKSRRLENLIAQLPGEKKNGLFGNLIALSLGLTPNFKSNFDLAEDAKLQLSKDTYDDDLDNLLAQIGDQYADLFLAAKNLSDAILLSDILRVNTEITKAPLSASMIKRYDEHHQDLTLLKALVRQQLPEKYKEIFFDQSKNGYAGYIDGGASQEEFYKFIKPILEKMDGTEELLVKLNREDLLRKQRTFDNGSIPHQIHLGELHAILRRQEDFYPFLKDNREKIEKILTFRIPYYVGPLARGNSRFAWMTRKSEETITPWNFEEVVDKGASAQSFIERMTNFDKNLPNEKVLPKHSLLYEYFTVYNELTKVKYVTEGMRKPAFLSGEQKKAIVDLLFKTNRKVTVKQLKEDYFKKIECFDSVEISGVEDRFNASLGTYHDLLKIIKDKDFLDNEENEDILEDIVLTLTLFEDREMIEERLKTYAHLFDDKVMKQLKRRRYTGWGRLSRKLINGIRDKQSGKTILDFLKSDGFANRNFMQLIHDDSLTFKEDIQKAQVSGQGDSLHEHIANLAGSPAIKKGILQTVKVVDELVKVMGRHKPENIVIEMARENQTTQKGQKNSRERMKRIEEGIKELGSQILKEHPVENTQLQNEKLYLYYLQNGRDMYVDQELDINRLSDYDVDHIVPQSFLKDDSIDNKVLTRSDKARGKSDNVPSEEVVKKMKNYWRQLLNAKLITQRKFDNLTKAERGGLSELDKAGFIKRQLVETRQITKHVAQILDSRMNTKYDENDKLIREVKVITLKSKLVSDFRKDFQFYKVREINNYHHAHDAYLNAVVGTALIKKYPKLESEFVYGDYKVYDVRKMIAKSEQEIGKATAKYFFYSNIMNFFKTEITLANGEIRKRPLIETNGETGEIVWDKGRDFATVRKVLSMPQVNIVKKTEVQTGGFSKESILPKRNSDKLIARKKDWDPKKYGGFDSPTVAYSVLVVAKVEKGKSKKLKSVKELLGITIMERSSFEKNPIDFLEAKGYKEVKKDLIIKLPKYSLFELENGRKRMLASAGELQKGNELALPSKYVNFLYLASHYEKLKGSPEDNEQKQLFVEQHKHYLDEIIEQISEFSKRVILADANLDKVLSAYNKHRDKPIREQAENIIHLFTLTNLGAPAAFKYFDTTIDRKRYTSTKEVLDATLIHQSITGLYETRIDLSQLGGDGGEAAAKGSSGGPRSRAIDIPVPHADKISWKITDPVWVDQWPLTYEKTLAAIALVQEQLAAGHIEPTNSPWNTPIFIIKKKSGSWRLLQDLRAVNKVMVPMGALQPGLPSPVAPPLNYHKIVIDLKDCFFTIPLHPEDRPYFAFSVPQINFQSPMPRYQWKVLPQGMANSPTLCQKFVAAAIAPVRSQWPEAYILHYMDDILLACDSAEAAKACYAHIISCLTSYGLKIAPDKVQVSEPFSYLGFELHHQQVFTPRVCLKTDHLKTLNDFQKLLGDIQWLRPYLKLPTSALVPLNNILKPDPNPLSVRALTPEAKQSLALINKAIQNQSVQQISYNLPLVLLLLPTPHTPTAVFWQPNGTDPTKNGSPLLWLHLPASPSKVLLTYPSLLAMLIIKGRYTGRQLFGRDPHSIIIPYTQDQLTWLLQTSDEWAIALSSFTGDIDNHYPSDPVIQFAKLHQFIFPKITKCAPIPQATLVFTDGSSNGIAAYVIDNQPISIKSPYLSAQLVELYAILQVFTVLAHQPFNLYTDSAYIAQSVPLLETVPFIKSSTNATPLFSKLQQLILNRQHPFFIGHLRAHLNLPGPLAEGNALADAATQIFPIISDAGKRTADGSEFEKRTADGSEFESPKKKAKVE

SEQ ID NO: 6743 - protein, 2072 aa, synthetic construct
MPAAKRVKLDGGDKKYSIGLDIGTNSVGWAVITDEYKVPSKKFKVLGNTDRHSIKKNLIGALLFDSGETAEATRLKRTARRRYTRRKNRICYLQEIFSNEMAKVDDSFFHRLEESFLVEEDKKHERHPIFGNIVDEVAYHEKYPTIYHLRKKLVDSTDKADLRLIYLALAHMIKFRGHFLIEGDLNPDNSDVDKLFIQLVQTYNQLFEENPINASGVDAKAILSARLSKSRRLENLIAQLPGEKKNGLFGNLIALSLGLTPNFKSNFDLAEDAKLQLSKDTYDDDLDNLLAQIGDQYADLFLAAKNLSDAILLSDILRVNTEITKAPLSASMIKRYDEHHQDLTLLKALVRQQLPEKYKEIFFDQSKNGYAGYIDGGASQEEFYKFIKPILEKMDGTEELLVKLNREDLLRKQRTFDNGSIPHQIHLGELHAILRRQEDFYPFLKDNREKIEKILTFRIPYYVGPLARGNSRFAWMTRKSEETITPWNFEEVVDKGASAQSFIERMTNFDKNLPNEKVLPKHSLLYEYFTVYNELTKVKYVTEGMRKPAFLSGEQKKAIVDLLFKTNRKVTVKQLKEDYFKKIECFDSVEISGVEDRFNASLGTYHDLLKIIKDKDFLDNEENEDILEDIVLTLTLFEDREMIEERLKTYAHLFDDKVMKQLKRRRYTGWGRLSRKLINGIRDKQSGKTILDFLKSDGFANRNFMQLIHDDSLTFKEDIQKAQVSGQGDSLHEHIANLAGSPAIKKGILQTVKVVDELVKVMGRHKPENIVIEMARENQTTQKGQKNSRERMKRIEEGIKELGSQILKEHPVENTQLQNEKLYLYYLQNGRDMYVDQELDINRLSDYDVDHIVPQSFLKDDSIDNKVLTRSDKARGKSDNVPSEEVVKKMKNYWRQLLNAKLITQRKFDNLTKAERGGLSELDKAGFIKRQLVETRQITKHVAQILDSRMNTKYDENDKLIREVKVITLKSKLVSDFRKDFQFYKVREINNYHHAHDAYLNAVVGTALIKKYPKLESEFVYGDYKVYDVRKMIAKSEQEIGKATAKYFFYSNIMNFFKTEITLANGEIRKRPLIETNGETGEIVWDKGRDFATVRKVLSMPQVNIVKKTEVQTGGFSKESILPKRNSDKLIARKKDWDPKKYGGFDSPTVAYSVLVVAKVEKGKSKKLKSVKELLGITIMERSSFEKNPIDFLEAKGYKEVKKDLIIKLPKYSLFELENGRKRMLASAGELQKGNELALPSKYVNFLYLASHYEKLKGSPEDNEQKQLFVEQHKHYLDEIIEQISEFSKRVILADANLDKVLSAYNKHRDKPIREQAENIIHLFTLTNLGAPAAFKYFDTTIDRKRYTSTKEVLDATLIHQSITGLYETRIDLSQLGGDGGEAAAKGSSGGSCQTKNTLNIDEYLLQFPDQLWASLPTDIGRMLVPPITIKIKDNASLPSIRQYPLPKDKTEGLRPLISSLENQGILIKCHSPCNTPIFPIKKAGRDEYRMIHDLRAINNIVAPLTAVVASPTTVLSNLAPSLHWFTVIDLSNAFFSVPIHKDSQYLFAFTFEGHQYTWTVLPQGFIHSPTLFSQALYQSLHKIKFKISSEICIYMDDVLIASKDRDTNLKDTAVMLQHLASEGHKVSKKKLQLCQQEVVYLGQLLTPEGRKILPDRKVTVSQFQQPTTIRQIRAFLGLVGYCRHWIPEFSIHSKFLEKQLKKDTAEPFQLDDQQVEAFNKLKHAITTAPVLVVPDPAKPFQLYTSHSEHASIAVLTQKHAGRTRPIAFLSSKFDAIESGLPPCLKACASIHRSLTQADSFILGAPLIIYTTHAICTLLQRDRSQLVTASRFSKWEADLLRPELTFVACSAVSPAHLYMQSCENNIPPHDCVLLTHTISRPRPDLSDLPIPDPDMTLFSDGSYTTGRGGAAVVMHRPVTDDFIIIHQQPGGASAQTAELLALAAACHLATDKTVNIYTDSRYAYGVVHDFGHLWMHRGFVTSAGTPIKNHKEIEYLLKQIMKPKQVSVIKIEAHTKGVSMEVRGNAAADEAAKNAVFLVQRAGKRTADGSEFEKRTADGSEFESPKKKAKVE

SEQ ID NO: 6744 - protein, 2093 aa, synthetic construct
MPAAKRVKLDGGDKKYSIGLDIGTNSVGWAVITDEYKVPSKKFKVLGNTDRHSIKKNLIGALLFDSGETAEATRLKRTARRRYTRRKNRICYLQEIFSNEMAKVDDSFFHRLEESFLVEEDKKHERHPIFGNIVDEVAYHEKYPTIYHLRKKLVDSTDKADLRLIYLALAHMIKFRGHFLIEGDLNPDNSDVDKLFIQLVQTYNQLFEENPINASGVDAKAILSARLSKSRRLENLIAQLPGEKKNGLFGNLIALSLGLTPNFKSNFDLAEDAKLQLSKDTYDDDLDNLLAQIGDQYADLFLAAKNLSDAILLSDILRVNTEITKAPLSASMIKRYDEHHQDLTLLKALVRQQLPEKYKEIFFDQSKNGYAGYIDGGASQEEFYKFIKPILEKMDGTEELLVKLNREDLLRKQRTFDNGSIPHQIHLGELHAILRRQEDFYPFLKDNREKIEKILTFRIPYYVGPLARGNSRFAWMTRKSEETITPWNFEEVVDKGASAQSFIERMTNFDKNLPNEKVLPKHSLLYEYFTVYNELTKVKYVTEGMRKPAFLSGEQKKAIVDLLFKTNRKVTVKQLKEDYFKKIECFDSVEISGVEDRFNASLGTYHDLLKIIKDKDFLDNEENEDILEDIVLTLTLFEDREMIEERLKTYAHLFDDKVMKQLKRRRYTGWGRLSRKLINGIRDKQSGKTILDFLKSDGFANRNFMQLIHDDSLTFKEDIQKAQVSGQGDSLHEHIANLAGSPAIKKGILQTVKVVDELVKVMGRHKPENIVIEMARENQTTQKGQKNSRERMKRIEEGIKELGSQILKEHPVENTQLQNEKLYLYYLQNGRDMYVDQELDINRLSDYDVDHIVPQSFLKDDSIDNKVLTRSDKARGKSDNVPSEEVVKKMKNYWRQLLNAKLITQRKFDNLTKAERGGLSELDKAGFIKRQLVETRQITKHVAQILDSRMNTKYDENDKLIREVKVITLKSKLVSDFRKDFQFYKVREINNYHHAHDAYLNAVVGTALIKKYPKLESEFVYGDYKVYDVRKMIAKSEQEIGKATAKYFFYSNIMNFFKTEITLANGEIRKRPLIETNGETGEIVWDKGRDFATVRKVLSMPQVNIVKKTEVQTGGFSKESILPKRNSDKLIARKKDWDPKKYGGFDSPTVAYSVLVVAKVEKGKSKKLKSVKELLGITIMERSSFEKNPIDFLEAKGYKEVKKDLIIKLPKYSLFELENGRKRMLASAGELQKGNELALPSKYVNFLYLASHYEKLKGSPEDNEQKQLFVEQHKHYLDEIIEQISEFSKRVILADANLDKVLSAYNKHRDKPIREQAENIIHLFTLTNLGAPAAFKYFDTTIDRKRYTSTKEVLDATLIHQSITGLYETRIDLSQLGGDGGEAAAKGSSGGTLNIEDEYRLHETSKEPDVPLGSTWLSDFPQAWAETGGMGLAVRQAPLIIPLKATSTPVSIKQYPMSQEARLGIKPHIQRLLDQGILVPCQSPWNTPLLPVKKPGTNDYRPVQDLREVNKRVEDIHPTVPNPYNLLSGLPPSHQWYTVLDLKDAFFCLRLHPTSQPLFAFEWRDPEMGISGQLTWTRLPQGFKNSPTLFNEALHRDLADFRIQHPDLILLQYVDDLLLAATSEQDCQRGTRALLQTLGNLGYRASAKKAQICQKQVKYLGYLLKEGQRWLTEARKETVMGQPTPKTPRQLREFLGTAGFCRLWIPGFAEMAAPLYPLTKPGTLFNWGPDQQKAYQEIKQALLTAPALGLPDLTKPFELFVDEKQGYAKGVLTQKLGPWRRPVAYLSKKLDPVAAGWPPCLRMVAAIAVLTKDAGKLTMGQPLVILAPHAVEALVKQPPDRWLSNARMTHYQAMLLDTDRVQFGPVVALNPATLLPLPEKEAPHDCLEILAETHGTRPDLTDQPIPDADYTWYTDGSSFLQEGQRRAGAAVTTETEVIWARALPAGTSAQRAELIALTQALKMAEGKKLNVYTDSRYAFATAHVHGEIYRRRGWLTSEGREIKNKNEILALLKALFLPKRLSIIHCPGHQKGNSAEARGNRMADQAAREAAMKAVLETSTLLAGKRTADGSEFEKRTADGSEFESPKKKAKVE

SEQ ID NO: 6745 - protein, 2093 aa, synthetic construct
MPAAKRVKLDGGDKKYSIGLDIGTNSVGWAVITDEYKVPSKKFKVLGNTDRHSIKKNLIGALLFDSGETAEATRLKRTARRRYTRRKNRICYLQEIFSNEMAKVDDSFFHRLEESFLVEEDKKHERHPIFGNIVDEVAYHEKYPTIYHLRKKLVDSTDKADLRLIYLALAHMIKFRGHFLIEGDLNPDNSDVDKLFIQLVQTYNQLFEENPINASGVDAKAILSARLSKSRRLENLIAQLPGEKKNGLFGNLIALSLGLTPNFKSNFDLAEDAKLQLSKDTYDDDLDNLLAQIGDQYADLFLAAKNLSDAILLSDILRVNTEITKAPLSASMIKRYDEHHQDLTLLKALVRQQLPEKYKEIFFDQSKNGYAGYIDGGASQEEFYKFIKPILEKMDGTEELLVKLNREDLLRKQRTFDNGSIPHQIHLGELHAILRRQEDFYPFLKDNREKIEKILTFRIPYYVGPLARGNSRFAWMTRKSEETITPWNFEEVVDKGASAQSFIERMTNFDKNLPNEKVLPKHSLLYEYFTVYNELTKVKYVTEGMRKPAFLSGEQKKAIVDLLFKTNRKVTVKQLKEDYFKKIECFDSVEISGVEDRFNASLGTYHDLLKIIKDKDFLDNEENEDILEDIVLTLTLFEDREMIEERLKTYAHLFDDKVMKQLKRRRYTGWGRLSRKLINGIRDKQSGKTILDFLKSDGFANRNFMQLIHDDSLTFKEDIQKAQVSGQGDSLHEHIANLAGSPAIKKGILQTVKVVDELVKVMGRHKPENIVIEMARENQTTQKGQKNSRERMKRIEEGIKELGSQILKEHPVENTQLQNEKLYLYYLQNGRDMYVDQELDINRLSDYDVDHIVPQSFLKDDSIDNKVLTRSDKARGKSDNVPSEEVVKKMKNYWRQLLNAKLITQRKFDNLTKAERGGLSELDKAGFIKRQLVETRQITKHVAQILDSRMNTKYDENDKLIREVKVITLKSKLVSDFRKDFQFYKVREINNYHHAHDAYLNAVVGTALIKKYPKLESEFVYGDYKVYDVRKMIAKSEQEIGKATAKYFFYSNIMNFFKTEITLANGEIRKRPLIETNGETGEIVWDKGRDFATVRKVLSMPQVNIVKKTEVQTGGFSKESILPKRNSDKLIARKKDWDPKKYGGFDSPTVAYSVLVVAKVEKGKSKKLKSVKELLGITIMERSSFEKNPIDFLEAKGYKEVKKDLIIKLPKYSLFELENGRKRMLASAGELQKGNELALPSKYVNFLYLASHYEKLKGSPEDNEQKQLFVEQHKHYLDEIIEQISEFSKRVILADANLDKVLSAYNKHRDKPIREQAENIIHLFTLTNLGAPAAFKYFDTTIDRKRYTSTKEVLDATLIHQSITGLYETRIDLSQLGGDGGGSSPAPGGTAPLEEEYRLFLEAPIQNVTLLEQWKREIPKVWAEINPPGLASTQAPIHVQLLSTALPVRVRQYPITLEAKRSLRETIRKFRAAGILRPVHSPWNTPLLPVRKSGTSEYRMVQDLREVNKRVETIHPTVPNPYTLLSLLPPDRIWYSVLDLKDAFFCIPLAPESQLIFAFEWADAEEGESGQLTWTRLPQGFKNSPTLFNEALNRDLQGFRLDHPSVSLLQYVDDLLIAADTQAACLSATRDLLMTLAELGYRVSGKKAQLCQEEVTYLGFKIHKGSRSLSNSRTQAILQIPVPKTKRQVREFLGTIGYCRLWIPGFAELAQPLYAATRPGNDPLVWGEKEEEAFQSLKLALTQPPALALPSLDKPFQLFVEETSGAAKGVLTQALGPWKRPVAYLSKRLDPVAAGWPRCLRAIAAAALLTREASKLTFGQDIEITSSHNLESLLRSPPDKWLTNARITQYQVLLLDPPRVRFKQTAALNPATLLPETDDTLPIHHCLDTLDSLTSTRPDLTDQPLAQAEATLFTDGSSYIRDGKRYAGAAVVTLDSVIWAEPLPIGTSAQKAELIALTKALEWSKDKSVNIYTDSRYAFATLHVHGMIYRERGWLTAGGKAIKNAPEILALLTAVWLPKRVAVMHCKGHQKDDAPTSTGNRRADEVAREVAIRPLSTQATISAGKRTADGSEFEKRTADGSEFESPKKKAKVE

SEQ ID NO: 6746 - protein, 2097 aa, synthetic construct
MPAAKRVKLDGGDKKYSIGLDIGTNSVGWAVITDEYKVPSKKFKVLGNTDRHSIKKNLIGALLFDSGETAEATRLKRTARRRYTRRKNRICYLQEIFSNEMAKVDDSFFHRLEESFLVEEDKKHERHPIFGNIVDEVAYHEKYPTIYHLRKKLVDSTDKADLRLIYLALAHMIKFRGHFLIEGDLNPDNSDVDKLFIQLVQTYNQLFEENPINASGVDAKAILSARLSKSRRLENLIAQLPGEKKNGLFGNLIALSLGLTPNFKSNFDLAEDAKLQLSKDTYDDDLDNLLAQIGDQYADLFLAAKNLSDAILLSDILRVNTEITKAPLSASMIKRYDEHHQDLTLLKALVRQQLPEKYKEIFFDQSKNGYAGYIDGGASQEEFYKFIKPILEKMDGTEELLVKLNREDLLRKQRTFDNGSIPHQIHLGELHAILRRQEDFYPFLKDNREKIEKILTFRIPYYVGPLARGNSRFAWMTRKSEETITPWNFEEVVDKGASAQSFIERMTNFDKNLPNEKVLPKHSLLYEYFTVYNELTKVKYVTEGMRKPAFLSGEQKKAIVDLLFKTNRKVTVKQLKEDYFKKIECFDSVEISGVEDRFNASLGTYHDLLKIIKDKDFLDNEENEDILEDIVLTLTLFEDREMIEERLKTYAHLFDDKVMKQLKRRRYTGWGRLSRKLINGIRDKQSGKTILDFLKSDGFANRNFMQLIHDDSLTFKEDIQKAQVSGQGDSLHEHIANLAGSPAIKKGILQTVKVVDELVKVMGRHKPENIVIEMARENQTTQKGQKNSRERMKRIEEGIKELGSQILKEHPVENTQLQNEKLYLYYLQNGRDMYVDQELDINRLSDYDVDHIVPQSFLKDDSIDNKVLTRSDKARGKSDNVPSEEVVKKMKNYWRQLLNAKLITQRKFDNLTKAERGGLSELDKAGFIKRQLVETRQITKHVAQILDSRMNTKYDENDKLIREVKVITLKSKLVSDFRKDFQFYKVREINNYHHAHDAYLNAVVGTALIKKYPKLESEFVYGDYKVYDVRKMIAKSEQEIGKATAKYFFYSNIMNFFKTEITLANGEIRKRPLIETNGETGEIVWDKGRDFATVRKVLSMPQVNIVKKTEVQTGGFSKESILPKRNSDKLIARKKDWDPKKYGGFDSPTVAYSVLVVAKVEKGKSKKLKSVKELLGITIMERSSFEKNPIDFLEAKGYKEVKKDLIIKLPKYSLFELENGRKRMLASAGELQKGNELALPSKYVNFLYLASHYEKLKGSPEDNEQKQLFVEQHKHYLDEIIEQISEFSKRVILADANLDKVLSAYNKHRDKPIREQAENIIHLFTLTNLGAPAAFKYFDTTIDRKRYTSTKEVLDATLIHQSITGLYETRIDLSQLGGDGGGSSPAPGGTVSLQDEHRLFDIPVTTSLPDVWLQDFPQAWAETGGLGRAKCQAPIIIDLKPTAVPVSIKQYPMSLEAHMGIRQHIIKFLELGVLRPCRSPWNTPLLPVKKPGTQDYRPVQDLREINKRTVDIHPTVPNPYNLLSTLKPDYSWYTVLDLKDAFFCLPLAPQSQELFAFEWKDPERGISGQLTWTRLPQGFKNSPTLFNEALHRDLTDFRTQHPEVTLLQYVDDLLLAAPTKKACTQGTRHLLQELGEKGYRASAKKAQICQTKVTYLGYILSEGKRWLTPGRIETVARIPPPRNPREVREFLGKAGFCRLFIPGFAELAAPLYALTKPSTPFTWQTEHQLAFEALKKALLSAPALGLPDTSKPFTLFLDERQGIAKGVLTQKLGPWKRPVAYLSKKLDPVAAGWPPCLRIMAATAMLVKDSAKLTLGQPLTVITPHTLEAIVRQPPDRWITNARLTHYQALLLDTDRVQFGPPVTLNPATLLPVPENQPSPHDCRQVLAETHGTREDLKDQELPDADHTWYTDGSSYLDSGTRRAGAAVVDGHNTIWAQSLPPGTSAQKAELIALTKALELSKGKKANIYTDSRYAFATAHTHGSIYERRGWLTSEGKEIKNKAEIIALLKALFLPQEVAIIHCPGHQKGQDPVAVGNRQADRVARQAAMAEVLTLATEPDNTSHITAGKRTADGSEFEKRTADGSEFESPKKKAKVE

SEQ ID NO: 6747 - protein, 2082 aa, synthetic construct
MPAAKRVKLDGGDKKYSIGLDIGTNSVGWAVITDEYKVPSKKFKVLGNTDRHSIKKNLIGALLFDSGETAEATRLKRTARRRYTRRKNRICYLQEIFSNEMAKVDDSFFHRLEESFLVEEDKKHERHPIFGNIVDEVAYHEKYPTIYHLRKKLVDSTDKADLRLIYLALAHMIKFRGHFLIEGDLNPDNSDVDKLFIQLVQTYNQLFEENPINASGVDAKAILSARLSKSRRLENLIAQLPGEKKNGLFGNLIALSLGLTPNFKSNFDLAEDAKLQLSKDTYDDDLDNLLAQIGDQYADLFLAAKNLSDAILLSDILRVNTEITKAPLSASMIKRYDEHHQDLTLLKALVRQQLPEKYKEIFFDQSKNGYAGYIDGGASQEEFYKFIKPILEKMDGTEELLVKLNREDLLRKQRTFDNGSIPHQIHLGELHAILRRQEDFYPFLKDNREKIEKILTFRIPYYVGPLARGNSRFAWMTRKSEETITPWNFEEVVDKGASAQSFIERMTNFDKNLPNEKVLPKHSLLYEYFTVYNELTKVKYVTEGMRKPAFLSGEQKKAIVDLLFKTNRKVTVKQLKEDYFKKIECFDSVEISGVEDRFNASLGTYHDLLKIIKDKDFLDNEENEDILEDIVLTLTLFEDREMIEERLKTYAHLFDDKVMKQLKRRRYTGWGRLSRKLINGIRDKQSGKTILDFLKSDGFANRNFMQLIHDDSLTFKEDIQKAQVSGQGDSLHEHIANLAGSPAIKKGILQTVKVVDELVKVMGRHKPENIVIEMARENQTTQKGQKNSRERMKRIEEGIKELGSQILKEHPVENTQLQNEKLYLYYLQNGRDMYVDQELDINRLSDYDVDHIVPQSFLKDDSIDNKVLTRSDKARGKSDNVPSEEVVKKMKNYWRQLLNAKLITQRKFDNLTKAERGGLSELDKAGFIKRQLVETRQITKHVAQILDSRMNTKYDENDKLIREVKVITLKSKLVSDFRKDFQFYKVREINNYHHAHDAYLNAVVGTALIKKYPKLESEFVYGDYKVYDVRKMIAKSEQEIGKATAKYFFYSNIMNFFKTEITLANGEIRKRPLIETNGETGEIVWDKGRDFATVRKVLSMPQVNIVKKTEVQTGGFSKESILPKRNSDKLIARKKDWDPKKYGGFDSPTVAYSVLVVAKVEKGKSKKLKSVKELLGITIMERSSFEKNPIDFLEAKGYKEVKKDLIIKLPKYSLFELENGRKRMLASAGELQKGNELALPSKYVNFLYLASHYEKLKGSPEDNEQKQLFVEQHKHYLDEIIEQISEFSKRVILADANLDKVLSAYNKHRDKPIREQAENIIHLFTLTNLGAPAAFKYFDTTIDRKRYTSTKEVLDATLIHQSITGLYETRIDLSQLGGDGGGSSPAPGGVPWILKKPLELTIKLDLEEQQGTLLNNSILSKKGKEELKQLFEKYSALWQSWENQVGHRRIRPHKIATGTVKPTPQKQYHINPKAKPDIQIVINDLLKQGVLIQKESTMNTPVYPVPKPNGRWRMVLDYRAVNKVTPLIAVQNQHSYGILGSLFKGRYKTTIDLSNGFWAHPIVPEDYWITAFTWQGKQYCWTVLPQGFLNSPGLFTGDVVDLLQGIPNVEVYVDDVYISHDSEKEHLEYLDILFNRLKEAGYIISLKKSNIANSIVDFLGFQITNEGRGLTDTFKEKLENITAPTTLKQLQSILGLLNFARNFIPDFTELIAPLYALIPKSTKNYVPWQIEHSTTLETLITKLNGAEYLQGRKGDKTLIMKVNASYTTGYIRYYNEGEKKPISYVSIVFSKTELKFTELEKLLTTVHKGLLKALDLSMGQNIHVYSPIVSMQNIQKTPQTAKKALASRWLSWLSYLEDPRIRFFYDPQMPALKDLPAVDTGKDNKKHPSNFQHIFYTDGSAITSPTKEGHLNAGMGIVYFINKDGNLQKQQEWSISLGNHTAQFAEIAAFEFALKKCLPLGGNILVVTDSNYVAKAYNEELDVWASNGFVNNRKKPLKHISKWKSVADLKRLRPDVVVTHEPGHQKLDSSPHAYGNNLADQLATQASFKVHAGKRTADGSEFEKRTADGSEFESPKKKAKVE

SEQ ID NO: 6748 - protein, 2090 aa, synthetic construct
MPAAKRVKLDGGDKKYSIGLDIGTNSVGWAVITDEYKVPSKKFKVLGNTDRHSIKKNLIGALLFDSGETAEATRLKRTARRRYTRRKNRICYLQEIFSNEMAKVDDSFFHRLEESFLVEEDKKHERHPIFGNIVDEVAYHEKYPTIYHLRKKLVDSTDKADLRLIYLALAHMIKFRGHFLIEGDLNPDNSDVDKLFIQLVQTYNQLFEENPINASGVDAKAILSARLSKSRRLENLIAQLPGEKKNGLFGNLIALSLGLTPNFKSNFDLAEDAKLQLSKDTYDDDLDNLLAQIGDQYADLFLAAKNLSDAILLSDILRVNTEITKAPLSASMIKRYDEHHQDLTLLKALVRQQLPEKYKEIFFDQSKNGYAGYIDGGASQEEFYKFIKPILEKMDGTEELLVKLNREDLLRKQRTFDNGSIPHQIHLGELHAILRRQEDFYPFLKDNREKIEKILTFRIPYYVGPLARGNSRFAWMTRKSEETITPWNFEEVVDKGASAQSFIERMTNFDKNLPNEKVLPKHSLLYEYFTVYNELTKVKYVTEGMRKPAFLSGEQKKAIVDLLFKTNRKVTVKQLKEDYFKKIECFDSVEISGVEDRFNASLGTYHDLLKIIKDKDFLDNEENEDILEDIVLTLTLFEDREMIEERLKTYAHLFDDKVMKQLKRRRYTGWGRLSRKLINGIRDKQSGKTILDFLKSDGFANRNFMQLIHDDSLTFKEDIQKAQVSGQGDSLHEHIANLAGSPAIKKGILQTVKVVDELVKVMGRHKPENIVIEMARENQTTQKGQKNSRERMKRIEEGIKELGSQILKEHPVENTQLQNEKLYLYYLQNGRDMYVDQELDINRLSDYDVDHIVPQSFLKDDSIDNKVLTRSDKARGKSDNVPSEEVVKKMKNYWRQLLNAKLITQRKFDNLTKAERGGLSELDKAGFIKRQLVETRQITKHVAQILDSRMNTKYDENDKLIREVKVITLKSKLVSDFRKDFQFYKVREINNYHHAHDAYLNAVVGTALIKKYPKLESEFVYGDYKVYDVRKMIAKSEQEIGKATAKYFFYSNIMNFFKTEITLANGEIRKRPLIETNGETGEIVWDKGRDFATVRKVLSMPQVNIVKKTEVQTGGFSKESILPKRNSDKLIARKKDWDPKKYGGFDSPTVAYSVLVVAKVEKGKSKKLKSVKELLGITIMERSSFEKNPIDFLEAKGYKEVKKDLIIKLPKYSLFELENGRKRMLASAGELQKGNELALPSKYVNFLYLASHYEKLKGSPEDNEQKQLFVEQHKHYLDEIIEQISEFSKRVILADANLDKVLSAYNKHRDKPIREQAENIIHLFTLTNLGAPAAFKYFDTTIDRKRYTSTKEVLDATLIHQSITGLYETRIDLSQLGGDGGGSSPAPGGTLQLEEEYRLFEPESTQKQEMDIWLKNFPQAWAETGGMGTAHCQAPVLIQLKATATPISIRQYPMPHEAYQGIKPHIRRMLDQGILKPCQSPWNTPLLPVKKPGTEDYRPVQDLREVNKRVEDIHPTVPNPYNLLSTLPPSHPWYTVLDLKDAFFCLRLHSESQLLFAFEWRDPEIGLSGQLTWTRLPQGFKNSPTLFNEALHSDLADFRVRYPALVLLQYVDDLLLAAATRTECLEGTKALLETLGNKGYRASAKKAQICLQEVTYLGYSLKDGQRWLTKARKEAILSIPVPKNSRQVREFLGTAGYCRLWIPGFAELAAPLYPLTRPGTLFQWGTEQQLAFEDIKKALLSSPALGLPDITKPFELFIDENSGFAKGVLVQKLGPWKRPVAYLSKKLDTVASGWPPCLRMVAAIAILVKDAGKLTLGQPLTILTSHPVEALVRQPPNKWLSNARMTHYQAMLLDAERVHFGPTVSLNPATLLPLPSGGNHHDCLQILAETHGTRPDLTDQPLPDADLTWYTDGSSFIRNGEREAGAAVTTESEVIWAAPLPPGTSAQRAELIALTQALKMAEGKKLTVYTDSRYAFATTHVHGEIYRRRGWLTSEGKEIKNKNEILALLEALFLPKRLSIIHCPGHQKGDSPQAKGNRLADDTAKKAATETHSSLTVLPAGKRTADGSEFEKRTADGSEFESPKKKAKVE

SEQ ID NO: 6749 - protein, 2213 aa, synthetic construct
MPAAKRVKLDGGDKKYSIGLDIGTNSVGWAVITDEYKVPSKKFKVLGNTDRHSIKKNLIGALLFDSGETAEATRLKRTARRRYTRRKNRICYLQEIFSNEMAKVDDSFFHRLEESFLVEEDKKHERHPIFGNIVDEVAYHEKYPTIYHLRKKLVDSTDKADLRLIYLALAHMIKFRGHFLIEGDLNPDNSDVDKLFIQLVQTYNQLFEENPINASGVDAKAILSARLSKSRRLENLIAQLPGEKKNGLFGNLIALSLGLTPNFKSNFDLAEDAKLQLSKDTYDDDLDNLLAQIGDQYADLFLAAKNLSDAILLSDILRVNTEITKAPLSASMIKRYDEHHQDLTLLKALVRQQLPEKYKEIFFDQSKNGYAGYIDGGASQEEFYKFIKPILEKMDGTEELLVKLNREDLLRKQRTFDNGSIPHQIHLGELHAILRRQEDFYPFLKDNREKIEKILTFRIPYYVGPLARGNSRFAWMTRKSEETITPWNFEEVVDKGASAQSFIERMTNFDKNLPNEKVLPKHSLLYEYFTVYNELTKVKYVTEGMRKPAFLSGEQKKAIVDLLFKTNRKVTVKQLKEDYFKKIECFDSVEISGVEDRFNASLGTYHDLLKIIKDKDFLDNEENEDILEDIVLTLTLFEDREMIEERLKTYAHLFDDKVMKQLKRRRYTGWGRLSRKLINGIRDKQSGKTILDFLKSDGFANRNFMQLIHDDSLTFKEDIQKAQVSGQGDSLHEHIANLAGSPAIKKGILQTVKVVDELVKVMGRHKPENIVIEMARENQTTQKGQKNSRERMKRIEEGIKELGSQILKEHPVENTQLQNEKLYLYYLQNGRDMYVDQELDINRLSDYDVDHIVPQSFLKDDSIDNKVLTRSDKARGKSDNVPSEEVVKKMKNYWRQLLNAKLITQRKFDNLTKAERGGLSELDKAGFIKRQLVETRQITKHVAQILDSRMNTKYDENDKLIREVKVITLKSKLVSDFRKDFQFYKVREINNYHHAHDAYLNAVVGTALIKKYPKLESEFVYGDYKVYDVRKMIAKSEQEIGKATAKYFFYSNIMNFFKTEITLANGEIRKRPLIETNGETGEIVWDKGRDFATVRKVLSMPQVNIVKKTEVQTGGFSKESILPKRNSDKLIARKKDWDPKKYGGFDSPTVAYSVLVVAKVEKGKSKKLKSVKELLGITIMERSSFEKNPIDFLEAKGYKEVKKDLIIKLPKYSLFELENGRKRMLASAGELQKGNELALPSKYVNFLYLASHYEKLKGSPEDNEQKQLFVEQHKHYLDEIIEQISEFSKRVILADANLDKVLSAYNKHRDKPIREQAENIIHLFTLTNLGAPAAFKYFDTTIDRKRYTSTKEVLDATLIHQSITGLYETRIDLSQLGGDGGGSSPAPGGTLGDQGSRGSDPLPEPRVTLTVEGIPTEFLVNTGAEHSVLTKPMGKMGSKRTVVAGATGSKVYPWTTKRLLKIGQKQVTHSFLVIPECPAPLLGRDLLTKLKAQIQFSTEGPQVTWEDRPAMCLVLNLEEEYRLHEKPVPPSIDPSWLQLFPMVWAEKAGMGLANQVPPVVVELKSDASPVAVRQYPMSKEAREGIRPHIQRFLDLGILVPCQSPWNTPLLPVKKPGTNDYRPVQDLREVNKRVQDIHPTVPNPYNLLSSLPPSHTWYSVLDLKDAFFCLKLHPNSQPLFAFEWRDPEKGNTGQLTWTRLPQGFKNSPTLFNEALHRDLASFRALNPQVVMLQYVDDLLVAAPTYRDCKEGTRRLLQELSKLGYRVSAKKAQLCREEVTYLGYLLKGGKRWLTPARKATVMKIPTPTTPRQVREFLGTAGFCRLWIPGFASLAAPLYPLTRPKVPFTWTEAHQEAFGRIKEALLSAPALALPDLTKPFALYVDEKEGVARGVLTQTLGPWRRPVAYLSKKLDPVASGWPTCLKAIAAVALLLKDADKLTLGQNVLVIAPHNLESIVRQPPDRWMTNARMTHYQSLLLNERVSFAPPAILNPATLLPVESDDTPIHICSEILAEETGTRPDLRDQPLPGVPAWYTDGSSFIMDGRRQAGAAIVDNKRTVWASNLPEGTSAQKAELIALTQALRLAEGKSINIYTDSRYAFATAHVHGAIYKQRGWLTSAGKDIKNKEEILALLEAIHLPKRVAIIHCPGHQRGTDPVATGNRKADEAAKQAAQSTRILTETTKNAGKRTADGSEFEKRTADGSEFESPKKKAKVE

SEQ ID NO: 6750 - protein, 2091 aa, synthetic construct
MPAAKRVKLDGGDKKYSIGLDIGTNSVGWAVITDEYKVPSKKFKVLGNTDRHSIKKNLIGALLFDSGETAEATRLKRTARRRYTRRKNRICYLQEIFSNEMAKVDDSFFHRLEESFLVEEDKKHERHPIFGNIVDEVAYHEKYPTIYHLRKKLVDSTDKADLRLIYLALAHMIKFRGHFLIEGDLNPDNSDVDKLFIQLVQTYNQLFEENPINASGVDAKAILSARLSKSRRLENLIAQLPGEKKNGLFGNLIALSLGLTPNFKSNFDLAEDAKLQLSKDTYDDDLDNLLAQIGDQYADLFLAAKNLSDAILLSDILRVNTEITKAPLSASMIKRYDEHHQDLTLLKALVRQQLPEKYKEIFFDQSKNGYAGYIDGGASQEEFYKFIKPILEKMDGTEELLVKLNREDLLRKQRTFDNGSIPHQIHLGELHAILRRQEDFYPFLKDNREKIEKILTFRIPYYVGPLARGNSRFAWMTRKSEETITPWNFEEVVDKGASAQSFIERMTNFDKNLPNEKVLPKHSLLYEYFTVYNELTKVKYVTEGMRKPAFLSGEQKKAIVDLLFKTNRKVTVKQLKEDYFKKIECFDSVEISGVEDRFNASLGTYHDLLKIIKDKDFLDNEENEDILEDIVLTLTLFEDREMIEERLKTYAHLFDDKVMKQLKRRRYTGWGRLSRKLINGIRDKQSGKTILDFLKSDGFANRNFMQLIHDDSLTFKEDIQKAQVSGQGDSLHEHIANLAGSPAIKKGILQTVKVVDELVKVMGRHKPENIVIEMARENQTTQKGQKNSRERMKRIEEGIKELGSQILKEHPVENTQLQNEKLYLYYLQNGRDMYVDQELDINRLSDYDVDHIVPQSFLKDDSIDNKVLTRSDKARGKSDNVPSEEVVKKMKNYWRQLLNAKLITQRKFDNLTKAERGGLSELDKAGFIKRQLVETRQITKHVAQILDSRMNTKYDENDKLIREVKVITLKSKLVSDFRKDFQFYKVREINNYHHAHDAYLNAVVGTALIKKYPKLESEFVYGDYKVYDVRKMIAKSEQEIGKATAKYFFYSNIMNFFKTEITLANGEIRKRPLIETNGETGEIVWDKGRDFATVRKVLSMPQVNIVKKTEVQTGGFSKESILPKRNSDKLIARKKDWDPKKYGGFDSPTVAYSVLVVAKVEKGKSKKLKSVKELLGITIMERSSFEKNPIDFLEAKGYKEVKKDLIIKLPKYSLFELENGRKRMLASAGELQKGNELALPSKYVNFLYLASHYEKLKGSPEDNEQKQLFVEQHKHYLDEIIEQISEFSKRVILADANLDKVLSAYNKHRDKPIREQAENIIHLFTLTNLGAPAAFKYFDTTIDRKRYTSTKEVLDATLIHQSITGLYETRIDLSQLGGDGGGSSPAPGGTLGIEDEYRLHETSTEPDVSLGSTWLSDFPQAWAETGGMGLAVRQAPLIIPLKATSTPVSIQQYPMSHEARLGIKPHIQRLLDQGILVPCQSPWNTPLLPVKKPGTNDYRPVQDLREVNKRVEDIHPTVPNPYNLLSGLPPSHQWYTVLDLKDAFFCLRLHPTSQPLFAFEWRDPGMGISGQLTWTRLPQGFKNSPTLFNEALHRDLADFRIQHPDLILLQYVDDILLAATSELDCQQGTRALLQTLGDLGYRASAKKAQICQKQVKYLGYLLREGQRWLTEARKETVMGQPVPKTPRQLREFLGTAGFCRLWIPGFAEMAAPLYPLTKPGTLFSWGPDQQKAYQEIKQALLTAPALGLPDLTKPFELFVDEKQGYAKGVLTQKLGPWRRPVAYLSKKLDPVAAGWPPCLRMVAAIAVLTKDAGKLTMGQPLVILAPHAVEALVKQPPDRWLSNARMTHYQAMLLDTDRVQFGPVVALNPATLLPLPEEGAPHDCLEILAETHGTRPDLTDQPIPDADHTWYTDGSSFLQEGQRKAGAAVTTETEVIWAGALPAGTSAQRAELIALTQALKMAEGKRLNVYTDSRYAFATAHIHGEIYRRRGWLTSEGREIKNKSEILALLKALFLPKRLSIIHCLGHQKGDSAEARGNRLADQAAREAAIKTPPDTSTLLAGKRTADGSEFEKRTADGSEFESPKKKAKVE

SEQ ID NO: 6751 - protein, 2111 aa, synthetic construct
MPAAKRVKLDGGDKKYSIGLDIGTNSVGWAVITDEYKVPSKKFKVLGNTDRHSIKKNLIGALLFDSGETAEATRLKRTARRRYTRRKNRICYLQEIFSNEMAKVDDSFFHRLEESFLVEEDKKHERHPIFGNIVDEVAYHEKYPTIYHLRKKLVDSTDKADLRLIYLALAHMIKFRGHFLIEGDLNPDNSDVDKLFIQLVQTYNQLFEENPINASGVDAKAILSARLSKSRRLENLIAQLPGEKKNGLFGNLIALSLGLTPNFKSNFDLAEDAKLQLSKDTYDDDLDNLLAQIGDQYADLFLAAKNLSDAILLSDILRVNTEITKAPLSASMIKRYDEHHQDLTLLKALVRQQLPEKYKEIFFDQSKNGYAGYIDGGASQEEFYKFIKPILEKMDGTEELLVKLNREDLLRKQRTFDNGSIPHQIHLGELHAILRRQEDFYPFLKDNREKIEKILTFRIPYYVGPLARGNSRFAWMTRKSEETITPWNFEEVVDKGASAQSFIERMTNFDKNLPNEKVLPKHSLLYEYFTVYNELTKVKYVTEGMRKPAFLSGEQKKAIVDLLFKTNRKVTVKQLKEDYFKKIECFDSVEISGVEDRFNASLGTYHDLLKIIKDKDFLDNEENEDILEDIVLTLTLFEDREMIEERLKTYAHLFDDKVMKQLKRRRYTGWGRLSRKLINGIRDKQSGKTILDFLKSDGFANRNFMQLIHDDSLTFKEDIQKAQVSGQGDSLHEHIANLAGSPAIKKGILQTVKVVDELVKVMGRHKPENIVIEMARENQTTQKGQKNSRERMKRIEEGIKELGSQILKEHPVENTQLQNEKLYLYYLQNGRDMYVDQELDINRLSDYDVDHIVPQSFLKDDSIDNKVLTRSDKARGKSDNVPSEEVVKKMKNYWRQLLNAKLITQRKFDNLTKAERGGLSELDKAGFIKRQLVETRQITKHVAQILDSRMNTKYDENDKLIREVKVITLKSKLVSDFRKDFQFYKVREINNYHHAHDAYLNAVVGTALIKKYPKLESEFVYGDYKVYDVRKMIAKSEQEIGKATAKYFFYSNIMNFFKTEITLANGEIRKRPLIETNGETGEIVWDKGRDFATVRKVLSMPQVNIVKKTEVQTGGFSKESILPKRNSDKLIARKKDWDPKKYGGFDSPTVAYSVLVVAKVEKGKSKKLKSVKELLGITIMERSSFEKNPIDFLEAKGYKEVKKDLIIKLPKYSLFELENGRKRMLASAGELQKGNELALPSKYVNFLYLASHYEKLKGSPEDNEQKQLFVEQHKHYLDEIIEQISEFSKRVILADANLDKVLSAYNKHRDKPIREQAENIIHLFTLTNLGAPAAFKYFDTTIDRKRYTSTKEVLDATLIHQSITGLYETRIDLSQLGGDGGGSSPAPGGTLNIEDEYRLHETSKEPDVSLGSTWLSDFPQAWAETGGMGLAVRQAPLIIPLKATSTPVSIKQYPMSQEARLGIKPHIQRLLDQGILVPCQSPWNTPLLPVKKPGTNDYRPVQDLREVNKRVEDIHPTVPNPYNLLSGLPPSHQWYTVLDLKDAFFCLRLHPTSQPLFAFEWRDPEMGISGQLTWTRLPQGFKNSPTLFNEALHRDLADFRIQHPDLILLQYVDDLLLAATSELDCQQGTRALLQTLGNLGYRASAKKAQICQKQVKYLGYLLKEGQRWLTEARKETVMGQPTPKTPRQLREFLGKAGFCRLFIPGFAEMAAPLYPLTKPGTLFNWGPDQQKAYQEIKQALLTAPALGLPDLTKPFELFVDEKQGYAKGVLTQKLGPWRRPVAYLSKKLDPVAAGWPPCLRMVAAIAVLTKDAGKLTMGQPLVILAPHAVEALVKQPPDRWLSNARMTHYQALLLDTDRVQFGPVVALNPATLLPLPEEGLQHNCLDILAEAHGTRPDLTDQPLPDADHTWYTDGSSLLQEGQRKAGAAVTTETEVIWAKALPAGTSAQRAELIALTQALKMAEGKKLNVYTDSRYAFATAHIHGEIYRRRGWLTSEGKEIKNKDEILALLKALFLPKRLSIIHCPGHQKGHSAEARGNRMADQAARKAAITETPDTSTLLIENSSPSGGSKRTADGSEFEAGKRTADGSEFEKRTADGSEFESPKKKAKVE

SEQ ID NO: 6752 - protein, 2111 aa, synthetic construct; identical to SEQ ID NO: 6751

SEQ ID NO: 6753 - protein, 2082 aa, synthetic construct
MPAAKRVKLDGGDKKYSIGLDIGTNSVGWAVITDEYKVPSKKFKVLGNTDRHSIKKNLIGALLFDSGETAEATRLKRTARRRYTRRKNRICYLQEIFSNEMAKVDDSFFHRLEESFLVEEDKKHERHPIFGNIVDEVAYHEKYPTIYHLRKKLVDSTDKADLRLIYLALAHMIKFRGHFLIEGDLNPDNSDVDKLFIQLVQTYNQLFEENPINASGVDAKAILSARLSKSRRLENLIAQLPGEKKNGLFGNLIALSLGLTPNFKSNFDLAEDAKLQLSKDTYDDDLDNLLAQIGDQYADLFLAAKNLSDAILLSDILRVNTEITKAPLSASMIKRYDEHHQDLTLLKALVRQQLPEKYKEIFFDQSKNGYAGYIDGGASQEEFYKFIKPILEKMDGTEELLVKLNREDLLRKQRTFDNGSIPHQIHLGELHAILRRQEDFYPFLKDNREKIEKILTFRIPYYVGPLARGNSRFAWMTRKSEETITPWNFEEVVDKGASAQSFIERMTNFDKNLPNEKVLPKHSLLYEYFTVYNELTKVKYVTEGMRKPAFLSGEQKKAIVDLLFKTNRKVTVKQLKEDYFKKIECFDSVEISGVEDRFNASLGTYHDLLKIIKDKDFLDNEENEDILEDIVLTLTLFEDREMIEERLKTYAHLFDDKVMKQLKRRRYTGWGRLSRKLINGIRDKQSGKTILDFLKSDGFANRNFMQLIHDDSLTFKEDIQKAQVSGQGDSLHEHIANLAGSPAIKKGILQTVKVVDELVKVMGRHKPENIVIEMARENQTTQKGQKNSRERMKRIEEGIKELGSQILKEHPVENTQLQNEKLYLYYLQNGRDMYVDQELDINRLSDYDVDHIVPQSFLKDDSIDNKVLTRSDKARGKSDNVPSEEVVKKMKNYWRQLLNAKLITQRKFDNLTKAERGGLSELDKAGFIKRQLVETRQITKHVAQILDSRMNTKYDENDKLIREVKVITLKSKLVSDFRKDFQFYKVREINNYHHAHDAYLNAVVGTALIKKYPKLESEFVYGDYKVYDVRKMIAKSEQEIGKATAKYFFYSNIMNFFKTEITLANGEIRKRPLIETNGETGEIVWDKGRDFATVRKVLSMPQVNIVKKTEVQTGGFSKESILPKRNSDKLIARKKDWDPKKYGGFDSPTVAYSVLVVAKVEKGKSKKLKSVKELLGITIMERSSFEKNPIDFLEAKGYKEVKKDLIIKLPKYSLFELENGRKRMLASAGELQKGNELALPSKYVNFLYLASHYEKLKGSPEDNEQKQLFVEQHKHYLDEIIEQISEFSKRVILADANLDKVLSAYNKHRDKPIREQAENIIHLFTLTNLGAPAAFKYFDTTIDRKRYTSTKEVLDATLIHQSITGLYETRIDLSQLGGDGGGSSPAPGGIPWLMKKPLQLTTLVPLQEYEERLLKQTMLTGSYKEKLQSLFLKYDALWQHWENQVGHRRIKPHHIATGTVNPRPQKQYPINPKAKASIQTVINDLLKQGVLIQQNSIMNTPVYPVPKPDGKWRMVLDYREVNKTIPLIAAQNQHSAGILSSIFRGKYKTTLDLSNGFWAHSITPESYWLTAFTWLGQQYCWTRLPQGFLNSPALFNADVVDLLKEVPNVQVYVDDIYISHDDPREHLEQLEKVFSLLLNAGYVVSLKKSEIAQHEVEFLGFNITKEGRGLTETFKQKLLNITPPRDLKQLQSILGLLNFARNFIPNFSELVKPLYNIIATAPGKYITWTTDNSQQLQNIISMLNSAENLEERNPEVRLIMKVNTSPSAGYIRFYNEFAKRPIMYLNYVYTKAEVKFTNTEKLLTTIHKGLIKALDLGMGQEILVYSPIVSMTKIQKTPLPERKALPIRWITWMSYLEDPRIQFHYDKTLPELQQVPTVTDDIIAKIKHPSEFSMVFYTDGSAIKHPNVNKSHNAGMGIAQVQFKPEFTVINTWSIPLGDHTAQLAEVAAVEFACKKALKIDGPVLIVTDSFYVAESVNKELPYWQSNGFFNNKKKPLKHVSKWKSIADCIQLKPDIIIIHEKGHQPTASTFHTEGNNLADKLATQGSYVVNAGKRTADGSEFEKRTADGSEFESPKKKAKVE

SEQ ID NO: 6754 - protein, 2091 aa, synthetic construct
MPAAKRVKLDGGDKKYSIGLDIGTNSVGWAVITDEYKVPSKKFKVLGNTDRHSIKKNLIGALLFDSGETAEATRLKRTARRRYTRRKNRICYLQEIFSNEMAKVDDSFFHRLEESFLVEEDKKHERHPIFGNIVDEVAYHEKYPTIYHLRKKLVDSTDKADLRLIYLALAHMIKFRGHFLIEGDLNPDNSDVDKLFIQLVQTYNQLFEENPINASGVDAKAILSARLSKSRRLENLIAQLPGEKKNGLFGNLIALSLGLTPNFKSNFDLAEDAKLQLSKDTYDDDLDNLLAQIGDQYADLFLAAKNLSDAILLSDILRVNTEITKAPLSASMIKRYDEHHQDLTLLKALVRQQLPEKYKEIFFDQSKNGYAGYIDGGASQEEFYKFIKPILEKMDGTEELLVKLNREDLLRKQRTFDNGSIPHQIHLGELHAILRRQEDFYPFLKDNREKIEKILTFRIPYYVGPLARGNSRFAWMTRKSEETITPWNFEEVVDKGASAQSFIERMTNFDKNLPNEKVLPKHSLLYEYFTVYNELTKVKYVTEGMRKPAFLSGEQKKAIVDLLFKTNRKVTVKQLKEDYFKKIECFDSVEISGVEDRFNASLGTYHDLLKIIKDKDFLDNEENEDILEDIVLTLTLFEDREMIEERLKTYAHLFDDKVMKQLKRRRYTGWGRLSRKLINGIRDKQSGKTILDFLKSDGFANRNFMQLIHDDSLTFKEDIQKAQVSGQGDSLHEHIANLAGSPAIKKGILQTVKVVDELVKVMGRHKPENIVIEMARENQTTQKGQKNSRERMKRIEEGIKELGSQILKEHPVENTQLQNEKLYLYYLQNGRDMYVDQELDINRLSDYDVDHIVPQSFLKDDSIDNKVLTRSDKARGKSDNVPSEEVVKKMKNYWRQLLNAKLITQRKFDNLTKAERGGLSELDKAGFIKRQLVETRQITKHVAQILDSRMNTKYDENDKLIREVKVITLKSKLVSDFRKDFQFYKVREINNYHHAHDAYLNAVVGTALIKKYPKLESEFVYGDYKVYDVRKMIAKSEQEIGKATAKYFFYSNIMNFFKTEITLANGEIRKRPLIETNGETGEIVWDKGRDFATVRKVLSMPQVNIVKKTEVQTGGFSKESILPKRNSDKLIARKKDWDPKKYGGFDSPTVAYSVLVVAKVEKGKSKKLKSVKELLGITIMERSSFEKNPIDFLEAKGYKEVKKDLIIKLPKYSLFELENGRKRMLASAGELQKGNELALPSKYVNFLYLASHYEKLKGSPEDNEQKQLFVEQHKHYLDEIIEQISEFSKRVILADANLDKVLSAYNKHRDKPIREQAENIIHLFTLTNLGAPAAFKYFDTTIDRKRYTSTKEVLDATLIHQSITGLYETRIDLSQLGGDGGGSSPAPGGTLNIEDEYRLHETSKEPDVPLGSTWLSDFPQAWAETGGMGLAVRQAPLIIPLKATSTPVSIKQYPMSQEARLGIKPHIQRLLDQGILVPCQSPWNTPLLPVKKPGTNDYRPVQDLREVNKRVEDIHPTVPNPYNLLSGLPPSHQWYTVLDLKDAFFCLRLHPTSQPLFAFEWRDPEMGISGQLTWTRLPQGFKNSPTLFNEALHRDLADFRIQHPDLILLQYVDDLLLAATSEQDCQRGTRALLQTLGNLGYRASAKKAQICQKQVKYLGYLLKEGQRWLTEARKETVMGQPTPKTPRQLREFLGTAGFCRLWIPGFAEMAAPLYPLTKPGTLFNWGPDQQKAYQEIKQALLTAPALGLPDLTKPFELFVDEKQGYAKGVLTQKLGPWRRPVAYLSKKLDPVAAGWPPCLRMVAAIAVLTKDAGKLTMGQPLVILAPHAVEALVKQPPDRWLSNARMTHYQAMLLDTDRVQFGPVVALNPATLLPLPEKEAPHDCLEILAETHGTRPDLTDQPIPDADYTWYTDGSSFLQEGQRRAGAAVTTETEVIWARALPAGTSAQRAELIALTQALKMAEGKKLNVYTDSRYAFATAHVHGEIYRRRGWLTSEGREIKNKNEILALLKALFLPKRLSIIHCPGHQKGNSAEARGNRMADQAAREAAMKAVLETSTLLAGKRTADGSEFEKRTADGSEFESPKKKAKVE

SEQ ID NO: 6755 - protein, 2093 aa, synthetic construct
MPAAKRVKLDGGDKKYSIGLDIGTNSVGWAVITDEYKVPSKKFKVLGNTDRHSIKKNLIGALLFDSGETAEATRLKRTARRRYTRRKNRICYLQEIFSNEMAKVDDSFFHRLEESFLVEEDKKHERHPIFGNIVDEVAYHEKYPTIYHLRKKLVDSTDKADLRLIYLALAHMIKFRGHFLIEGDLNPDNSDVDKLFIQLVQTYNQLFEENPINASGVDAKAILSARLSKSRRLENLIAQLPGEKKNGLFGNLIALSLGLTPNFKSNFDLAEDAKLQLSKDTYDDDLDNLLAQIGDQYADLFLAAKNLSDAILLSDILRVNTEITKAPLSASMIKRYDEHHQDLTLLKALVRQQLPEKYKEIFFDQSKNGYAGYIDGGASQEEFYKFIKPILEKMDGTEELLVKLNREDLLRKQRTFDNGSIPHQIHLGELHAILRRQEDFYPFLKDNREKIEKILTFRIPYYVGPLARGNSRFAWMTRKSEETITPWNFEEVVDKGASAQSFIERMTNFDKNLPNEKVLPKHSLLYEYFTVYNELTKVKYVTEGMRKPAFLSGEQKKAIVDLLFKTNRKVTVKQLKEDYFKKIECFDSVEISGVEDRFNASLGTYHDLLKIIKDKDFLDNEENEDILEDIVLTLTLFEDREMIEERLKTYAHLFDDKVMKQLKRRRYTGWGRLSRKLINGIRDKQSGKTILDFLKSDGFANRNFMQLIHDDSLTFKEDIQKAQVSGQGDSLHEHIANLAGSPAIKKGILQTVKVVDELVKVMGRHKPENIVIEMARENQTTQKGQKNSRERMKRIEEGIKELGSQILKEHPVENTQLQNEKLYLYYLQNGRDMYVDQELDINRLSDYDVDHIVPQSFLKDDSIDNKVLTRSDKARGKSDNVPSEEVVKKMKNYWRQLLNAKLITQRKFDNLTKAERGGLSELDKAGFIKRQLVETRQITKHVAQILDSRMNTKYDENDKLIREVKVITLKSKLVSDFRKDFQFYKVREINNYHHAHDAYLNAVVGTALIKKYPKLESEFVYGDYKVYDVRKMIAKSEQEIGKATAKYFFYSNIMNFFKTEITLANGEIRKRPLIETNGETGEIVWDKGRDFATVRKVLSMPQVNIVKKTEVQTGGFSKESILPKRNSDKLIARKKDWDPKKYGGFDSPTVAYSVLVVAKVEKGKSKKLKSVKELLGITIMERSSFEKNPIDFLEAKGYKEVKKDLIIKLPKYSLFELENGRKRMLASAGELQKGNELALPSKYVNFLYLASHYEKLKGSPEDNEQKQLFVEQHKHYLDEIIEQISEFSKRVILADANLDKVLSAYNKHRDKPIREQAENIIHLFTLTNLGAPAAFKYFDTTIDRKRYTSTKEVLDATLIHQSITGLYETRIDLSQLGGDGGPAPGSSGGTAPLEEEYRLFLEAPIQNVTLLEQWKREIPKVWAEINPPGLASTQAPIHVQLLSTALPVRVRQYPITLEAKRSLRETIRKFRAAGILRPVHSPWNTPLLPVRKSGTSEYRMVQDLREVNKRVETIHPTVPNPYTLLSLLPPDRIWYSVLDLKDAFFCIPLAPESQLIFAFEWADAEEGESGQLTWTRLPQGFKNSPTLFNEALNRDLQGFRLDHPSVSLLQYVDDLLIAADTQAACLSATRDLLMTLAELGYRVSGKKAQLCQEEVTYLGFKIHKGSRSLSNSRTQAILQIPVPKTKRQVREFLGTIGYCRLWIPGFAELAQPLYAATRPGNDPLVWGEKEEEAFQSLKLALTQPPALALPSLDKPFQLFVEETSGAAKGVLTQALGPWKRPVAYLSKRLDPVAAGWPRCLRAIAAAALLTREASKLTFGQDIEITSSHNLESLLRSPPDKWLTNARITQYQVLLLDPPRVRFKQTAALNPATLLPETDDTLPIHHCLDTLDSLTSTRPDLTDQPLAQAEATLFTDGSSYIRDGKRYAGAAVVTLDSVIWAEPLPIGTSAQKAELIALTKALEWSKDKSVNIYTDSRYAFATLHVHGMIYRERGWLTAGGKAIKNAPEILALLTAVWLPKRVAVMHCKGHQKDDAPTSTGNRRADEVAREVAIRPLSTQATISAGKRTADGSEFEKRTADGSEFESPKKKAKVE

SEQ ID NO: 6756 - protein, 2093 aa, synthetic construct
MPAAKRVKLDGGDKKYSIGLDIGTNSVGWAVITDEYKVPSKKFKVLGNTDRHSIKKNLIGALLFDSGETAEATRLKRTARRRYTRRKNRICYLQEIFSNEMAKVDDSFFHRLEESFLVEEDKKHERHPIFGNIVDEVAYHEKYPTIYHLRKKLVDSTDKADLRLIYLALAHMIKFRGHFLIEGDLNPDNSDVDKLFIQLVQTYNQLFEENPINASGVDAKAILSARLSKSRRLENLIAQLPGEKKNGLFGNLIALSLGLTPNFKSNFDLAEDAKLQLSKDTYDDDLDNLLAQIGDQYADLFLAAKNLSDAILLSDILRVNTEITKAPLSASMIKRYDEHHQDLTLLKALVRQQLPEKYKEIFFDQSKNGYAGYIDGGASQEEFYKFIKPILEKMDGTEELLVKLNREDLLRKQRTFDNGSIPHQIHLGELHAILRRQEDFYPFLKDNREKIEKILTFRIPYYVGPLARGNSRFAWMTRKSEETITPWNFEEVVDKGASAQSFIERMTNFDKNLPNEKVLPKHSLLYEYFTVYNELTKVKYVTEGMRKPAFLSGEQKKAIVDLLFKTNRKVTVKQLKEDYFKKIECFDSVEISGVEDRFNASLGTYHDLLKIIKDKDFLDNEENEDILEDIVLTLTLFEDREMIEERLKTYAHLFDDKVMKQLKRRRYTGWGRLSRKLINGIRDKQSGKTILDFLKSDGFANRNFMQLIHDDSLTFKEDIQKAQVSGQGDSLHEHIANLAGSPAIKKGILQTVKVVDELVKVMGRHKPENIVIEMARENQTTQKGQKNSRERMKRIEEGIKELGSQILKEHPVENTQLQNEKLYLYYLQNGRDMYVDQELDINRLSDYDVDHIVPQSFLKDDSIDNKVLTRSDKARGKSDNVPSEEVVKKMKNYWRQLLNAKLITQRKFDNLTKAERGGLSELDKAGFIKRQLVETRQITKHVAQILDSRMNTKYDENDKLIREVKVITLKSKLVSDFRKDFQFYKVREINNYHHAHDAYLNAVVGTALIKKYPKLESEFVYGDYKVYDVRKMIAKSEQEIGKATAKYFFYSNIMNFFKTEITLANGEIRKRPLIETNGETGEIVWDKGRDFATVRKVLSMPQVNIVKKTEVQTGGFSKESILPKRNSDKLIARKKDWDPKKYGGFDSPTVAYSVLVVAKVEKGKSKKLKSVKELLGITIMERSSFEKNPIDFLEAKGYKEVKKDLIIKLPKYSLFELENGRKRMLASAGELQKGNELALPSKYVNFLYLASHYEKLKGSPEDNEQKQLFVEQHKHYLDEIIEQISEFSKRVILADANLDKVLSAYNKHRDKPIREQAENIIHLFTLTNLGAPAAFKYFDTTIDRKRYTSTKEVLDATLIHQSITGLYETRIDLSQLGGDGGPAPGSSGGTAPLEEEYRLFLEAPIQNVTLLEQWKREIPKVWAEINPPGLASTQAPIHVQLLSTALPVRVRQYPITLEAKRSLRETIRKFRAAGILRPVHSPWNTPLLPVRKSGTSEYRMVQDLREVNKRVETIHPTVPNPYTLLSLLPPDRIWYSVLDLKDAFFCIPLAPESQLIFAFEWADAEEGESGQLTWTRLPQGFKNSPTLFNEALNRDLQGFRLDHPSVSLLQYVDDLLIAADTQAACLSATRDLLMTLAELGYRVSGKKAQLCQEEVTYLGFKIHKGSRSLSNSRTQAILQIPVPKTKRQVREFLGKIGYCRLFIPGFAELAQPLYAATRPGNDPLVWGEKEEEAFQSLKLALTQPPALALPSLDKPFQLFVEETSGAAKGVLTQALGPWKRPVAYLSKRLDPVAAGWPRCLRAIAAAALLTREASKLTFGQDIEITSSHNLESLLRSPPDKWLTNARITQYQVLLLDPPRVRFKQTAALNPATLLPETDDTLPIHHCLDTLDSLTSTRPDLTDQPLAQAEATLFTDGSSYIRDGKRYAGAAVVTLDSVIWAEPLPIGTSAQKAELIALTKALEWSKDKSVNIYTDSRYAFATLHVHGMIYRERGWLTAGGKAIKNAPEILALLTAVWLPKRVAVMHCKGHQKDDAPTSTGNRRADEVAREVAIRPLSTQATISAGKRTADGSEFEKRTADGSEFESPKKKAKVE

SEQ ID NO: 6757 - protein, 2090 aa, synthetic construct
MPAAKRVKLDGGDKKYSIGLDIGTNSVGWAVITDEYKVPSKKFKVLGNTDRHSIKKNLIGALLFDSGETAEATRLKRTARRRYTRRKNRICYLQEIFSNEMAKVDDSFFHRLEESFLVEEDKKHERHPIFGNIVDEVAYHEKYPTIYHLRKKLVDSTDKADLRLIYLALAHMIKFRGHFLIEGDLNPDNSDVDKLFIQLVQTYNQLFEENPINASGVDAKAILSARLSKSRRLENLIAQLPGEKKNGLFGNLIALSLGLTPNFKSNFDLAEDAKLQLSKDTYDDDLDNLLAQIGDQYADLFLAAKNLSDAILLSDILRVNTEITKAPLSASMIKRYDEHHQDLTLLKALVRQQLPEKYKEIFFDQSKNGYAGYIDGGASQEEFYKFIKPILEKMDGTEELLVKLNREDLLRKQRTFDNGSIPHQIHLGELHAILRRQEDFYPFLKDNREKIEKILTFRIPYYVGPLARGNSRFAWMTRKSEETITPWNFEEVVDKGASAQSFIERMTNFDKNLPNEKVLPKHSLLYEYFTVYNELTKVKYVTEGMRKPAFLSGEQKKAIVDLLFKTNRKVTVKQLKEDYFKKIECFDSVEISGVEDRFNASLGTYHDLLKIIKDKDFLDNEENEDILEDIVLTLTLFEDREMIEERLKTYAHLFDDKVMKQLKRRRYTGWGRLSRKLINGIRDKQSGKTILDFLKSDGFANRNFMQLIHDDSLTFKEDIQKAQVSGQGDSLHEHIANLAGSPAIKKGILQTVKVVDELVKVMGRHKPENIVIEMARENQTTQKGQKNSRERMKRIEEGIKELGSQILKEHPVENTQLQNEKLYLYYLQNGRDMYVDQELDINRLSDYDVDHIVPQSFLKDDSIDNKVLTRSDKARGKSDNVPSEEVVKKMKNYWRQLLNAKLITQRKFDNLTKAERGGLSELDKAGFIKRQLVETRQITKHVAQILDSRMNTKYDENDKLIREVKVITLKSKLVSDFRKDFQFYKVREINNYHHAHDAYLNAVVGTALIKKYPKLESEFVYGDYKVYDVRKMIAKSEQEIGKATAKYFFYSNIMNFFKTEITLANGEIRKRPLIETNGETGEIVWDKGRDFATVRKVLSMPQVNIVKKTEVQTGGFSKESILPKRNSDKLIARKKDWDPKKYGGFDSPTVAYSVLVVAKVEKGKSKKLKSVKELLGITIMERSSFEKNPIDFLEAKGYKEVKKDLIIKLPKYSLFELENGRKRMLASAGELQKGNELALPSKYVNFLYLASHYEKLKGSPEDNEQKQLFVEQHKHYLDEIIEQISEFSKRVILADANLDKVLSAYNKHRDKPIREQAENIIHLFTLTNLGAPAAFKYFDTTIDRKRYTSTKEVLDATLIHQSITGLYETRIDLSQLGGDGGPAPGSSGGTLQLEEEYRLFEPESTQKQEMDIWLKNFPQAWAETGGMGTAHCQAPVLIQLKATATPISIRQYPMPHEAYQGIKPHIRRMLDQGILKPCQSPWNTPLLPVKKPGTEDYRPVQDLREVNKRVEDIHPTVPNPYNLLSTLPPSHPWYTVLDLKDAFFCLRLHSESQLLFAFEWRDPEIGLSGQLTWTRLPQGFKNSPTLFNEALHSDLADFRVRYPALVLLQYVDDLLLAAATRTECLEGTKALLETLGNKGYRASAKKAQICLQEVTYLGYSLKDGQRWLTKARKEAILSIPVPKNSRQVREFLGTAGYCRLWIPGFAELAAPLYPLTRPGTLFQWGTEQQLAFEDIKKALLSSPALGLPDITKPFELFIDENSGFAKGVLVQKLGPWKRPVAYLSKKLDTVASGWPPCLRMVAAIAILVKDAGKLTLGQPLTILTSHPVEALVRQPPNKWLSNARMTHYQAMLLDAERVHFGPTVSLNPATLLPLPSGGNHHDCLQILAETHGTRPDLTDQPLPDADLTWYTDGSSFIRNGEREAGAAVTTESEVIWAAPLPPGTSAQRAELIALTQALKMAEGKKLTVYTDSRYAFATTHVHGEIYRRRGWLTSEGKEIKNKNEILALLEALFLPKRLSIIHCPGHQKGDSPQAKGNRLADDTAKKAATETHSSLTVLPAGKRTADGSEFEKRTADGSEFESPKKKAKVE

SEQ ID NO: 6758 - protein, 2213 aa, synthetic construct
MPAAKRVKLDGGDKKYSIGLDIGTNSVGWAVITDEYKVPSKKFKVLGNTDRHSIKKNLIGALLFDSGETAEATRLKRTARRRYTRRKNRICYLQEIFSNEMAKVDDSFFHRLEESFLVEEDKKHERHPIFGNIVDEVAYHEKYPTIYHLRKKLVDSTDKADLRLIYLALAHMIKFRGHFLIEGDLNPDNSDVDKLFIQLVQTYNQLFEENPINASGVDAKAILSARLSKSRRLENLIAQLPGEKKNGLFGNLIALSLGLTPNFKSNFDLAEDAKLQLSKDTYDDDLDNLLAQIGDQYADLFLAAKNLSDAILLSDILRVNTEITKAPLSASMIKRYDEHHQDLTLLKALVRQQLPEKYKEIFFDQSKNGYAGYIDGGASQEEFYKFIKPILEKMDGTEELLVKLNREDLLRKQRTFDNGSIPHQIHLGELHAILRRQEDFYPFLKDNREKIEKILTFRIPYYVGPLARGNSRFAWMTRKSEETITPWNFEEVVDKGASAQSFIERMTNFDKNLPNEKVLPKHSLLYEYFTVYNELTKVKYVTEGMRKPAFLSGEQKKAIVDLLFKTNRKVTVKQLKEDYFKKIECFDSVEISGVEDRFNASLGTYHDLLKIIKDKDFLDNEENEDILEDIVLTLTLFEDREMIEERLKTYAHLFDDKVMKQLKRRRYTGWGRLSRKLINGIRDKQSGKTILDFLKSDGFANRNFMQLIHDDSLTFKEDIQKAQVSGQGDSLHEHIANLAGSPAIKKGILQTVKVVDELVKVMGRHKPENIVIEMARENQTTQKGQKNSRERMKRIEEGIKELGSQILKEHPVENTQLQNEKLYLYYLQNGRDMYVDQELDINRLSDYDVDHIVPQSFLKDDSIDNKVLTRSDKARGKSDNVPSEEVVKKMKNYWRQLLNAKLITQRKFDNLTKAERGGLSELDKAGFIKRQLVETRQITKHVAQILDSRMNTKYDENDKLIREVKVITLKSKLVSDFRKDFQFYKVREINNYHHAHDAYLNAVVGTALIKKYPKLESEFVYGDYKVYDVRKMIAKSEQEIGKATAKYFFYSNIMNFFKTEITLANGEIRKRPLIETNGETGEIVWDKGRDFATVRKVLSMPQVNIVKKTEVQTGGFSKESILPKRNSDKLIARKKDWDPKKYGGFDSPTVAYSVLVVAKVEKGKSKKLKSVKELLGITIMERSSFEKNPIDFLEAKGYKEVKKDLIIKLPKYSLFELENGRKRMLASAGELQKGNELALPSKYVNFLYLASHYEKLKGSPEDNEQKQLFVEQHKHYLDEIIEQISEFSKRVILADANLDKVLSAYNKHRDKPIREQAENIIHLFTLTNLGAPAAFKYFDTTIDRKRYTSTKEVLDATLIHQSITGLYETRIDLSQLGGDGGPAPGSSGGTLGDQGSRGSDPLPEPRVTLTVEGIPTEFLVNTGAEHSVLTKPMGKMGSKRTVVAGATGSKVYPWTTKRLLKIGQKQVTHSFLVIPECPAPLLGRDLLTKLKAQIQFSTEGPQVTWEDRPAMCLVLNLEEEYRLHEKPVPPSIDPSWLQLFPMVWAEKAGMGLANQVPPVVVELKSDASPVAVRQYPMSKEAREGIRPHIQRFLDLGILVPCQSPWNTPLLPVKKPGTNDYRPVQDLREVNKRVQDIHPTVPNPYNLLSSLPPSHTWYSVLDLKDAFFCLKLHPNSQPLFAFEWRDPEKGNTGQLTWTRLPQGFKNSPTLFNEALHRDLASFRALNPQVVMLQYVDDLLVAAPTYRDCKEGTRRLLQELSKLGYRVSAKKAQLCREEVTYLGYLLKGGKRWLTPARKATVMKIPTPTTPRQVREFLGTAGFCRLWIPGFASLAAPLYPLTRPKVPFTWTEAHQEAFGRIKEALLSAPALALPDLTKPFALYVDEKEGVARGVLTQTLGPWRRPVAYLSKKLDPVASGWPTCLKAIAAVALLLKDADKLTLGQNVLVIAPHNLESIVRQPPDRWMTNARMTHYQSLLLNERVSFAPPAILNPATLLPVESDDTPIHICSEILAEETGTRPDLRDQPLPGVPAWYTDGSSFIMDGRRQAGAAIVDNKRTVWASNLPEGTSAQKAELIALTQALRLAEGKSINIYTDSRYAFATAHVHGAIYKQRGWLTSAGKDIKNKEEILALLEAIHLPKRVAIIHCPGHQRGTDPVATGNRKADEAAKQAAQSTRILTETTKNAGKRTADGSEFEKRTADGSEFESPKKKAKVE

SEQ ID NO: 6759 - protein, 2091 aa, synthetic construct
MPAAKRVKLDGGDKKYSIGLDIGTNSVGWAVITDEYKVPSKKFKVLGNTDRHSIKKNLIGALLFDSGETAEATRLKRTARRRYTRRKNRICYLQEIFSNEMAKVDDSFFHRLEESFLVEEDKKHERHPIFGNIVDEVAYHEKYPTIYHLRKKLVDSTDKADLRLIYLALAHMIKFRGHFLIEGDLNPDNSDVDKLFIQLVQTYNQLFEENPINASGVDAKAILSARLSKSRRLENLIAQLPGEKKNGLFGNLIALSLGLTPNFKSNFDLAEDAKLQLSKDTYDDDLDNLLAQIGDQYADLFLAAKNLSDAILLSDILRVNTEITKAPLSASMIKRYDEHHQDLTLLKALVRQQLPEKYKEIFFDQSKNGYAGYIDGGASQEEFYKFIKPILEKMDGTEELLVKLNREDLLRKQRTFDNGSIPHQIHLGELHAILRRQEDFYPFLKDNREKIEKILTFRIPYYVGPLARGNSRFAWMTRKSEETITPWNFEEVVDKGASAQSFIERMTNFDKNLPNEKVLPKHSLLYEYFTVYNELTKVKYVTEGMRKPAFLSGEQKKAIVDLLFKTNRKVTVKQLKEDYFKKIECFDSVEISGVEDRFNASLGTYHDLLKIIKDKDFLDNEENEDILEDIVLTLTLFEDREMIEERLKTYAHLFDDKVMKQLKRRRYTGWGRLSRKLINGIRDKQSGKTILDFLKSDGFANRNFMQLIHDDSLTFKEDIQKAQVSGQGDSLHEHIANLAGSPAIKKGILQTVKVVDELVKVMGRHKPENIVIEMARENQTTQKGQKNSRERMKRIEEGIKELGSQILKEHPVENTQLQNEKLYLYYLQNGRDMYVDQELDINRLSDYDVDHIVPQSFLKDDSIDNKVLTRSDKARGKSDNVPSEEVVKKMKNYWRQLLNAKLITQRKFDNLTKAERGGLSELDKAGFIKRQLVETRQITKHVAQILDSRMNTKYDENDKLIREVKVITLKSKLVSDFRKDFQFYKVREINNYHHAHDAYLNAVVGTALIKKYPKLESEFVYGDYKVYDVRKMIAKSEQEIGKATAKYFFYSNIMNFFKTEITLANGEIRKRPLIETNGETGEIVWDKGRDFATVRKVLSMPQVNIVKKTEVQTGGFSKESILPKRNSDKLIARKKDWDPKKYGGFDSPTVAYSVLVVAKVEKGKSKKLKSVKELLGITIMERSSFEKNPIDFLEAKGYKEVKKDLIIKLPKYSLFELENGRKRMLASAGELQKGNELALPSKYVNFLYLASHYEKLKGSPEDNEQKQLFVEQHKHYLDEIIEQISEFSKRVILADANLDKVLSAYNKHRDKPIREQAENIIHLFTLTNLGAPAAFKYFDTTIDRKRYTSTKEVLDATLIHQSITGLYETRIDLSQLGGDGGPAPGSSGGTLNLEDEYRLYETSAEPEVSPGSTWLSDFPQAWAETGGMGLAVRQAPLIIPLKATSTPVSIKQYPMSQEAKLGIKPHIQRLLDQGILVPCQSPWNTPLLPVKKPGTNDYRPVQDLREVNKRVEDIHPTVPNPYNLLSGLPPSHRWYTVLDLKDAFFCLRLHPTSQPLFAFEWRDPGMGISGQLTWTRLPQGFKNSPTLFNEALHRDLADFRIQHPDLILLQYVDDILLAATSELDCQQGTRALLLTLGNLGYRASAKKAQLCQKQVKYLGYLLKEGQRWLTEARKETVMGQPTPKTPRQLREFLGTAGFCRLWIPGFAEMAAPLYPLTKPGTLFNWGPDQQKAYQEIKQALLTAPALGLPDLTKPFELFVDEKQGYAKGVLTQKLGPWRRPVAYLSKKLDPVAAGWPPCLRMVAAIAVLRKDAGKLTMGQPLVILAPHAVEALVKQPPDRWLSNARMTHYQAMLLDTDRVQFGPVVALNPATLLPLPEEGAPHDCLEILAETHGTRPDLTDQPIPDADHTWYTDGSSFLQEGQRKAGAAVTTETEVIWARALPAGTSAQRAELIALTQALKMAEGKRLNVYTDSRYAFATAHIHGEIYRRRGWLTSEGREIKNKSEILALLKALFLPKRLSIIHCLGHQKGDSAEARGNRLADQAAREAAIKTPPDTSTLLAGKRTADGSEFEKRTADGSEFESPKKKAKVE

SEQ ID NO: 6760 - protein, 2091 aa, synthetic construct; identical to SEQ ID NO: 4513

SEQ ID NO: 6761 - protein, 2091 aa, synthetic construct; identical to SEQ ID NO: 4513

SEQ ID NO: 6762 - protein, 2082 aa, synthetic construct
MPAAKRVKLDGGDKKYSIGLDIGTNSVGWAVITDEYKVPSKKFKVLGNTDRHSIKKNLIGALLFDSGETAEATRLKRTARRRYTRRKNRICYLQEIFSNEMAKVDDSFFHRLEESFLVEEDKKHERHPIFGNIVDEVAYHEKYPTIYHLRKKLVDSTDKADLRLIYLALAHMIKFRGHFLIEGDLNPDNSDVDKLFIQLVQTYNQLFEENPINASGVDAKAILSARLSKSRRLENLIAQLPGEKKNGLFGNLIALSLGLTPNFKSNFDLAEDAKLQLSKDTYDDDLDNLLAQIGDQYADLFLAAKNLSDAILLSDILRVNTEITKAPLSASMIKRYDEHHQDLTLLKALVRQQLPEKYKEIFFDQSKNGYAGYIDGGASQEEFYKFIKPILEKMDGTEELLVKLNREDLLRKQRTFDNGSIPHQIHLGELHAILRRQEDFYPFLKDNREKIEKILTFRIPYYVGPLARGNSRFAWMTRKSEETITPWNFEEVVDKGASAQSFIERMTNFDKNLPNEKVLPKHSLLYEYFTVYNELTKVKYVTEGMRKPAFLSGEQKKAIVDLLFKTNRKVTVKQLKEDYFKKIECFDSVEISGVEDRFNASLGTYHDLLKIIKDKDFLDNEENEDILEDIVLTLTLFEDREMIEERLKTYAHLFDDKVMKQLKRRRYTGWGRLSRKLINGIRDKQSGKTILDFLKSDGFANRNFMQLIHDDSLTFKEDIQKAQVSGQGDSLHEHIANLAGSPAIKKGILQTVKVVDELVKVMGRHKPENIVIEMARENQTTQKGQKNSRERMKRIEEGIKELGSQILKEHPVENTQLQNEKLYLYYLQNGRDMYVDQELDINRLSDYDVDHIVPQSFLKDDSIDNKVLTRSDKARGKSDNVPSEEVVKKMKNYWRQLLNAKLITQRKFDNLTKAERGGLSELDKAGFIKRQLVETRQITKHVAQILDSRMNTKYDENDKLIREVKVITLKSKLVSDFRKDFQFYKVREINNYHHAHDAYLNAVVGTALIKKYPKLESEFVYGDYKVYDVRKMIAKSEQEIGKATAKYFFYSNIMNFFKTEITLANGEIRKRPLIETNGETGEIVWDKGRDFATVRKVLSMPQVNIVKKTEVQTGGFSKESILPKRNSDKLIARKKDWDPKKYGGFDSPTVAYSVLVVAKVEKGKSKKLKSVKELLGITIMERSSFEKNPIDFLEAKGYKEVKKDLIIKLPKYSLFELENGRKRMLASAGELQKGNELALPSKYVNFLYLASHYEKLKGSPEDNEQKQLFVEQHKHYLDEIIEQISEFSKRVILADANLDKVLSAYNKHRDKPIREQAENIIHLFTLTNLGAPAAFKYFDTTIDRKRYTSTKEVLDATLIHQSITGLYETRIDLSQLGGDGGPAPGSSGGIPWLMKKPLQLTTLVPLQEYEERLLKQTMLTGSYKEKLQSLFLKYDALWQHWENQVGHRRIKPHHIATGTVNPRPQKQYPINPKAKASIQTVINDLLKQGVLIQQNSIMNTPVYPVPKPDGKWRMVLDYREVNKTIPLIAAQNQHSAGILSSIFRGKYKTTLDLSNGFWAHSITPESYWLTAFTWLGQQYCWTRLPQGFLNSPALFNADVVDLLKEVPNVQVYVDDIYISHDDPREHLEQLEKVFSLLLNAGYVVSLKKSEIAQHEVEFLGFNITKEGRGLTETFKQKLLNITPPRDLKQLQSILGKLNFARNFIPNFSELVKPLYNIIATAPGKYITWTTDNSQQLQNIISMLNSAENLEERNPEVRLIMKVNTSPSAGYIRFYNEFAKRPIMYLNYVYTKAEVKFTNTEKLLTTIHKGLIKALDLGMGQEILVYSPIVSMTKIQKTPLPERKALPIRWITWMSYLEDPRIQFHYDKTLPELQQVPTVTDDIIAKIKHPSEFSMVFYTDGSAIKHPNVNKSHNAGMGIAQVQFKPEFTVINTWSIPLGDHTAQLAEVAAVEFACKKALKIDGPVLIVTDSFYVAESVNKELPYWQSNGFFNNKKKPLKHVSKWKSIADCIQLKPDIIIIHEKGHQPTASTFHTEGNNLADKLATQGSYVVNAGKRTADGSEFEKRTADGSEFESPKKKAKVE

SEQ ID NO: 6763 - protein, 2012 aa, synthetic construct
MPAAKRVKLDGGDKKYSIGLDIGTNSVGWAVITDEYKVPSKKFKVLGNTDRHSIKKNLIGALLFDSGETAEATRLKRTARRRYTRRKNRICYLQEIFSNEMAKVDDSFFHRLEESFLVEEDKKHERHPIFGNIVDEVAYHEKYPTIYHLRKKLVDSTDKADLRLIYLALAHMIKFRGHFLIEGDLNPDNSDVDKLFIQLVQTYNQLFEENPINASGVDAKAILSARLSKSRRLENLIAQLPGEKKNGLFGNLIALSLGLTPNFKSNFDLAEDAKLQLSKDTYDDDLDNLLAQIGDQYADLFLAAKNLSDAILLSDILRVNTEITKAPLSASMIKRYDEHHQDLTLLKALVRQQLPEKYKEIFFDQSKNGYAGYIDGGASQEEFYKFIKPILEKMDGTEELLVKLNREDLLRKQRTFDNGSIPHQIHLGELHAILRRQEDFYPFLKDNREKIEKILTFRIPYYVGPLARGNSRFAWMTRKSEETITPWNFEEVVDKGASAQSFIERMTNFDKNLPNEKVLPKHSLLYEYFTVYNELTKVKYVTEGMRKPAFLSGEQKKAIVDLLFKTNRKVTVKQLKEDYFKKIECFDSVEISGVEDRFNASLGTYHDLLKIIKDKDFLDNEENEDILEDIVLTLTLFEDREMIEERLKTYAHLFDDKVMKQLKRRRYTGWGRLSRKLINGIRDKQSGKTILDFLKSDGFANRNFMQLIHDDSLTFKEDIQKAQVSGQGDSLHEHIANLAGSPAIKKGILQTVKVVDELVKVMGRHKPENIVIEMARENQTTQKGQKNSRERMKRIEEGIKELGSQILKEHPVENTQLQNEKLYLYYLQNGRDMYVDQELDINRLSDYDVDHIVPQSFLKDDSIDNKVLTRSDKARGKSDNVPSEEVVKKMKNYWRQLLNAKLITQRKFDNLTKAERGGLSELDKAGFIKRQLVETRQITKHVAQILDSRMNTKYDENDKLIREVKVITLKSKLVSDFRKDFQFYKVREINNYHHAHDAYLNAVVGTALIKKYPKLESEFVYGDYKVYDVRKMIAKSEQEIGKATAKYFFYSNIMNFFKTEITLANGEIRKRPLIETNGETGEIVWDKGRDFATVRKVLSMPQVNIVKKTEVQTGGFSKESILPKRNSDKLIARKKDWDPKKYGGFDSPTVAYSVLVVAKVEKGKSKKLKSVKELLGITIMERSSFEKNPIDFLEAKGYKEVKKDLIIKLPKYSLFELENGRKRMLASAGELQKGNELALPSKYVNFLYLASHYEKLKGSPEDNEQKQLFVEQHKHYLDEIIEQISEFSKRVILADANLDKVLSAYNKHRDKPIREQAENIIHLFTLTNLGAPAAFKYFDTTIDRKRYTSTKEVLDATLIHQSITGLYETRIDLSQLGGDGGPAPGSSGGPRSRAIDIPVPHADKISWKITDPVWVDQWPLTYEKTLAAIALVQEQLAAGHIEPTNSPWNTPIFIIKKKSGSWRLLQDLRAVNKVMVPMGALQPGLPSPVAIPLNYHKIVIDLKDCFFTIPLHPEDRPYFAFSVPQINFQSPMPRYQWKVLPQGMANSPTLCQKFVAAAIAPVRSQWPEAYILHYMDDILLACDSAEAAKACYAHIISCLTSYGLKIAPDKVQVSEPFSYLGFELHHQQVFTPRVCLKTDHLKTLNDFQKLLGDIQWLRPYLKLPTSALVPLNNILKPDPNPLSVRALTPEAKQSLALINKAIQNQSVQQISYNLPLVLLLLPTPHTPTAVFWQPNGTDPTKNGSPLLWLHLPASPSKVLLTYPSLLAMLIIKGRYTGRQLFGRDPHSIIIPYTQDQLTWLLQTSDEWAIALSSFTGDIDNHYPSDPVIQFAKLHQFIFPKITKCAPIPQATLVFTDGSSNGIAAYVIDNQPISIKSPYLSAQLVELYAILQVFTVLAHQPFNLYTDSAYIAQSVPLLETVPFIKSSTNATPLFSKLQQLILNRQHPFFIGHLRAHLNLPGPLAEGNALADAATQIFPIISDAGKRTADGSEFEKRTADGSEFESPKKKAKVE

SEQ ID NO: 6764 - protein, 2091 aa, synthetic construct
MPAAKRVKLDGGDKKYSIGLDIGTNSVGWAVITDEYKVPSKKFKVLGNTDRHSIKKNLIGALLFDSGETAEATRLKRTARRRYTRRKNRICYLQEIFSNEMAKVDDSFFHRLEESFLVEEDKKHERHPIFGNIVDEVAYHEKYPTIYHLRKKLVDSTDKADLRLIYLALAHMIKFRGHFLIEGDLNPDNSDVDKLFIQLVQTYNQLFEENPINASGVDAKAILSARLSKSRRLENLIAQLPGEKKNGLFGNLIALSLGLTPNFKSNFDLAEDAKLQLSKDTYDDDLDNLLAQIGDQYADLFLAAKNLSDAILLSDILRVNTEITKAPLSASMIKRYDEHHQDLTLLKALVRQQLPEKYKEIFFDQSKNGYAGYIDGGASQEEFYKFIKPILEKMDGTEELLVKLNREDLLRKQRTFDNGSIPHQIHLGELHAILRRQEDFYPFLKDNREKIEKILTFRIPYYVGPLARGNSRFAWMTRKSEETITPWNFEEVVDKGASAQSFIERMTNFDKNLPNEKVLPKHSLLYEYFTVYNELTKVKYVTEGMRKPAFLSGEQKKAIVDLLFKTNRKVTVKQLKEDYFKKIECFDSVEISGVEDRFNASLGTYHDLLKIIKDKDFLDNEENEDILEDIVLTLTLFEDREMIEERLKTYAHLFDDKVMKQLKRRRYTGWGRLSRKLINGIRDKQSGKTILDFLKSDGFANRNFMQLIHDDSLTFKEDIQKAQVSGQGDSLHEHIANLAGSPAIKKGILQTVKVVDELVKVMGRHKPENIVIEMARENQTTQKGQKNSRERMKRIEEGIKELGSQILKEHPVENTQLQNEKLYLYYLQNGRDMYVDQELDINRLSDYDVDHIVPQSFLKDDSIDNKVLTRSDKARGKSDNVPSEEVVKKMKNYWRQLLNAKLITQRKFDNLTKAERGGLSELDKAGFIKRQLVETRQITKHVAQILDSRMNTKYDENDKLIREVKVITLKSKLVSDFRKDFQFYKVREINNYHHAHDAYLNAVVGTALIKKYPKLESEFVYGDYKVYDVRKMIAKSEQEIGKATAKYFFYSNIMNFFKTEITLANGEIRKRPLIETNGETGEIVWDKGRDFATVRKVLSMPQVNIVKKTEVQTGGFSKESILPKRNSDKLIARKKDWDPKKYGGFDSPTVAYSVLVVAKVEKGKSKKLKSVKELLGITIMERSSFEKNPIDFLEAKGYKEVKKDLIIKLPKYSLFELENGRKRMLASAGELQKGNELALPSKYVNFLYLASHYEKLKGSPEDNEQKQLFVEQHKHYLDEIIEQISEFSKRVILADANLDKVLSAYNKHRDKPIREQAENIIHLFTLTNLGAPAAFKYFDTTIDRKRYTSTKEVLDATLIHQSITGLYETRIDLSQLGGDGGPAPGSSGGTLNIEDEYRLHETSKEPDVPLGSTWLSDFPQAWAETGGMGLAVRQAPLIIPLKATSTPVSIKQYPMSQEARLGIKPHIQRLLDQGILVPCQSPWNTPLLPVKKPGTNDYRPVQDLREVNKRVEDIHPTVPNPYNLLSGLPPSHQWYTVLDLKDAFFCLRLHPTSQPLFAFEWRDPEMGISGQLTWTRLPQGFKNSPTLFNEALHRDLADFRIQHPDLILLQYVDDLLLAATSEQDCQRGTRALLQTLGNLGYRASAKKAQICQKQVKYLGYLLKEGQRWLTEARKETVMGQPTPKTPRQLREFLGKAGFCRLFIPGFAEMAAPLYPLTKPGTLFNWGPDQQKAYQEIKQALLTAPALGLPDLTKPFELFVDEKQGYAKGVLTQKLGPWRRPVAYLSKKLDPVAAGWPPCLRMVAAIAVLTKDAGKLTMGQPLVILAPHAVEALVKQPPDRWLSNARMTHYQAMLLDTDRVQFGPVVALNPATLLPLPEKEAPHDCLEILAETHGTRPDLTDQPIPDADYTWYTDGSSFLQEGQRRAGAAVTTETEVIWARALPAGTSAQRAELIALTQALKMAEGKKLNVYTDSRYAFATAHVHGEIYRRRGWLTSEGREIKNKNEILALLKALFLPKRLSIIHCPGHQKGNSAEARGNRMADQAAREAAMKAVLETSTLLAGKRTADGSEFEKRTADGSEFESPKKKAKVE

SEQ ID NO: 6765 - protein, 2095 aa, synthetic construct
MPAAKRVKLDGGDKKYSIGLDIGTNSVGWAVITDEYKVPSKKFKVLGNTDRHSIKKNLIGALLFDSGETAEATRLKRTARRRYTRRKNRICYLQEIFSNEMAKVDDSFFHRLEESFLVEEDKKHERHPIFGNIVDEVAYHEKYPTIYHLRKKLVDSTDKADLRLIYLALAHMIKFRGHFLIEGDLNPDNSDVDKLFIQLVQTYNQLFEENPINASGVDAKAILSARLSKSRRLENLIAQLPGEKKNGLFGNLIALSLGLTPNFKSNFDLAEDAKLQLSKDTYDDDLDNLLAQIGDQYADLFLAAKNLSDAILLSDILRVNTEITKAPLSASMIKRYDEHHQDLTLLKALVRQQLPEKYKEIFFDQSKNGYAGYIDGGASQEEFYKFIKPILEKMDGTEELLVKLNREDLLRKQRTFDNGSIPHQIHLGELHAILRRQEDFYPFLKDNREKIEKILTFRIPYYVGPLARGNSRFAWMTRKSEETITPWNFEEVVDKGASAQSFIERMTNFDKNLPNEKVLPKHSLLYEYFTVYNELTKVKYVTEGMRKPAFLSGEQKKAIVDLLFKTNRKVTVKQLKEDYFKKIECFDSVEISGVEDRFNASLGTYHDLLKIIKDKDFLDNEENEDILEDIVLTLTLFEDREMIEERLKTYAHLFDDKVMKQLKRRRYTGWGRLSRKLINGIRDKQSGKTILDFLKSDGFANRNFMQLIHDDSLTFKEDIQKAQVSGQGDSLHEHIANLAGSPAIKKGILQTVKVVDELVKVMGRHKPENIVIEMARENQTTQKGQKNSRERMKRIEEGIKELGSQILKEHPVENTQLQNEKLYLYYLQNGRDMYVDQELDINRLSDYDVDHIVPQSFLKDDSIDNKVLTRSDKARGKSDNVPSEEVVKKMKNYWRQLLNAKLITQRKFDNLTKAERGGLSELDKAGFIKRQLVETRQITKHVAQILDSRMNTKYDENDKLIREVKVITLKSKLVSDFRKDFQFYKVREINNYHHAHDAYLNAVVGTALIKKYPKLESEFVYGDYKVYDVRKMIAKSEQEIGKATAKYFFYSNIMNFFKTEITLANGEIRKRPLIETNGETGEIVWDKGRDFATVRKVLSMPQVNIVKKTEVQTGGFSKESILPKRNSDKLIARKKDWDPKKYGGFDSPTVAYSVLVVAKVEKGKSKKLKSVKELLGITIMERSSFEKNPIDFLEAKGYKEVKKDLIIKLPKYSLFELENGRKRMLASAGELQKGNELALPSKYVNFLYLASHYEKLKGSPEDNEQKQLFVEQHKHYLDEIIEQISEFSKRVILADANLDKVLSAYNKHRDKPIREQAENIIHLFTLTNLGAPAAFKYFDTTIDRKRYTSTKEVLDATLIHQSITGLYETRIDLSQLGGDGGEAAAKPAPGGTAPLEEEYRLFLEAPIQNVTLLEQWKREIPKVWAEINPPGLASTQAPIHVQLLSTALPVRVRQYPITLEAKRSLRETIRKFRAAGILRPVHSPWNTPLLPVRKSGTSEYRMVQDLREVNKRVETIHPTVPNPYTLLSLLPPDRIWYSVLDLKDAFFCIPLAPESQLIFAFEWADAEEGESGQLTWTRLPQGFKNSPTLFNEALNRDLQGFRLDHPSVSLLQYVDDLLIAADTQAACLSATRDLLMTLAELGYRVSGKKAQLCQEEVTYLGFKIHKGSRSLSNSRTQAILQIPVPKTKRQVREFLGKIGYCRLFIPGFAELAQPLYAATRPGNDPLVWGEKEEEAFQSLKLALTQPPALALPSLDKPFQLFVEETSGAAKGVLTQALGPWKRPVAYLSKRLDPVAAGWPRCLRAIAAAALLTREASKLTFGQDIEITSSHNLESLLRSPPDKWLTNARITQYQVLLLDPPRVRFKQTAALNPATLLPETDDTLPIHHCLDTLDSLTSTRPDLTDQPLAQAEATLFTDGSSYIRDGKRYAGAAVVTLDSVIWAEPLPIGTSAQKAELIALTKALEWSKDKSVNIYTDSRYAFATLHVHGMIYRERGWLTAGGKAIKNAPEILALLTAVWLPKRVAVMHCKGHQKDDAPTSTGNRRADEVAREVAIRPLSTQATISAGKRTADGSEFEKRTADGSEFESPKKKAKVE

SEQ ID NO: 6766 - protein, 2084 aa, synthetic construct
MPAAKRVKLDGGDKKYSIGLDIGTNSVGWAVITDEYKVPSKKFKVLGNTDRHSIKKNLIGALLFDSGETAEATRLKRTARRRYTRRKNRICYLQEIFSNEMAKVDDSFFHRLEESFLVEEDKKHERHPIFGNIVDEVAYHEKYPTIYHLRKKLVDSTDKADLRLIYLALAHMIKFRGHFLIEGDLNPDNSDVDKLFIQLVQTYNQLFEENPINASGVDAKAILSARLSKSRRLENLIAQLPGEKKNGLFGNLIALSLGLTPNFKSNFDLAEDAKLQLSKDTYDDDLDNLLAQIGDQYADLFLAAKNLSDAILLSDILRVNTEITKAPLSASMIKRYDEHHQDLTLLKALVRQQLPEKYKEIFFDQSKNGYAGYIDGGASQEEFYKFIKPILEKMDGTEELLVKLNREDLLRKQRTFDNGSIPHQIHLGELHAILRRQEDFYPFLKDNREKIEKILTFRIPYYVGPLARGNSRFAWMTRKSEETITPWNFEEVVDKGASAQSFIERMTNFDKNLPNEKVLPKHSLLYEYFTVYNELTKVKYVTEGMRKPAFLSGEQKKAIVDLLFKTNRKVTVKQLKEDYFKKIECFDSVEISGVEDRFNASLGTYHDLLKIIKDKDFLDNEENEDILEDIVLTLTLFEDREMIEERLKTYAHLFDDKVMKQLKRRRYTGWGRLSRKLINGIRDKQSGKTILDFLKSDGFANRNFMQLIHDDSLTFKEDIQKAQVSGQGDSLHEHIANLAGSPAIKKGILQTVKVVDELVKVMGRHKPENIVIEMARENQTTQKGQKNSRERMKRIEEGIKELGSQILKEHPVENTQLQNEKLYLYYLQNGRDMYVDQELDINRLSDYDVDHIVPQSFLKDDSIDNKVLTRSDKARGKSDNVPSEEVVKKMKNYWRQLLNAKLITQRKFDNLTKAERGGLSELDKAGFIKRQLVETRQITKHVAQILDSRMNTKYDENDKLIREVKVITLKSKLVSDFRKDFQFYKVREINNYHHAHDAYLNAVVGTALIKKYPKLESEFVYGDYKVYDVRKMIAKSEQEIGKATAKYFFYSNIMNFFKTEITLANGEIRKRPLIETNGETGEIVWDKGRDFATVRKVLSMPQVNIVKKTEVQTGGFSKESILPKRNSDKLIARKKDWDPKKYGGFDSPTVAYSVLVVAKVEKGKSKKLKSVKELLGITIMERSSFEKNPIDFLEAKGYKEVKKDLIIKLPKYSLFELENGRKRMLASAGELQKGNELALPSKYVNFLYLASHYEKLKGSPEDNEQKQLFVEQHKHYLDEIIEQISEFSKRVILADANLDKVLSAYNKHRDKPIREQAENIIHLFTLTNLGAPAAFKYFDTTIDRKRYTSTKEVLDATLIHQSITGLYETRIDLSQLGGDGGEAAAKPAPGGVPWILKKPLELTIKLDLEEQQGTLLNNSILSKKGKEELKQLFEKYSALWQSWENQVGHRRIRPHKIATGTVKPTPQKQYHINPKAKPDIQIVINDLLKQGVLIQKESTMNTPVYPVPKPNGRWRMVLDYRAVNKVTPLIAVQNQHSYGILGSLFKGRYKTTIDLSNGFWAHPIVPEDYWITAFTWQGKQYCWTVLPQGFLNSPGLFNGDVVDLLQGIPNVEVYVDDVYISHDSEKEHLEYLDILFNRLKEAGYIISLKKSNIANSIVDFLGFQITNEGRGLTDTFKEKLENITAPTTLKQLQSILGLLNFARNFIPDFTELIAPLYALIPKSPKNYVPWQIEHSTTLETLITKLNGAEYLQGRKGDKTLIMKVNASYTTGYIRYYNEGEKKPISYVSIVFSKTELKFTELEKLLTTVHKGLLKALDLSMGQNIHVYSPIVSMQNIQKTPQTAKKALASRWLSWLSYLEDPRIRFFYDPQMPALKDLPAVDTGKDNKKHPSNFQHIFYTDGSAITSPTKEGHLNAGMGIVYFINKDGNLQKQQEWSISLGNHTAQFAEIAAFEFALKKCLPLGGNILVVTDSNYVAKAYNEELDVWASNGFVNNRKKPLKHISKWKSVADLKRLRPDVVVTHEPGHQKLDSSPHAYGNNLADQLATQASFKVHAGKRTADGSEFEKRTADGSEFESPKKKAKVE

SEQ ID NO: 6767 - protein, 2084 aa, synthetic construct
MPAAKRVKLDGGDKKYSIGLDIGTNSVGWAVITDEYKVPSKKFKVLGNTDRHSIKKNLIGALLFDSGETAEATRLKRTARRRYTRRKNRICYLQEIFSNEMAKVDDSFFHRLEESFLVEEDKKHERHPIFGNIVDEVAYHEKYPTIYHLRKKLVDSTDKADLRLIYLALAHMIKFRGHFLIEGDLNPDNSDVDKLFIQLVQTYNQLFEENPINASGVDAKAILSARLSKSRRLENLIAQLPGEKKNGLFGNLIALSLGLTPNFKSNFDLAEDAKLQLSKDTYDDDLDNLLAQIGDQYADLFLAAKNLSDAILLSDILRVNTEITKAPLSASMIKRYDEHHQDLTLLKALVRQQLPEKYKEIFFDQSKNGYAGYIDGGASQEEFYKFIKPILEKMDGTEELLVKLNREDLLRKQRTFDNGSIPHQIHLGELHAILRRQEDFYPFLKDNREKIEKILTFRIPYYVGPLARGNSRFAWMTRKSEETITPWNFEEVVDKGASAQSFIERMTNFDKNLPNEKVLPKHSLLYEYFTVYNELTKVKYVTEGMRKPAFLSGEQKKAIVDLLFKTNRKVTVKQLKEDYFKKIECFDSVEISGVEDRFNASLGTYHDLLKIIKDKDFLDNEENEDILEDIVLTLTLFEDREMIEERLKTYAHLFDDKVMKQLKRRRYTGWGRLSRKLINGIRDKQSGKTILDFLKSDGFANRNFMQLIHDDSLTFKEDIQKAQVSGQGDSLHEHIANLAGSPAIKKGILQTVKVVDELVKVMGRHKPENIVIEMARENQTTQKGQKNSRERMKRIEEGIKELGSQILKEHPVENTQLQNEKLYLYYLQNGRDMYVDQELDINRLSDYDVDHIVPQSFLKDDSIDNKVLTRSDKARGKSDNVPSEEVVKKMKNYWRQLLNAKLITQRKFDNLTKAERGGLSELDKAGFIKRQLVETRQITKHVAQILDSRMNTKYDENDKLIREVKVITLKSKLVSDFRKDFQFYKVREINNYHHAHDAYLNAVVGTALIKKYPKLESEFVYGDYKVYDVRKMIAKSEQEIGKATAKYFFYSNIMNFFKTEITLANGEIRKRPLIETNGETGEIVWDKGRDFATVRKVLSMPQVNIVKKTEVQTGGFSKESILPKRNSDKLIARKKDWDPKKYGGFDSPTVAYSVLVVAKVEKGKSKKLKSVKELLGITIMERSSFEKNPIDFLEAKGYKEVKKDLIIKLPKYSLFELENGRKRMLASAGELQKGNELALPSKYVNFLYLASHYEKLKGSPEDNEQKQLFVEQHKHYLDEIIEQISEFSKRVILADANLDKVLSAYNKHRDKPIREQAENIIHLFTLTNLGAPAAFKYFDTTIDRKRYTSTKEVLDATLIHQSITGLYETRIDLSQLGGDGGEAAAKPAPGGVPWLTQQPLQLTILVPLQEYQEKILSKTALPEDQKQQLKTLFVKYDNLWQHWENQVGHRKIRPHNIATGDYPPRPQKQYPINPKAKPSIQIVIDDLLKQGVLTPQNSTMNTPVYPVPKPDGRWRMVLDYREVNKTIPLTAAQNQHSAGILATIVRQKYKTTLDLANGFWAHPITPESYWLTAFTWQGKQYCWTRLPQGFLNSPALFNADVVDLLKEIPNVQVYVDDIYLSHDDPKEHVQQLEKVFQILLQAGYVVSLKKSEIGQKTVEFLGFNITKEGRGLTDTFKTKLLNITPPKDLKQLQSILGKLNFARNFIPNFAELVQPLYNLIAPAKGKYIEWSEENTKQLNMVIEALNTASNLEERLPEQRLVIKVNTSPSAGYVRYYNETGKKPIMYLNYVFSKAELKFSMLEKLLTTMHKALIKAMDLAMGQEILVYSPIVSMTKIQKTPLPERKALPIRWITWMTYLEDPRIQFHYDKTLPELKHIPDVYTSSQSPVKHPSQYEGVFYTDGSAIKSPDPTKSNNAGMGIVHATYKPEYQVLNQWSIPLGNHTAQMAEIAAVEFACKKALKIPGPVLVITDSFYVAESANKELPYWKSNGFVNNKKKPLKHISKWKSIAECLSMKPDITIQHEKGISLQIPVFILKGNALADKLATQGSYVVNAGKRTADGSEFEKRTADGSEFESPKKKAKVE

SEQ ID NO: 6768 - protein, 2173 aa, synthetic construct
MPAAKRVKLDGGDKKYSIGLDIGTNSVGWAVITDEYKVPSKKFKVLGNTDRHSIKKNLIGALLFDSGETAEATRLKRTARRRYTRRKNRICYLQEIFSNEMAKVDDSFFHRLEESFLVEEDKKHERHPIFGNIVDEVAYHEKYPTIYHLRKKLVDSTDKADLRLIYLALAHMIKFRGHFLIEGDLNPDNSDVDKLFIQLVQTYNQLFEENPINASGVDAKAILSARLSKSRRLENLIAQLPGEKKNGLFGNLIALSLGLTPNFKSNFDLAEDAKLQLSKDTYDDDLDNLLAQIGDQYADLFLAAKNLSDAILLSDILRVNTEITKAPLSASMIKRYDEHHQDLTLLKALVRQQLPEKYKEIFFDQSKNGYAGYIDGGASQEEFYKFIKPILEKMDGTEELLVKLNREDLLRKQRTFDNGSIPHQIHLGELHAILRRQEDFYPFLKDNREKIEKILTFRIPYYVGPLARGNSRFAWMTRKSEETITPWNFEEVVDKGASAQSFIERMTNFDKNLPNEKVLPKHSLLYEYFTVYNELTKVKYVTEGMRKPAFLSGEQKKAIVDLLFKTNRKVTVKQLKEDYFKKIECFDSVEISGVEDRFNASLGTYHDLLKIIKDKDFLDNEENEDILEDIVLTLTLFEDREMIEERLKTYAHLFDDKVMKQLKRRRYTGWGRLSRKLINGIRDKQSGKTILDFLKSDGFANRNFMQLIHDDSLTFKEDIQKAQVSGQGDSLHEHIANLAGSPAIKKGILQTVKVVDELVKVMGRHKPENIVIEMARENQTTQKGQKNSRERMKRIEEGIKELGSQILKEHPVENTQLQNEKLYLYYLQNGRDMYVDQELDINRLSDYDVDHIVPQSFLKDDSIDNKVLTRSDKARGKSDNVPSEEVVKKMKNYWRQLLNAKLITQRKFDNLTKAERGGLSELDKAGFIKRQLVETRQITKHVAQILDSRMNTKYDENDKLIREVKVITLKSKLVSDFRKDFQFYKVREINNYHHAHDAYLNAVVGTALIKKYPKLESEFVYGDYKVYDVRKMIAKSEQEIGKATAKYFFYSNIMNFFKTEITLANGEIRKRPLIETNGETGEIVWDKGRDFATVRKVLSMPQVNIVKKTEVQTGGFSKESILPKRNSDKLIARKKDWDPKKYGGFDSPTVAYSVLVVAKVEKGKSKKLKSVKELLGITIMERSSFEKNPIDFLEAKGYKEVKKDLIIKLPKYSLFELENGRKRMLASAGELQKGNELALPSKYVNFLYLASHYEKLKGSPEDNEQKQLFVEQHKHYLDEIIEQISEFSKRVILADANLDKVLSAYNKHRDKPIREQAENIIHLFTLTNLGAPAAFKYFDTTIDRKRYTSTKEVLDATLIHQSITGLYETRIDLSQLGGDGGEAAAKPAPGGMNPLQLLQPLPAEIKGTKLLAHWNSGATITCIPESFLEDEQPIKKTLIKTIHGEKQQNVYYVTFKVKGRKVEAEVIASPYEYILLSPTDVPWLTQQPLQLTILVPLQEYQEKILSKTALPEDQKQQLKTLFVKYDNLWQHWENQVGHRKIRPHNIATGDYPPRPQKQYPINPKAKPSIQIVIDDLLKQGVLTPQNSTMNTPVYPVPKPDGRWRMVLDYREVNKTIPLTAAQNQHSAGILATIVRQKYKTTLDLANGFWAHPITPESYWLTAFTWQGKQYCWTRLPQGFLNSPALFNADVVDLLKEIPNVQVYVDDIYLSHDDPKEHVQQLEKVFQILLQAGYVVSLKKSEIGQKTVEFLGFNITKEGRGLTDTFKTKLLNITPPKDLKQLQSILGKLNFARNFIPNFAELVQPLYNLIAPAKGKYIEWSEENTKQLNMVIEALNTASNLEERLPEQRLVIKVNTSPSAGYVRYYNETGKKPIMYLNYVFSKAELKFSMLEKLLTTMHKALIKAMDLAMGQEILVYSPIVSMTKIQKTPLPERKALPIRWITWMTYLEDPRIQFHYDKTLPELKHIPDVYTSSQSPVKHPSQYEGVFYTDGSAIKSPDPTKSNNAGMGIVHATYKPEYQVLNQWSIPLGNHTAQMAEIAAVEFACKKALKIPGPVLVITDSFYVAESANKELPYWKSNGFVNNKKKPLKHISKWKSIAECLSMKPDITIQHEKGISLQIPVFILKGNALADKLATQGSYVVNAGKRTADGSEFEKRTADGSEFESPKKKAKVE

SEQ ID NO: 6769 - protein, 2091 aa, synthetic construct
MPAAKRVKLDGGDKKYSIGLDIGTNSVGWAVITDEYKVPSKKFKVLGNTDRHSIKKNLIGALLFDSGETAEATRLKRTARRRYTRRKNRICYLQEIFSNEMAKVDDSFFHRLEESFLVEEDKKHERHPIFGNIVDEVAYHEKYPTIYHLRKKLVDSTDKADLRLIYLALAHMIKFRGHFLIEGDLNPDNSDVDKLFIQLVQTYNQLFEENPINASGVDAKAILSARLSKSRRLENLIAQLPGEKKNGLFGNLIALSLGLTPNFKSNFDLAEDAKLQLSKDTYDDDLDNLLAQIGDQYADLFLAAKNLSDAILLSDILRVNTEITKAPLSASMIKRYDEHHQDLTLLKALVRQQLPEKYKEIFFDQSKNGYAGYIDGGASQEEFYKFIKPILEKMDGTEELLVKLNREDLLRKQRTFDNGSIPHQIHLGELHAILRRQEDFYPFLKDNREKIEKILTFRIPYYVGPLARGNSRFAWMTRKSEETITPWNFEEVVDKGASAQSFIERMTNFDKNLPNEKVLPKHSLLYEYFTVYNELTKVKYVTEGMRKPAFLSGEQKKAIVDLLFKTNRKVTVKQLKEDYFKKIECFDSVEISGVEDRFNASLGTYHDLLKIIKDKDFLDNEENEDILEDIVLTLTLFEDREMIEERLKTYAHLFDDKVMKQLKRRRYTGWGRLSRKLINGIRDKQSGKTILDFLKSDGFANRNFMQLIHDDSLTFKEDIQKAQVSGQGDSLHEHIANLAGSPAIKKGILQTVKVVDELVKVMGRHKPENIVIEMARENQTTQKGQKNSRERMKRIEEGIKELGSQILKEHPVENTQLQNEKLYLYYLQNGRDMYVDQELDINRLSDYDVDHIVPQSFLKDDSIDNKVLTRSDKARGKSDNVPSEEVVKKMKNYWRQLLNAKLITQRKFDNLTKAERGGLSELDKAGFIKRQLVETRQITKHVAQILDSRMNTKYDENDKLIREVKVITLKSKLVSDFRKDFQFYKVREINNYHHAHDAYLNAVVGTALIKKYPKLESEFVYGDYKVYDVRKMIAKSEQEIGKATAKYFFYSNIMNFFKTEITLANGEIRKRPLIETNGETGEIVWDKGRDFATVRKVLSMPQVNIVKKTEVQTGGFSKESILPKRNSDKLIARKKDWDPKKYGGFDSPTVAYSVLVVAKVEKGKSKKLKSVKELLGITIMERSSFEKNPIDFLEAKGYKEVKKDLIIKLPKYSLFELENGRKRMLASAGELQKGNELALPSKYVNFLYLASHYEKLKGSPEDNEQKQLFVEQHKHYLDEIIEQISEFSKRVILADANLDKVLSAYNKHRDKPIREQAENIIHLFTLTNLGAPAAFKYFDTTIDRKRYTSTKEVLDATLIHQSITGLYETRIDLSQLGGDGGEAAAKPAPGGVLNLEEEYRLHEKPVPSSIDPSWLQLFPTVWAERAGMGLANQVPPVVVELRSGASPVAVRQYPMSKEAREGIRPHIQKFLDLGVLVPCRSPWNTPLLPVKKPGTNDYRPVQDLREINKRVQDIHPTVPNPYNLLSSLPPSYTWYSVLDLKDAFFCLRLHPNSQPLFAFEWKDPEKGNTGQLTWTRLPQGFKNSPTLFNEALHRDLAPFRALNPQVVLLQYVDDLLVAAPTYEDCKKGTQKLLQELSKLGYRVSAKKAQLCQREVTYLGYLLKEGKRWLTPARKATVMKIPVPTTPRQVREFLGKAGFCRLFIPGFASLAAPLYPLTKPSIPFIWTEEHQQAFDHIKKALLSAPALALPDLTKPFTLYIDERAGVARGVLTQTLGPWRRPVAYLSKKLDPVASGWPTCLKAVAAVALLLKDADKLTLGQNVTVIASHSLESIVRQPPDRWMTNARMTHYQSLLLNERVSFAPPAVLNPATLLPVESEATPVHRCSEILAEETGTRRDLEDQPLPGVPTWYTDGSSFITEGKRRAGAPIVDGKRTVWASSLPEGTSAQKAELVALTQALRLAEGKNINIYTDSRYAFATAHIHGAIYKQRGWLTSAGKDIKNKEEILALLEAIHLPRRVAIIHCPGHQRGSNPVATGNRRADEAAKQAALSTRVLAGTTKPAGKRTADGSEFEKRTADGSEFESPKKKAKVE

SEQ ID NO: 6770 - protein, 2124 aa, synthetic construct
MPAAKRVKLDGGDKKYSIGLDIGTNSVGWAVITDEYKVPSKKFKVLGNTDRHSIKKNLIGALLFDSGETAEATRLKRTARRRYTRRKNRICYLQEIFSNEMAKVDDSFFHRLEESFLVEEDKKHERHPIFGNIVDEVAYHEKYPTIYHLRKKLVDSTDKADLRLIYLALAHMIKFRGHFLIEGDLNPDNSDVDKLFIQLVQTYNQLFEENPINASGVDAKAILSARLSKSRRLENLIAQLPGEKKNGLFGNLIALSLGLTPNFKSNFDLAEDAKLQLSKDTYDDDLDNLLAQIGDQYADLFLAAKNLSDAILLSDILRVNTEITKAPLSASMIKRYDEHHQDLTLLKALVRQQLPEKYKEIFFDQSKNGYAGYIDGGASQEEFYKFIKPILEKMDGTEELLVKLNREDLLRKQRTFDNGSIPHQIHLGELHAILRRQEDFYPFLKDNREKIEKILTFRIPYYVGPLARGNSRFAWMTRKSEETITPWNFEEVVDKGASAQSFIERMTNFDKNLPNEKVLPKHSLLYEYFTVYNELTKVKYVTEGMRKPAFLSGEQKKAIVDLLFKTNRKVTVKQLKEDYFKKIECFDSVEISGVEDRFNASLGTYHDLLKIIKDKDFLDNEENEDILEDIVLTLTLFEDREMIEERLKTYAHLFDDKVMKQLKRRRYTGWGRLSRKLINGIRDKQSGKTILDFLKSDGFANRNFMQLIHDDSLTFKEDIQKAQVSGQGDSLHEHIANLAGSPAIKKGILQTVKVVDELVKVMGRHKPENIVIEMARENQTTQKGQKNSRERMKRIEEGIKELGSQILKEHPVENTQLQNEKLYLYYLQNGRDMYVDQELDINRLSDYDVDHIVPQSFLKDDSIDNKVLTRSDKARGKSDNVPSEEVVKKMKNYWRQLLNAKLITQRKFDNLTKAERGGLSELDKAGFIKRQLVETRQITKHVAQILDSRMNTKYDENDKLIREVKVITLKSKLVSDFRKDFQFYKVREINNYHHAHDAYLNAVVGTALIKKYPKLESEFVYGDYKVYDVRKMIAKSEQEIGKATAKYFFYSNIMNFFKTEITLANGEIRKRPLIETNGETGEIVWDKGRDFATVRKVLSMPQVNIVKKTEVQTGGFSKESILPKRNSDKLIARKKDWDPKKYGGFDSPTVAYSVLVVAKVEKGKSKKLKSVKELLGITIMERSSFEKNPIDFLEAKGYKEVKKDLIIKLPKYSLFELENGRKRMLASAGELQKGNELALPSKYVNFLYLASHYEKLKGSPEDNEQKQLFVEQHKHYLDEIIEQISEFSKRVILADANLDKVLSAYNKHRDKPIREQAENIIHLFTLTNLGAPAAFKYFDTTIDRKRYTSTKEVLDATLIHQSITGLYETRIDLSQLGGDGGEAAAKPAPGGLLGRDLLTKLKAQIQFSTEGPQVTWEDRPAMCLVLNLEEEYRLHEKPVPPSIDPSWLQLFPMVWAEKAGMGLANQVPPVVVELKSDASPVAVRQYPMSKEAREGIRPHIQRFLDLGILVPCQSPWNTPLLPVKKPGTNDYRPVQDLREVNKRVQDIHPTVPNPYNLLSSLPPSHTWYSVLDLKDAFFCLKLHPNSQPLFAFEWRDPEKGNTGQLTWTRLPQGFKNSPTLFNEALHRDLASFRALNPQVVMLQYVDDLLVAAPTYRDCKEGTRRLLQELSKLGYRVSAKKAQLCREEVTYLGYLLKGGKRWLTPARKATVMKIPTPTTPRQVREFLGTAGFCRLWIPGFASLAAPLYPLTRPKVPFTWTEAHQEAFGRIKEALLSAPALALPDLTKPFALYVDEKEGVARGVLTQTLGPWRRPVAYLSKKLDPVASGWPTCLKAIAAVALLLKDADKLTLGQNVLVIAPHNLESIVRQPPDRWMTNARMTHYQSLLLNERVSFAPPAILNPATLLPVESDDTPIHICSEILAEETGTRPDLRDQPLPGVPAWYTDGSSFIMDGRRQAGAAIVDNKRTVWASNLPEGTSAQKAELIALTQALRLAEGKSINIYTDSRYAFATAHVHGAIYKQRGWLTSAGKDIKNKEEILALLEAIHLPKRVAIIHCPGHQRGTDPVATGNRKADEAAKQAAQSTRILTETTKNAGKRTADGSEFEKRTADGSEFESPKKKAKVE

SEQ ID NO: 6771 - protein, 2124 aa, synthetic construct
MPAAKRVKLDGGDKKYSIGLDIGTNSVGWAVITDEYKVPSKKFKVLGNTDRHSIKKNLIGALLFDSGETAEATRLKRTARRRYTRRKNRICYLQEIFSNEMAKVDDSFFHRLEESFLVEEDKKHERHPIFGNIVDEVAYHEKYPTIYHLRKKLVDSTDKADLRLIYLALAHMIKFRGHFLIEGDLNPDNSDVDKLFIQLVQTYNQLFEENPINASGVDAKAILSARLSKSRRLENLIAQLPGEKKNGLFGNLIALSLGLTPNFKSNFDLAEDAKLQLSKDTYDDDLDNLLAQIGDQYADLFLAAKNLSDAILLSDILRVNTEITKAPLSASMIKRYDEHHQDLTLLKALVRQQLPEKYKEIFFDQSKNGYAGYIDGGASQEEFYKFIKPILEKMDGTEELLVKLNREDLLRKQRTFDNGSIPHQIHLGELHAILRRQEDFYPFLKDNREKIEKILTFRIPYYVGPLARGNSRFAWMTRKSEETITPWNFEEVVDKGASAQSFIERMTNFDKNLPNEKVLPKHSLLYEYFTVYNELTKVKYVTEGMRKPAFLSGEQKKAIVDLLFKTNRKVTVKQLKEDYFKKIECFDSVEISGVEDRFNASLGTYHDLLKIIKDKDFLDNEENEDILEDIVLTLTLFEDREMIEERLKTYAHLFDDKVMKQLKRRRYTGWGRLSRKLINGIRDKQSGKTILDFLKSDGFANRNFMQLIHDDSLTFKEDIQKAQVSGQGDSLHEHIANLAGSPAIKKGILQTVKVVDELVKVMGRHKPENIVIEMARENQTTQKGQKNSRERMKRIEEGIKELGSQILKEHPVENTQLQNEKLYLYYLQNGRDMYVDQELDINRLSDYDVDHIVPQSFLKDDSIDNKVLTRSDKARGKSDNVPSEEVVKKMKNYWRQLLNAKLITQRKFDNLTKAERGGLSELDKAGFIKRQLVETRQITKHVAQILDSRMNTKYDENDKLIREVKVITLKSKLVSDFRKDFQFYKVREINNYHHAHDAYLNAVVGTALIKKYPKLESEFVYGDYKVYDVRKMIAKSEQEIGKATAKYFFYSNIMNFFKTEITLANGEIRKRPLIETNGETGEIVWDKGRDFATVRKVLSMPQVNIVKKTEVQTGGFSKESILPKRNSDKLIARKKDWDPKKYGGFDSPTVAYSVLVVAKVEKGKSKKLKSVKELLGITIMERSSFEKNPIDFLEAKGYKEVKKDLIIKLPKYSLFELENGRKRMLASAGELQKGNELALPSKYVNFLYLASHYEKLKGSPEDNEQKQLFVEQHKHYLDEIIEQISEFSKRVILADANLDKVLSAYNKHRDKPIREQAENIIHLFTLTNLGAPAAFKYFDTTIDRKRYTSTKEVLDATLIHQSITGLYETRIDLSQLGGDGGEAAAKPAPGGLLGRDLLTKLKAQIQFSTEGPQVTWEDRPAMCLVLNLEEEYRLHEKPVPPSIDPSWLQLFPMVWAEKAGMGLANQVPPVVVELKSDASPVAVRQYPMSKEAREGIRPHIQRFLDLGILVPCQSPWNTPLLPVKKPGTNDYRPVQDLREVNKRVQDIHPTVPNPYNLLSSLPPSHTWYSVLDLKDAFFCLKLHPNSQPLFAFEWRDPEKGNTGQLTWTRLPQGFKNSPTLFNEALHRDLASFRALNPQVVMLQYVDDLLVAAPTYRDCKEGTRRLLQELSKLGYRVSAKKAQLCREEVTYLGYLLKGGKRWLTPARKATVMKIPTPTTPRQVREFLGKAGFCRLFIPGFASLAAPLYPLTRPKVPFTWTEAHQEAFGRIKEALLSAPALALPDLTKPFALYVDEKEGVARGVLTQTLGPWRRPVAYLSKKLDPVASGWPTCLKAIAAVALLLKDADKLTLGQNVLVIAPHNLESIVRQPPDRWMTNARMTHYQSLLLNERVSFAPPAILNPATLLPVESDDTPIHICSEILAEETGTRPDLRDQPLPGVPAWYTDGSSFIMDGRRQAGAAIVDNKRTVWASNLPEGTSAQKAELIALTQALRLAEGKSINIYTDSRYAFATAHVHGAIYKQRGWLTSAGKDIKNKEEILALLEAIHLPKRVAIIHCPGHQRGTDPVATGNRKADEAAKQAAQSTRILTETTKNAGKRTADGSEFEKRTADGSEFESPKKKAKVE

SEQ ID NO: 6772 - protein, 2215 aa, synthetic construct
MPAAKRVKLDGGDKKYSIGLDIGTNSVGWAVITDEYKVPSKKFKVLGNTDRHSIKKNLIGALLFDSGETAEATRLKRTARRRYTRRKNRICYLQEIFSNEMAKVDDSFFHRLEESFLVEEDKKHERHPIFGNIVDEVAYHEKYPTIYHLRKKLVDSTDKADLRLIYLALAHMIKFRGHFLIEGDLNPDNSDVDKLFIQLVQTYNQLFEENPINASGVDAKAILSARLSKSRRLENLIAQLPGEKKNGLFGNLIALSLGLTPNFKSNFDLAEDAKLQLSKDTYDDDLDNLLAQIGDQYADLFLAAKNLSDAILLSDILRVNTEITKAPLSASMIKRYDEHHQDLTLLKALVRQQLPEKYKEIFFDQSKNGYAGYIDGGASQEEFYKFIKPILEKMDGTEELLVKLNREDLLRKQRTFDNGSIPHQIHLGELHAILRRQEDFYPFLKDNREKIEKILTFRIPYYVGPLARGNSRFAWMTRKSEETITPWNFEEVVDKGASAQSFIERMTNFDKNLPNEKVLPKHSLLYEYFTVYNELTKVKYVTEGMRKPAFLSGEQKKAIVDLLFKTNRKVTVKQLKEDYFKKIECFDSVEISGVEDRFNASLGTYHDLLKIIKDKDFLDNEENEDILEDIVLTLTLFEDREMIEERLKTYAHLFDDKVMKQLKRRRYTGWGRLSRKLINGIRDKQSGKTILDFLKSDGFANRNFMQLIHDDSLTFKEDIQKAQVSGQGDSLHEHIANLAGSPAIKKGILQTVKVVDELVKVMGRHKPENIVIEMARENQTTQKGQKNSRERMKRIEEGIKELGSQILKEHPVENTQLQNEKLYLYYLQNGRDMYVDQELDINRLSDYDVDHIVPQSFLKDDSIDNKVLTRSDKARGKSDNVPSEEVVKKMKNYWRQLLNAKLITQRKFDNLTKAERGGLSELDKAGFIKRQLVETRQITKHVAQILDSRMNTKYDENDKLIREVKVITLKSKLVSDFRKDFQFYKVREINNYHHAHDAYLNAVVGTALIKKYPKLESEFVYGDYKVYDVRKMIAKSEQEIGKATAKYFFYSNIMNFFKTEITLANGEIRKRPLIETNGETGEIVWDKGRDFATVRKVLSMPQVNIVKKTEVQTGGFSKESILPKRNSDKLIARKKDWDPKKYGGFDSPTVAYSVLVVAKVEKGKSKKLKSVKELLGITIMERSSFEKNPIDFLEAKGYKEVKKDLIIKLPKYSLFELENGRKRMLASAGELQKGNELALPSKYVNFLYLASHYEKLKGSPEDNEQKQLFVEQHKHYLDEIIEQISEFSKRVILADANLDKVLSAYNKHRDKPIREQAENIIHLFTLTNLGAPAAFKYFDTTIDRKRYTSTKEVLDATLIHQSITGLYETRIDLSQLGGDGGEAAAKPAPGGTLGDQGSRGSDPLPEPRVTLTVEGIPTEFLVNTGAEHSVLTKPMGKMGSKRTVVAGATGSKVYPWTTKRLLKIGQKQVTHSFLVIPECPAPLLGRDLLTKLKAQIQFSTEGPQVTWEDRPAMCLVLNLEEEYRLHEKPVPPSIDPSWLQLFPMVWAEKAGMGLANQVPPVVVELKSDASPVAVRQYPMSKEAREGIRPHIQRFLDLGILVPCQSPWNTPLLPVKKPGTNDYRPVQDLREVNKRVQDIHPTVPNPYNLLSSLPPSHTWYSVLDLKDAFFCLKLHPNSQPLFAFEWRDPEKGNTGQLTWTRLPQGFKNSPTLFNEALHRDLASFRALNPQVVMLQYVDDLLVAAPTYRDCKEGTRRLLQELSKLGYRVSAKKAQLCREEVTYLGYLLKGGKRWLTPARKATVMKIPTPTTPRQVREFLGTAGFCRLWIPGFASLAAPLYPLTRPKVPFTWTEAHQEAFGRIKEALLSAPALALPDLTKPFALYVDEKEGVARGVLTQTLGPWRRPVAYLSKKLDPVASGWPTCLKAIAAVALLLKDADKLTLGQNVLVIAPHNLESIVRQPPDRWMTNARMTHYQSLLLNERVSFAPPAILNPATLLPVESDDTPIHICSEILAEETGTRPDLRDQPLPGVPAWYTDGSSFIMDGRRQAGAAIVDNKRTVWASNLPEGTSAQKAELIALTQALRLAEGKSINIYTDSRYAFATAHVHGAIYKQRGWLTSAGKDIKNKEEILALLEAIHLPKRVAIIHCPGHQRGTDPVATGNRKADEAAKQAAQSTRILTETTKNAGKRTADGSEFEKRTADGSEFESPKKKAKVE

SEQ ID NO: 6773 - protein, 2093 aa, synthetic construct
MPAAKRVKLDGGDKKYSIGLDIGTNSVGWAVITDEYKVPSKKFKVLGNTDRHSIKKNLIGALLFDSGETAEATRLKRTARRRYTRRKNRICYLQEIFSNEMAKVDDSFFHRLEESFLVEEDKKHERHPIFGNIVDEVAYHEKYPTIYHLRKKLVDSTDKADLRLIYLALAHMIKFRGHFLIEGDLNPDNSDVDKLFIQLVQTYNQLFEENPINASGVDAKAILSARLSKSRRLENLIAQLPGEKKNGLFGNLIALSLGLTPNFKSNFDLAEDAKLQLSKDTYDDDLDNLLAQIGDQYADLFLAAKNLSDAILLSDILRVNTEITKAPLSASMIKRYDEHHQDLTLLKALVRQQLPEKYKEIFFDQSKNGYAGYIDGGASQEEFYKFIKPILEKMDGTEELLVKLNREDLLRKQRTFDNGSIPHQIHLGELHAILRRQEDFYPFLKDNREKIEKILTFRIPYYVGPLARGNSRFAWMTRKSEETITPWNFEEVVDKGASAQSFIERMTNFDKNLPNEKVLPKHSLLYEYFTVYNELTKVKYVTEGMRKPAFLSGEQKKAIVDLLFKTNRKVTVKQLKEDYFKKIECFDSVEISGVEDRFNASLGTYHDLLKIIKDKDFLDNEENEDILEDIVLTLTLFEDREMIEERLKTYAHLFDDKVMKQLKRRRYTGWGRLSRKLINGIRDKQSGKTILDFLKSDGFANRNFMQLIHDDSLTFKEDIQKAQVSGQGDSLHEHIANLAGSPAIKKGILQTVKVVDELVKVMGRHKPENIVIEMARENQTTQKGQKNSRERMKRIEEGIKELGSQILKEHPVENTQLQNEKLYLYYLQNGRDMYVDQELDINRLSDYDVDHIVPQSFLKDDSIDNKVLTRSDKARGKSDNVPSEEVVKKMKNYWRQLLNAKLITQRKFDNLTKAERGGLSELDKAGFIKRQLVETRQITKHVAQILDSRMNTKYDENDKLIREVKVITLKSKLVSDFRKDFQFYKVREINNYHHAHDAYLNAVVGTALIKKYPKLESEFVYGDYKVYDVRKMIAKSEQEIGKATAKYFFYSNIMNFFKTEITLANGEIRKRPLIETNGETGEIVWDKGRDFATVRKVLSMPQVNIVKKTEVQTGGFSKESILPKRNSDKLIARKKDWDPKKYGGFDSPTVAYSVLVVAKVEKGKSKKLKSVKELLGITIMERSSFEKNPIDFLEAKGYKEVKKDLIIKLPKYSLFELENGRKRMLASAGELQKGNELALPSKYVNFLYLASHYEKLKGSPEDNEQKQLFVEQHKHYLDEIIEQISEFSKRVILADANLDKVLSAYNKHRDKPIREQAENIIHLFTLTNLGAPAAFKYFDTTIDRKRYTSTKEVLDATLIHQSITGLYETRIDLSQLGGDGGEAAAKPAPGGTLNLEDEYRLYETSAEPEVSPGSTWLSDFPQAWAETGGMGLAVRQAPLIIPLKATSTPVSIKQYPMSQEAKLGIKPHIQRLLDQGILVPCQSPWNTPLLPVKKPGTNDYRPVQDLREVNKRVEDIHPTVPNPYNLLSGLPPSHRWYTVLDLKDAFFCLRLHPTSQPLFAFEWRDPGMGISGQLTWTRLPQGFKNSPTLFNEALHRDLADFRIQHPDLILLQYVDDILLAATSELDCQQGTRALLLTLGNLGYRASAKKAQLCQKQVKYLGYLLKEGQRWLTEARKETVMGQPTPKTPRQLREFLGKAGFCRLFIPGFAEMAAPLYPLTKPGTLFNWGPDQQKAYQEIKQALLTAPALGLPDLTKPFELFVDEKQGYAKGVLTQKLGPWRRPVAYLSKKLDPVAAGWPPCLRMVAAIAVLRKDAGKLTMGQPLVILAPHAVEALVKQPPDRWLSNARMTHYQAMLLDTDRVQFGPVVALNPATLLPLPEEGAPHDCLEILAETHGTRPDLTDQPIPDADHTWYTDGSSFLQEGQRKAGAAVTTETEVIWARALPAGTSAQRAELIALTQALKMAEGKRLNVYTDSRYAFATAHIHGEIYRRRGWLTSEGREIKNKSEILALLKALFLPKRLSIIHCLGHQKGDSAEARGNRLADQAAREAAIKTPPDTSTLLAGKRTADGSEFEKRTADGSEFESPKKKAKVE

SEQ ID NO: 6774 - protein, 2093 aa, synthetic construct
MPAAKRVKLDGGDKKYSIGLDIGTNSVGWAVITDEYKVPSKKFKVLGNTDRHSIKKNLIGALLFDSGETAEATRLKRTARRRYTRRKNRICYLQEIFSNEMAKVDDSFFHRLEESFLVEEDKKHERHPIFGNIVDEVAYHEKYPTIYHLRKKLVDSTDKADLRLIYLALAHMIKFRGHFLIEGDLNPDNSDVDKLFIQLVQTYNQLFEENPINASGVDAKAILSARLSKSRRLENLIAQLPGEKKNGLFGNLIALSLGLTPNFKSNFDLAEDAKLQLSKDTYDDDLDNLLAQIGDQYADLFLAAKNLSDAILLSDILRVNTEITKAPLSASMIKRYDEHHQDLTLLKALVRQQLPEKYKEIFFDQSKNGYAGYIDGGASQEEFYKFIKPILEKMDGTEELLVKLNREDLLRKQRTFDNGSIPHQIHLGELHAILRRQEDFYPFLKDNREKIEKILTFRIPYYVGPLARGNSRFAWMTRKSEETITPWNFEEVVDKGASAQSFIERMTNFDKNLPNEKVLPKHSLLYEYFTVYNELTKVKYVTEGMRKPAFLSGEQKKAIVDLLFKTNRKVTVKQLKEDYFKKIECFDSVEISGVEDRFNASLGTYHDLLKIIKDKDFLDNEENEDILEDIVLTLTLFEDREMIEERLKTYAHLFDDKVMKQLKRRRYTGWGRLSRKLINGIRDKQSGKTILDFLKSDGFANRNFMQLIHDDSLTFKEDIQKAQVSGQGDSLHEHIANLAGSPAIKKGILQTVKVVDELVKVMGRHKPENIVIEMARENQTTQKGQKNSRERMKRIEEGIKELGSQILKEHPVENTQLQNEKLYLYYLQNGRDMYVDQELDINRLSDYDVDHIVPQSFLKDDSIDNKVLTRSDKARGKSDNVPSEEVVKKMKNYWRQLLNAKLITQRKFDNLTKAERGGLSELDKAGFIKRQLVETRQITKHVAQILDSRMNTKYDENDKLIREVKVITLKSKLVSDFRKDFQFYKVREINNYHHAHDAYLNAVVGTALIKKYPKLESEFVYGDYKVYDVRKMIAKSEQEIGKATAKYFFYSNIMNFFKTEITLANGEIRKRPLIETNGETGEIVWDKGRDFATVRKVLSMPQVNIVKKTEVQTGGFSKESILPKRNSDKLIARKKDWDPKKYGGFDSPTVAYSVLVVAKVEKGKSKKLKSVKELLGITIMERSSFEKNPIDFLEAKGYKEVKKDLIIKLPKYSLFELENGRKRMLASAGELQKGNELALPSKYVNFLYLASHYEKLKGSPEDNEQKQLFVEQHKHYLDEIIEQISEFSKRVILADANLDKVLSAYNKHRDKPIREQAENIIHLFTLTNLGAPAAFKYFDTTIDRKRYTSTKEVLDATLIHQSITGLYETRIDLSQLGGDGGEAAAKPAPGGTLGIEDEYRLHETSTEPDVSLGSTWLSDFPQAWAETGGMGLAVRQAPLIIPLKATSTPVSIQQYPMSHEARLGIKPHIQRLLDQGILVPCQSPWNTPLLPVKKPGTNDYRPVQDLREVNKRVEDIHPTVPNPYNLLSGLPPSHQWYTVLDLKDAFFCLRLHPTSQPLFAFEWRDPGMGISGQLTWTRLPQGFKNSPTLFNEALHRDLADFRIQHPDLILLQYVDDILLAATSELDCQQGTRALLQTLGDLGYRASAKKAQICQKQVKYLGYLLREGQRWLTEARKETVMGQPVPKTPRQLREFLGTAGFCRLWIPGFAEMAAPLYPLTKPGTLFSWGPDQQKAYQEIKQALLTAPALGLPDLTKPFELFVDEKQGYAKGVLTQKLGPWRRPVAYLSKKLDPVAAGWPPCLRMVAAIAVLTKDAGKLTMGQPLVILAPHAVEALVKQPPDRWLSNARMTHYQAMLLDTDRVQFGPVVALNPATLLPLPEEGAPHDCLEILAETHGTRPDLTDQPIPDADHTWYTDGSSFLQEGQRKAGAAVTTETEVIWAGALPAGTSAQRAELIALTQALKMAEGKRLNVYTDSRYAFATAHIHGEIYRRRGWLTSEGREIKNKSEILALLKALFLPKRLSIIHCLGHQKGDSAEARGNRLADQAAREAAIKTPPDTSTLLAGKRTADGSEFEKRTADGSEFESPKKKAKVE

SEQ ID NO: 6775 - protein, 2093 aa, synthetic construct
MPAAKRVKLDGGDKKYSIGLDIGTNSVGWAVITDEYKVPSKKFKVLGNTDRHSIKKNLIGALLFDSGETAEATRLKRTARRRYTRRKNRICYLQEIFSNEMAKVDDSFFHRLEESFLVEEDKKHERHPIFGNIVDEVAYHEKYPTIYHLRKKLVDSTDKADLRLIYLALAHMIKFRGHFLIEGDLNPDNSDVDKLFIQLVQTYNQLFEENPINASGVDAKAILSARLSKSRRLENLIAQLPGEKKNGLFGNLIALSLGLTPNFKSNFDLAEDAKLQLSKDTYDDDLDNLLAQIGDQYADLFLAAKNLSDAILLSDILRVNTEITKAPLSASMIKRYDEHHQDLTLLKALVRQQLPEKYKEIFFDQSKNGYAGYIDGGASQEEFYKFIKPILEKMDGTEELLVKLNREDLLRKQRTFDNGSIPHQIHLGELHAILRRQEDFYPFLKDNREKIEKILTFRIPYYVGPLARGNSRFAWMTRKSEETITPWNFEEVVDKGASAQSFIERMTNFDKNLPNEKVLPKHSLLYEYFTVYNELTKVKYVTEGMRKPAFLSGEQKKAIVDLLFKTNRKVTVKQLKEDYFKKIECFDSVEISGVEDRFNASLGTYHDLLKIIKDKDFLDNEENEDILEDIVLTLTLFEDREMIEERLKTYAHLFDDKVMKQLKRRRYTGWGRLSRKLINGIRDKQSGKTILDFLKSDGFANRNFMQLIHDDSLTFKEDIQKAQVSGQGDSLHEHIANLAGSPAIKKGILQTVKVVDELVKVMGRHKPENIVIEMARENQTTQKGQKNSRERMKRIEEGIKELGSQILKEHPVENTQLQNEKLYLYYLQNGRDMYVDQELDINRLSDYDVDHIVPQSFLKDDSIDNKVLTRSDKARGKSDNVPSEEVVKKMKNYWRQLLNAKLITQRKFDNLTKAERGGLSELDKAGFIKRQLVETRQITKHVAQILDSRMNTKYDENDKLIREVKVITLKSKLVSDFRKDFQFYKVREINNYHHAHDAYLNAVVGTALIKKYPKLESEFVYGDYKVYDVRKMIAKSEQEIGKATAKYFFYSNIMNFFKTEITLANGEIRKRPLIETNGETGEIVWDKGRDFATVRKVLSMPQVNIVKKTEVQTGGFSKESILPKRNSDKLIARKKDWDPKKYGGFDSPTVAYSVLVVAKVEKGKSKKLKSVKELLGITIMERSSFEKNPIDFLEAKGYKEVKKDLIIKLPKYSLFELENGRKRMLASAGELQKGNELALPSKYVNFLYLASHYEKLKGSPEDNEQKQLFVEQHKHYLDEIIEQISEFSKRVILADANLDKVLSAYNKHRDKPIREQAENIIHLFTLTNLGAPAAFKYFDTTIDRKRYTSTKEVLDATLIHQSITGLYETRIDLSQLGGDGGEAAAKPAPGGTLNIEDEYRLHETSKEPDVSLGSTWLSDFPQAWAETGGMGLAVRQAPLIIPLKATSTPVSIKQYPMSQEARLGIKPHIQRLLDQGILVPCQSPWNTPLLPVKKPGTNDYRPVQDLREVNKRVEDIHPTVPNPYNLLSGLPPSHQWYTVLDLKDAFFCLRLHPTSQPLFAFEWRDPEMGISGQLTWTRLPQGFKNSPTLFNEALHRDLAGFRIQHPDLILLQYVDDLLLAATSELDCQQGTRALLQTLGDLGYRASAKKAQICQKQVKYLGYLLKEGQRWLTEARKETVMGQPIPKTPRQLREFLGTAGFCRLWIPGFAEMAAPLYPLTKPGTLFNWGPDQQKAFQEIKQALLTAPALGLPDLTKPFELFVDEKQGYAKGVLTQKLGPWRRPVAYLSKKLDPVAAGWPPCLRMVAAIAVLTKDAGKLTMGQPLVILAPHAVEALVKQPPDRWLSNARMTHYQALLLDTDRVQFGPVVALNPATLLPLPEEGLQHDCLDILAEAHGTRSDLMDQPLPDADHTWYTDGSSFLQEGQRKAGAAVTTETEVIWARALPAGTSAQRAELIALTQALKMAEGKKLNVYTDSRYAFATAHIHGEIYRRRGWLTSEGKEIKNKDEILALLKALFLPKRLSIIHCPGHQKGNSAEARGNRMADQAAREVATRETPETSTLLAGKRTADGSEFEKRTADGSEFESPKKKAKVE

SEQ ID NO: 6776 - protein, 2093 aa, synthetic construct
MPAAKRVKLDGGDKKYSIGLDIGTNSVGWAVITDEYKVPSKKFKVLGNTDRHSIKKNLIGALLFDSGETAEATRLKRTARRRYTRRKNRICYLQEIFSNEMAKVDDSFFHRLEESFLVEEDKKHERHPIFGNIVDEVAYHEKYPTIYHLRKKLVDSTDKADLRLIYLALAHMIKFRGHFLIEGDLNPDNSDVDKLFIQLVQTYNQLFEENPINASGVDAKAILSARLSKSRRLENLIAQLPGEKKNGLFGNLIALSLGLTPNFKSNFDLAEDAKLQLSKDTYDDDLDNLLAQIGDQYADLFLAAKNLSDAILLSDILRVNTEITKAPLSASMIKRYDEHHQDLTLLKALVRQQLPEKYKEIFFDQSKNGYAGYIDGGASQEEFYKFIKPILEKMDGTEELLVKLNREDLLRKQRTFDNGSIPHQIHLGELHAILRRQEDFYPFLKDNREKIEKILTFRIPYYVGPLARGNSRFAWMTRKSEETITPWNFEEVVDKGASAQSFIERMTNFDKNLPNEKVLPKHSLLYEYFTVYNELTKVKYVTEGMRKPAFLSGEQKKAIVDLLFKTNRKVTVKQLKEDYFKKIECFDSVEISGVEDRFNASLGTYHDLLKIIKDKDFLDNEENEDILEDIVLTLTLFEDREMIEERLKTYAHLFDDKVMKQLKRRRYTGWGRLSRKLINGIRDKQSGKTILDFLKSDGFANRNFMQLIHDDSLTFKEDIQKAQVSGQGDSLHEHIANLAGSPAIKKGILQTVKVVDELVKVMGRHKPENIVIEMARENQTTQKGQKNSRERMKRIEEGIKELGSQILKEHPVENTQLQNEKLYLYYLQNGRDMYVDQELDINRLSDYDVDHIVPQSFLKDDSIDNKVLTRSDKARGKSDNVPSEEVVKKMKNYWRQLLNAKLITQRKFDNLTKAERGGLSELDKAGFIKRQLVETRQITKHVAQILDSRMNTKYDENDKLIREVKVITLKSKLVSDFRKDFQFYKVREINNYHHAHDAYLNAVVGTALIKKYPKLESEFVYGDYKVYDVRKMIAKSEQEIGKATAKYFFYSNIMNFFKTEITLANGEIRKRPLIETNGETGEIVWDKGRDFATVRKVLSMPQVNIVKKTEVQTGGFSKESILPKRNSDKLIARKKDWDPKKYGGFDSPTVAYSVLVVAKVEKGKSKKLKSVKELLGITIMERSSFEKNPIDFLEAKGYKEVKKDLIIKLPKYSLFELENGRKRMLASAGELQKGNELALPSKYVNFLYLASHYEKLKGSPEDNEQKQLFVEQHKHYLDEIIEQISEFSKRVILADANLDKVLSAYNKHRDKPIREQAENIIHLFTLTNLGAPAAFKYFDTTIDRKRYTSTKEVLDATLIHQSITGLYETRIDLSQLGGDGGEAAAKPAPGGTLNIEDEYRLHETSKGPDVPLGSTWLSDFPQAWAETGGMGLAVRQAPLIIPLKATSTPVSIKQYPMSQEARLGIKPHIQRLLDQGILVPCQSPWNTPLLPVKKPGTNDYRPVQDLREVNKRVEDIHPTVPNPYNLLSGLPPSHQWYTVLDLKDAFFCLRLHPTSQSLFAFEWRDPEMGISGQLTWTRLPQGFKNSPTLFNEALHRDLADFRIQHPDLILLQYVDDLLLAATSELDCQQGTRALLQTLGDLGYRASAKKAQICQKQVKYLGYLLKEGQRWLTEARKETVMGQPTPKTPRQLREFLGTAGFCRLWIPGFAEMAAPLYPLTKPGTLFEWGPDQQKAYQEIKQALLTAPALGLPDLTKPFELFVDEKQGYAKGVLTQKLGPWRRPVAYLSKKLDPVAAGWPPCLRMVAAIAVLTKDAGKLTMGQPLVILAPHAVEALVKQPPDRWLSNARMTHYQALLLDTDRVQFGPIVALNPATLLPLPEEGLQHDCLDILAEAHGTRPDLTDQPLPDADHTWYTDGSSFLQEGQRKAGAAVTTETEVVWAKALPAGTSAQRAELIALTQALKMAEGKKLNVYTDSRYAFATAHIHGEIYRRRGWLTSEGKEIKNKDEILALLKALFLPKRLSIIHCPGHQKGNRAEARGNRMADQAAREVATRETPETSTLLAGKRTADGSEFEKRTADGSEFESPKKKAKVE

SEQ ID NO: 6777 - protein, 2113 aa, synthetic construct
MPAAKRVKLDGGDKKYSIGLDIGTNSVGWAVITDEYKVPSKKFKVLGNTDRHSIKKNLIGALLFDSGETAEATRLKRTARRRYTRRKNRICYLQEIFSNEMAKVDDSFFHRLEESFLVEEDKKHERHPIFGNIVDEVAYHEKYPTIYHLRKKLVDSTDKADLRLIYLALAHMIKFRGHFLIEGDLNPDNSDVDKLFIQLVQTYNQLFEENPINASGVDAKAILSARLSKSRRLENLIAQLPGEKKNGLFGNLIALSLGLTPNFKSNFDLAEDAKLQLSKDTYDDDLDNLLAQIGDQYADLFLAAKNLSDAILLSDILRVNTEITKAPLSASMIKRYDEHHQDLTLLKALVRQQLPEKYKEIFFDQSKNGYAGYIDGGASQEEFYKFIKPILEKMDGTEELLVKLNREDLLRKQRTFDNGSIPHQIHLGELHAILRRQEDFYPFLKDNREKIEKILTFRIPYYVGPLARGNSRFAWMTRKSEETITPWNFEEVVDKGASAQSFIERMTNFDKNLPNEKVLPKHSLLYEYFTVYNELTKVKYVTEGMRKPAFLSGEQKKAIVDLLFKTNRKVTVKQLKEDYFKKIECFDSVEISGVEDRFNASLGTYHDLLKIIKDKDFLDNEENEDILEDIVLTLTLFEDREMIEERLKTYAHLFDDKVMKQLKRRRYTGWGRLSRKLINGIRDKQSGKTILDFLKSDGFANRNFMQLIHDDSLTFKEDIQKAQVSGQGDSLHEHIANLAGSPAIKKGILQTVKVVDELVKVMGRHKPENIVIEMARENQTTQKGQKNSRERMKRIEEGIKELGSQILKEHPVENTQLQNEKLYLYYLQNGRDMYVDQELDINRLSDYDVDHIVPQSFLKDDSIDNKVLTRSDKARGKSDNVPSEEVVKKMKNYWRQLLNAKLITQRKFDNLTKAERGGLSELDKAGFIKRQLVETRQITKHVAQILDSRMNTKYDENDKLIREVKVITLKSKLVSDFRKDFQFYKVREINNYHHAHDAYLNAVVGTALIKKYPKLESEFVYGDYKVYDVRKMIAKSEQEIGKATAKYFFYSNIMNFFKTEITLANGEIRKRPLIETNGETGEIVWDKGRDFATVRKVLSMPQVNIVKKTEVQTGGFSKESILPKRNSDKLIARKKDWDPKKYGGFDSPTVAYSVLVVAKVEKGKSKKLKSVKELLGITIMERSSFEKNPIDFLEAKGYKEVKKDLIIKLPKYSLFELENGRKRMLASAGELQKGNELALPSKYVNFLYLASHYEKLKGSPEDNEQKQLFVEQHKHYLDEIIEQISEFSKRVILADANLDKVLSAYNKHRDKPIREQAENIIHLFTLTNLGAPAAFKYFDTTIDRKRYTSTKEVLDATLIHQSITGLYETRIDLSQLGGDGGEAAAKPAPGGTLNIEDEYRLHETSKEPDVSLGSTWLSDFPQAWAETGGMGLAVRQAPLIIPLKATSTPVSIKQYPMSQEARLGIKPHIQRLLDQGILVPCQSPWNTPLLPVKKPGTNDYRPVQDLREVNKRVEDIHPTVPNPYNLLSGLPPSHQWYTVLDLKDAFFCLRLHPTSQPLFAFEWRDPEMGISGQLTWTRLPQGFKNSPTLFNEALHRDLADFRIQHPDLILLQYVDDLLLAATSELDCQQGTRALLQTLGNLGYRASAKKAQICQKQVKYLGYLLKEGQRWLTEARKETVMGQPTPKTPRQLREFLGKAGFCRLFIPGFAEMAAPLYPLTKPGTLFNWGPDQQKAYQEIKQALLTAPALGLPDLTKPFELFVDEKQGYAKGVLTQKLGPWRRPVAYLSKKLDPVAAGWPPCLRMVAAIAVLTKDAGKLTMGQPLVILAPHAVEALVKQPPDRWLSNARMTHYQALLLDTDRVQFGPVVALNPATLLPLPEEGLQHNCLDILAEAHGTRPDLTDQPLPDADHTWYTDGSSLLQEGQRKAGAAVTTETEVIWAKALPAGTSAQRAELIALTQALKMAEGKKLNVYTDSRYAFATAHIHGEIYRRRGWLTSEGKEIKNKDEILALLKALFLPKRLSIIHCPGHQKGHSAEARGNRMADQAARKAAITETPDTSTLLIENSSPSGGSKRTADGSEFEAGKRTADGSEFEKRTADGSEFESPKKKAKVE

SEQ ID NO: 6778 - protein, 2113 aa, synthetic construct; identical to SEQ ID NO: 6777

SEQ ID NO: 6779 - protein, 2021 aa, synthetic construct
MPAAKRVKLDGGDKKYSIGLDIGTNSVGWAVITDEYKVPSKKFKVLGNTDRHSIKKNLIGALLFDSGETAEATRLKRTARRRYTRRKNRICYLQEIFSNEMAKVDDSFFHRLEESFLVEEDKKHERHPIFGNIVDEVAYHEKYPTIYHLRKKLVDSTDKADLRLIYLALAHMIKFRGHFLIEGDLNPDNSDVDKLFIQLVQTYNQLFEENPINASGVDAKAILSARLSKSRRLENLIAQLPGEKKNGLFGNLIALSLGLTPNFKSNFDLAEDAKLQLSKDTYDDDLDNLLAQIGDQYADLFLAAKNLSDAILLSDILRVNTEITKAPLSASMIKRYDEHHQDLTLLKALVRQQLPEKYKEIFFDQSKNGYAGYIDGGASQEEFYKFIKPILEKMDGTEELLVKLNREDLLRKQRTFDNGSIPHQIHLGELHAILRRQEDFYPFLKDNREKIEKILTFRIPYYVGPLARGNSRFAWMTRKSEETITPWNFEEVVDKGASAQSFIERMTNFDKNLPNEKVLPKHSLLYEYFTVYNELTKVKYVTEGMRKPAFLSGEQKKAIVDLLFKTNRKVTVKQLKEDYFKKIECFDSVEISGVEDRFNASLGTYHDLLKIIKDKDFLDNEENEDILEDIVLTLTLFEDREMIEERLKTYAHLFDDKVMKQLKRRRYTGWGRLSRKLINGIRDKQSGKTILDFLKSDGFANRNFMQLIHDDSLTFKEDIQKAQVSGQGDSLHEHIANLAGSPAIKKGILQTVKVVDELVKVMGRHKPENIVIEMARENQTTQKGQKNSRERMKRIEEGIKELGSQILKEHPVENTQLQNEKLYLYYLQNGRDMYVDQELDINRLSDYDVDHIVPQSFLKDDSIDNKVLTRSDKARGKSDNVPSEEVVKKMKNYWRQLLNAKLITQRKFDNLTKAERGGLSELDKAGFIKRQLVETRQITKHVAQILDSRMNTKYDENDKLIREVKVITLKSKLVSDFRKDFQFYKVREINNYHHAHDAYLNAVVGTALIKKYPKLESEFVYGDYKVYDVRKMIAKSEQEIGKATAKYFFYSNIMNFFKTEITLANGEIRKRPLIETNGETGEIVWDKGRDFATVRKVLSMPQVNIVKKTEVQTGGFSKESILPKRNSDKLIARKKDWDPKKYGGFDSPTVAYSVLVVAKVEKGKSKKLKSVKELLGITIMERSSFEKNPIDFLEAKGYKEVKKDLIIKLPKYSLFELENGRKRMLASAGELQKGNELALPSKYVNFLYLASHYEKLKGSPEDNEQKQLFVEQHKHYLDEIIEQISEFSKRVILADANLDKVLSAYNKHRDKPIREQAENIIHLFTLTNLGAPAAFKYFDTTIDRKRYTSTKEVLDATLIHQSITGLYETRIDLSQLGGDGGEAAAKPAPGGGRDIMKDIKVRLMTDSPDDSQDLMIGAIESNLFADQISWKSDQPVWLNQWPLKQEKLQALQQLVTEQLQLGHLEESNSPWNTPVFVIKKKSGKWRLLQDLRAVNATMHDMGALQPGLPSPVAVPKGWEIIIIDLQDCFFNIKLHPEDCKRFAFSVPSPNFKRPYQRFQWKVLPQGMKNSPTLCQKFVDKAILTVRDKYQDSYIVHYMDDILLAHPSRSIVDEILTSMIQALNKHGLVVSTEKIQKYDNLKYLGTHIQGDSVSYQKLQIRTDKLRTLNDFQKLLGNINWIRPFLKLTTGELKPLFEILNGDSNPISTRKLTPEACKALQLMNERLSTARVKRLDLSQPWSLCILKTEYTPTACLWQDGVVEWIHLPHISPKVITPYDIFCTQLIIKGRHRSKELFSKDPDYIVVPYTKVQFDLLLQEKEDWPISLLGFLGEVHFHLPKDPLLTFTLQTAIIFPHMTSTTPLEKGIVIFTDGSANGRSVTYIQGREPIIKENTQNTAQQAEIVAVITAFEEVSQPFNLYTDSKYVTGLFPEIETATLSPRTKIYTELKHLQRLIHKRQEKFYIGHIRGHTGLPGPLAQGNAYADSLTRILTAGKRTADGSEFEKRTADGSEFESPKKKAKVE

SEQ ID NO: 6780 - protein, 2084 aa, synthetic construct
MPAAKRVKLDGGDKKYSIGLDIGTNSVGWAVITDEYKVPSKKFKVLGNTDRHSIKKNLIGALLFDSGETAEATRLKRTARRRYTRRKNRICYLQEIFSNEMAKVDDSFFHRLEESFLVEEDKKHERHPIFGNIVDEVAYHEKYPTIYHLRKKLVDSTDKADLRLIYLALAHMIKFRGHFLIEGDLNPDNSDVDKLFIQLVQTYNQLFEENPINASGVDAKAILSARLSKSRRLENLIAQLPGEKKNGLFGNLIALSLGLTPNFKSNFDLAEDAKLQLSKDTYDDDLDNLLAQIGDQYADLFLAAKNLSDAILLSDILRVNTEITKAPLSASMIKRYDEHHQDLTLLKALVRQQLPEKYKEIFFDQSKNGYAGYIDGGASQEEFYKFIKPILEKMDGTEELLVKLNREDLLRKQRTFDNGSIPHQIHLGELHAILRRQEDFYPFLKDNREKIEKILTFRIPYYVGPLARGNSRFAWMTRKSEETITPWNFEEVVDKGASAQSFIERMTNFDKNLPNEKVLPKHSLLYEYFTVYNELTKVKYVTEGMRKPAFLSGEQKKAIVDLLFKTNRKVTVKQLKEDYFKKIECFDSVEISGVEDRFNASLGTYHDLLKIIKDKDFLDNEENEDILEDIVLTLTLFEDREMIEERLKTYAHLFDDKVMKQLKRRRYTGWGRLSRKLINGIRDKQSGKTILDFLKSDGFANRNFMQLIHDDSLTFKEDIQKAQVSGQGDSLHEHIANLAGSPAIKKGILQTVKVVDELVKVMGRHKPENIVIEMARENQTTQKGQKNSRERMKRIEEGIKELGSQILKEHPVENTQLQNEKLYLYYLQNGRDMYVDQELDINRLSDYDVDHIVPQSFLKDDSIDNKVLTRSDKARGKSDNVPSEEVVKKMKNYWRQLLNAKLITQRKFDNLTKAERGGLSELDKAGFIKRQLVETRQITKHVAQILDSRMNTKYDENDKLIREVKVITLKSKLVSDFRKDFQFYKVREINNYHHAHDAYLNAVVGTALIKKYPKLESEFVYGDYKVYDVRKMIAKSEQEIGKATAKYFFYSNIMNFFKTEITLANGEIRKRPLIETNGETGEIVWDKGRDFATVRKVLSMPQVNIVKKTEVQTGGFSKESILPKRNSDKLIARKKDWDPKKYGGFDSPTVAYSVLVVAKVEKGKSKKLKSVKELLGITIMERSSFEKNPIDFLEAKGYKEVKKDLIIKLPKYSLFELENGRKRMLASAGELQKGNELALPSKYVNFLYLASHYEKLKGSPEDNEQKQLFVEQHKHYLDEIIEQISEFSKRVILADANLDKVLSAYNKHRDKPIREQAENIIHLFTLTNLGAPAAFKYFDTTIDRKRYTSTKEVLDATLIHQSITGLYETRIDLSQLGGDGGEAAAKPAPGGIPWLMKKPLQLTTLVPLQEYEERLLKQTMLTGSYKEKLQSLFLKYDALWQHWENQVGHRRIKPHHIATGTVNPRPQKQYPINPKAKASIQTVINDLLKQGVLIQQNSIMNTPVYPVPKPDGKWRMVLDYREVNKTIPLIAAQNQHSAGILSSIFRGKYKTTLDLSNGFWAHSITPESYWLTAFTWLGQQYCWTRLPQGFLNSPALFNADVVDLLKEVPNVQVYVDDIYISHDDPREHLEQLEKVFSLLLNAGYVVSLKKSEIAQHEVEFLGFNITKEGRGLTETFKQKLLNITPPRDLKQLQSILGKLNFARNFIPNFSELVKPLYNIIATAPGKYITWTTDNSQQLQNIISMLNSAENLEERNPEVRLIMKVNTSPSAGYIRFYNEFAKRPIMYLNYVYTKAEVKFTNTEKLLTTIHKGLIKALDLGMGQEILVYSPIVSMTKIQKTPLPERKALPIRWITWMSYLEDPRIQFHYDKTLPELQQVPTVTDDIIAKIKHPSEFSMVFYTDGSAIKHPNVNKSHNAGMGIAQVQFKPEFTVINTWSIPLGDHTAQLAEVAAVEFACKKALKIDGPVLIVTDSFYVAESVNKELPYWQSNGFFNNKKKPLKHVSKWKSIADCIQLKPDIIIIHEKGHQPTASTFHTEGNNLADKLATQGSYVVNAGKRTADGSEFEKRTADGSEFESPKKKAKVE

SEQ ID NO: 6781 - protein, 2173 aa, synthetic construct
MPAAKRVKLDGGDKKYSIGLDIGTNSVGWAVITDEYKVPSKKFKVLGNTDRHSIKKNLIGALLFDSGETAEATRLKRTARRRYTRRKNRICYLQEIFSNEMAKVDDSFFHRLEESFLVEEDKKHERHPIFGNIVDEVAYHEKYPTIYHLRKKLVDSTDKADLRLIYLALAHMIKFRGHFLIEGDLNPDNSDVDKLFIQLVQTYNQLFEENPINASGVDAKAILSARLSKSRRLENLIAQLPGEKKNGLFGNLIALSLGLTPNFKSNFDLAEDAKLQLSKDTYDDDLDNLLAQIGDQYADLFLAAKNLSDAILLSDILRVNTEITKAPLSASMIKRYDEHHQDLTLLKALVRQQLPEKYKEIFFDQSKNGYAGYIDGGASQEEFYKFIKPILEKMDGTEELLVKLNREDLLRKQRTFDNGSIPHQIHLGELHAILRRQEDFYPFLKDNREKIEKILTFRIPYYVGPLARGNSRFAWMTRKSEETITPWNFEEVVDKGASAQSFIERMTNFDKNLPNEKVLPKHSLLYEYFTVYNELTKVKYVTEGMRKPAFLSGEQKKAIVDLLFKTNRKVTVKQLKEDYFKKIECFDSVEISGVEDRFNASLGTYHDLLKIIKDKDFLDNEENEDILEDIVLTLTLFEDREMIEERLKTYAHLFDDKVMKQLKRRRYTGWGRLSRKLINGIRDKQSGKTILDFLKSDGFANRNFMQLIHDDSLTFKEDIQKAQVSGQGDSLHEHIANLAGSPAIKKGILQTVKVVDELVKVMGRHKPENIVIEMARENQTTQKGQKNSRERMKRIEEGIKELGSQILKEHPVENTQLQNEKLYLYYLQNGRDMYVDQELDINRLSDYDVDHIVPQSFLKDDSIDNKVLTRSDKARGKSDNVPSEEVVKKMKNYWRQLLNAKLITQRKFDNLTKAERGGLSELDKAGFIKRQLVETRQITKHVAQILDSRMNTKYDENDKLIREVKVITLKSKLVSDFRKDFQFYKVREINNYHHAHDAYLNAVVGTALIKKYPKLESEFVYGDYKVYDVRKMIAKSEQEIGKATAKYFFYSNIMNFFKTEITLANGEIRKRPLIETNGETGEIVWDKGRDFATVRKVLSMPQVNIVKKTEVQTGGFSKESILPKRNSDKLIARKKDWDPKKYGGFDSPTVAYSVLVVAKVEKGKSKKLKSVKELLGITIMERSSFEKNPIDFLEAKGYKEVKKDLIIKLPKYSLFELENGRKRMLASAGELQKGNELALPSKYVNFLYLASHYEKLKGSPEDNEQKQLFVEQHKHYLDEIIEQISEFSKRVILADANLDKVLSAYNKHRDKPIREQAENIIHLFTLTNLGAPAAFKYFDTTIDRKRYTSTKEVLDATLIHQSITGLYETRIDLSQLGGDGGEAAAKPAPGGMDPLQLLQPLEAEIKGTKLKAHWNSGATITCVPQAFLEEEVPIKNIWIKTIHGEKEQPVYYLTFKIQGRKVEAEVISSPYDYILVSPSDIPWLMKKPLQLTTLVPLQEYEERLLKQTMLTGSYKEKLQSLFLKYDALWQHWENQVGHRRIKPHHIATGTVNPRPQKQYPINPKAKASIQTVINDLLKQGVLIQQNSIMNTPVYPVPKPDGKWRMVLDYREVNKTIPLIAAQNQHSAGILSSIFRGKYKTTLDLSNGFWAHSITPESYWLTAFTWLGQQYCWTRLPQGFLNSPALFNADVVDLLKEVPNVQVYVDDIYISHDDPREHLEQLEKVFSLLLNAGYVVSLKKSEIAQHEVEFLGFNITKEGRGLTETFKQKLLNITPPRDLKQLQSILGKLNFARNFIPNFSELVKPLYNIIATAPGKYITWTTDNSQQLQNIISMLNSAENLEERNPEVRLIMKVNTSPSAGYIRFYNEFAKRPIMYLNYVYTKAEVKFTNTEKLLTTIHKGLIKALDLGMGQEILVYSPIVSMTKIQKTPLPERKALPIRWITWMSYLEDPRIQFHYDKTLPELQQVPTVTDDIIAKIKHPSEFSMVFYTDGSAIKHPNVNKSHNAGMGIAQVQFKPEFTVINTWSIPLGDHTAQLAEVAAVEFACKKALKIDGPVLIVTDSFYVAESVNKELPYWQSNGFFNNKKKPLKHVSKWKSIADCIQLKPDIIIIHEKGHQPTASTFHTEGNNLADKLATQGSYVVNAGKRTADGSEFEKRTADGSEFESPKKKAKVE

SEQ ID NO: 6782 - protein, 2091 aa, synthetic construct
MPAAKRVKLDGGDKKYSIGLDIGTNSVGWAVITDEYKVPSKKFKVLGNTDRHSIKKNLIGALLFDSGETAEATRLKRTARRRYTRRKNRICYLQEIFSNEMAKVDDSFFHRLEESFLVEEDKKHERHPIFGNIVDEVAYHEKYPTIYHLRKKLVDSTDKADLRLIYLALAHMIKFRGHFLIEGDLNPDNSDVDKLFIQLVQTYNQLFEENPINASGVDAKAILSARLSKSRRLENLIAQLPGEKKNGLFGNLIALSLGLTPNFKSNFDLAEDAKLQLSKDTYDDDLDNLLAQIGDQYADLFLAAKNLSDAILLSDILRVNTEITKAPLSASMIKRYDEHHQDLTLLKALVRQQLPEKYKEIFFDQSKNGYAGYIDGGASQEEFYKFIKPILEKMDGTEELLVKLNREDLLRKQRTFDNGSIPHQIHLGELHAILRRQEDFYPFLKDNREKIEKILTFRIPYYVGPLARGNSRFAWMTRKSEETITPWNFEEVVDKGASAQSFIERMTNFDKNLPNEKVLPKHSLLYEYFTVYNELTKVKYVTEGMRKPAFLSGEQKKAIVDLLFKTNRKVTVKQLKEDYFKKIECFDSVEISGVEDRFNASLGTYHDLLKIIKDKDFLDNEENEDILEDIVLTLTLFEDREMIEERLKTYAHLFDDKVMKQLKRRRYTGWGRLSRKLINGIRDKQSGKTILDFLKSDGFANRNFMQLIHDDSLTFKEDIQKAQVSGQGDSLHEHIANLAGSPAIKKGILQTVKVVDELVKVMGRHKPENIVIEMARENQTTQKGQKNSRERMKRIEEGIKELGSQILKEHPVENTQLQNEKLYLYYLQNGRDMYVDQELDINRLSDYDVDHIVPQSFLKDDSIDNKVLTRSDKARGKSDNVPSEEVVKKMKNYWRQLLNAKLITQRKFDNLTKAERGGLSELDKAGFIKRQLVETRQITKHVAQILDSRMNTKYDENDKLIREVKVITLKSKLVSDFRKDFQFYKVREINNYHHAHDAYLNAVVGTALIKKYPKLESEFVYGDYKVYDVRKMIAKSEQEIGKATAKYFFYSNIMNFFKTEITLANGEIRKRPLIETNGETGEIVWDKGRDFATVRKVLSMPQVNIVKKTEVQTGGFSKESILPKRNSDKLIARKKDWDPKKYGGFDSPTVAYSVLVVAKVEKGKSKKLKSVKELLGITIMERSSFEKNPIDFLEAKGYKEVKKDLIIKLPKYSLFELENGRKRMLASAGELQKGNELALPSKYVNFLYLASHYEKLKGSPEDNEQKQLFVEQHKHYLDEIIEQISEFSKRVILADANLDKVLSAYNKHRDKPIREQAENIIHLFTLTNLGAPAAFKYFDTTIDRKRYTSTKEVLDATLIHQSITGLYETRIDLSQLGGDGGEAAAKPAPGGVLNLEEEYRLHEKPVPSSIDPSWLQLFPTVWAERAGMGLANQVPPVVVELRSGASPVAVRQYPMSKEAREGIRPHIQRFLDLGVLVPCQSPWNTPLLPVKKPGTNDYRPVQDLREINKRVQDIHPTVPNPYNLLSSLPPSHTWYSVLDLKDAFFCLKLHPNSQPLFAFEWRDPEKGNTGQLTWTRLPQGFKNSPTLFNEALHRDLAPFRALNPQVVLLQYVDDLLVAAPTYRDCKEGTQKLLQELSKLGYRVSAKKAQLCQKEVTYLGYLLKEGKRWLTPARKATVMKIPPPTTPRQVREFLGTAGFCRLWIPGFASLAAPLYPLTKPSIPFIWTEEHQKAFDRIKEALLSAPALALPDLTKPFTLYVDERAGVARGVLTQTLGPWRRPVAYLSKKLDPVASGWPTCLKAVAAVALLLKDADKLTLGQNVTVIASHSLESIVRQPPDRWMTNARMTHYQSLLLNERVSFAPPAVLNPATLLPVESEATPVHRCSEILAEETGTRRDLKDQPLPGVPAWYTDGSSFIAEGKRRAGAAIVDGKRTVWASSLPEGTSAQKAELVALTQALRLAEGKDINIYTDSRYAFATAHIHGAIYKQRGWLTSAGKDIKNKEEILALLEAIHLPKRVAIIHCPGHQKGNDPVATGNRRADEAAKQAALSTRVLAETTKPAGKRTADGSEFEKRTADGSEFESPKKKAKVE

SEQ ID NO: 6783 - protein, 2091 aa, synthetic construct; identical to SEQ ID NO: 4515

SEQ ID NO: 6784 - protein, 2095 aa, synthetic construct
MPAAKRVKLDGGDKKYSIGLDIGTNSVGWAVITDEYKVPSKKFKVLGNTDRHSIKKNLIGALLFDSGETAEATRLKRTARRRYTRRKNRICYLQEIFSNEMAKVDDSFFHRLEESFLVEEDKKHERHPIFGNIVDEVAYHEKYPTIYHLRKKLVDSTDKADLRLIYLALAHMIKFRGHFLIEGDLNPDNSDVDKLFIQLVQTYNQLFEENPINASGVDAKAILSARLSKSRRLENLIAQLPGEKKNGLFGNLIALSLGLTPNFKSNFDLAEDAKLQLSKDTYDDDLDNLLAQIGDQYADLFLAAKNLSDAILLSDILRVNTEITKAPLSASMIKRYDEHHQDLTLLKALVRQQLPEKYKEIFFDQSKNGYAGYIDGGASQEEFYKFIKPILEKMDGTEELLVKLNREDLLRKQRTFDNGSIPHQIHLGELHAILRRQEDFYPFLKDNREKIEKILTFRIPYYVGPLARGNSRFAWMTRKSEETITPWNFEEVVDKGASAQSFIERMTNFDKNLPNEKVLPKHSLLYEYFTVYNELTKVKYVTEGMRKPAFLSGEQKKAIVDLLFKTNRKVTVKQLKEDYFKKIECFDSVEISGVEDRFNASLGTYHDLLKIIKDKDFLDNEENEDILEDIVLTLTLFEDREMIEERLKTYAHLFDDKVMKQLKRRRYTGWGRLSRKLINGIRDKQSGKTILDFLKSDGFANRNFMQLIHDDSLTFKEDIQKAQVSGQGDSLHEHIANLAGSPAIKKGILQTVKVVDELVKVMGRHKPENIVIEMARENQTTQKGQKNSRERMKRIEEGIKELGSQILKEHPVENTQLQNEKLYLYYLQNGRDMYVDQELDINRLSDYDVDHIVPQSFLKDDSIDNKVLTRSDKARGKSDNVPSEEVVKKMKNYWRQLLNAKLITQRKFDNLTKAERGGLSELDKAGFIKRQLVETRQITKHVAQILDSRMNTKYDENDKLIREVKVITLKSKLVSDFRKDFQFYKVREINNYHHAHDAYLNAVVGTALIKKYPKLESEFVYGDYKVYDVRKMIAKSEQEIGKATAKYFFYSNIMNFFKTEITLANGEIRKRPLIETNGETGEIVWDKGRDFATVRKVLSMPQVNIVKKTEVQTGGFSKESILPKRNSDKLIARKKDWDPKKYGGFDSPTVAYSVLVVAKVEKGKSKKLKSVKELLGITIMERSSFEKNPIDFLEAKGYKEVKKDLIIKLPKYSLFELENGRKRMLASAGELQKGNELALPSKYVNFLYLASHYEKLKGSPEDNEQKQLFVEQHKHYLDEIIEQISEFSKRVILADANLDKVLSAYNKHRDKPIREQAENIIHLFTLTNLGAPAAFKYFDTTIDRKRYTSTKEVLDATLIHQSITGLYETRIDLSQLGGDGGPAPEAAAKGGTAPLEEEYRLFLEAPIQNVTLLEQWKREIPKVWAEINPPGLASTQAPIHVQLLSTALPVRVRQYPITLEAKRSLRETIRKFRAAGILRPVHSPWNTPLLPVRKSGTSEYRMVQDLREVNKRVETIHPTVPNPYTLLSLLPPDRIWYSVLDLKDAFFCIPLAPESQLIFAFEWADAEEGESGQLTWTRLPQGFKNSPTLFNEALNRDLQGFRLDHPSVSLLQYVDDLLIAADTQAACLSATRDLLMTLAELGYRVSGKKAQLCQEEVTYLGFKIHKGSRSLSNSRTQAILQIPVPKTKRQVREFLGTIGYCRLWIPGFAELAQPLYAATRPGNDPLVWGEKEEEAFQSLKLALTQPPALALPSLDKPFQLFVEETSGAAKGVLTQALGPWKRPVAYLSKRLDPVAAGWPRCLRAIAAAALLTREASKLTFGQDIEITSSHNLESLLRSPPDKWLTNARITQYQVLLLDPPRVRFKQTAALNPATLLPETDDTLPIHHCLDTLDSLTSTRPDLTDQPLAQAEATLFTDGSSYIRDGKRYAGAAVVTLDSVIWAEPLPIGTSAQKAELIALTKALEWSKDKSVNIYTDSRYAFATLHVHGMIYRERGWLTAGGKAIKNAPEILALLTAVWLPKRVAVMHCKGHQKDDAPTSTGNRRADEVAREVAIRPLSTQATISAGKRTADGSEFEKRTADGSEFESPKKKAKVE

SEQ ID NO: 6785 - protein, 2092 aa, synthetic construct
MPAAKRVKLDGGDKKYSIGLDIGTNSVGWAVITDEYKVPSKKFKVLGNTDRHSIKKNLIGALLFDSGETAEATRLKRTARRRYTRRKNRICYLQEIFSNEMAKVDDSFFHRLEESFLVEEDKKHERHPIFGNIVDEVAYHEKYPTIYHLRKKLVDSTDKADLRLIYLALAHMIKFRGHFLIEGDLNPDNSDVDKLFIQLVQTYNQLFEENPINASGVDAKAILSARLSKSRRLENLIAQLPGEKKNGLFGNLIALSLGLTPNFKSNFDLAEDAKLQLSKDTYDDDLDNLLAQIGDQYADLFLAAKNLSDAILLSDILRVNTEITKAPLSASMIKRYDEHHQDLTLLKALVRQQLPEKYKEIFFDQSKNGYAGYIDGGASQEEFYKFIKPILEKMDGTEELLVKLNREDLLRKQRTFDNGSIPHQIHLGELHAILRRQEDFYPFLKDNREKIEKILTFRIPYYVGPLARGNSRFAWMTRKSEETITPWNFEEVVDKGASAQSFIERMTNFDKNLPNEKVLPKHSLLYEYFTVYNELTKVKYVTEGMRKPAFLSGEQKKAIVDLLFKTNRKVTVKQLKEDYFKKIECFDSVEISGVEDRFNASLGTYHDLLKIIKDKDFLDNEENEDILEDIVLTLTLFEDREMIEERLKTYAHLFDDKVMKQLKRRRYTGWGRLSRKLINGIRDKQSGKTILDFLKSDGFANRNFMQLIHDDSLTFKEDIQKAQVSGQGDSLHEHIANLAGSPAIKKGILQTVKVVDELVKVMGRHKPENIVIEMARENQTTQKGQKNSRERMKRIEEGIKELGSQILKEHPVENTQLQNEKLYLYYLQNGRDMYVDQELDINRLSDYDVDHIVPQSFLKDDSIDNKVLTRSDKARGKSDNVPSEEVVKKMKNYWRQLLNAKLITQRKFDNLTKAERGGLSELDKAGFIKRQLVETRQITKHVAQILDSRMNTKYDENDKLIREVKVITLKSKLVSDFRKDFQFYKVREINNYHHAHDAYLNAVVGTALIKKYPKLESEFVYGDYKVYDVRKMIAKSEQEIGKATAKYFFYSNIMNFFKTEITLANGEIRKRPLIETNGETGEIVWDKGRDFATVRKVLSMPQVNIVKKTEVQTGGFSKESILPKRNSDKLIARKKDWDPKKYGGFDSPTVAYSVLVVAKVEKGKSKKLKSVKELLGITIMERSSFEKNPIDFLEAKGYKEVKKDLIIKLPKYSLFELENGRKRMLASAGELQKGNELALPSKYVNFLYLASHYEKLKGSPEDNEQKQLFVEQHKHYLDEIIEQISEFSKRVILADANLDKVLSAYNKHRDKPIREQAENIIHLFTLTNLGAPAAFKYFDTTIDRKRYTSTKEVLDATLIHQSITGLYETRIDLSQLGGDGGPAPEAAAKGGTLQLEEEYRLFEPESTQKQEMDIWLKNFPQAWAETGGMGTAHCQAPVLIQLKATATPISIRQYPMPHEAYQGIKPHIRRMLDQGILKPCQSPWNTPLLPVKKPGTEDYRPVQDLREVNKRVEDIHPTVPNPYNLLSTLPPSHPWYTVLDLKDAFFCLRLHSESQLLFAFEWRDPEIGLSGQLTWTRLPQGFKNSPTLFNEALHSDLADFRVRYPALVLLQYVDDLLLAAATRTECLEGTKALLETLGNKGYRASAKKAQICLQEVTYLGYSLKDGQRWLTKARKEAILSIPVPKNSRQVREFLGTAGYCRLWIPGFAELAAPLYPLTRPGTLFQWGTEQQLAFEDIKKALLSSPALGLPDITKPFELFIDENSGFAKGVLVQKLGPWKRPVAYLSKKLDTVASGWPPCLRMVAAIAILVKDAGKLTLGQPLTILTSHPVEALVRQPPNKWLSNARMTHYQAMLLDAERVHFGPTVSLNPATLLPLPSGGNHHDCLQILAETHGTRPDLTDQPLPDADLTWYTDGSSFIRNGEREAGAAVTTESEVIWAAPLPPGTSAQRAELIALTQALKMAEGKKLTVYTDSRYAFATTHVHGEIYRRRGWLTSEGKEIKNKNEILALLEALFLPKRLSIIHCPGHQKGDSPQAKGNRLADDTAKKAATETHSSLTVLPAGKRTADGSEFEKRTADGSEFESPKKKAKVE

SEQ ID NO: 6786 - protein, 2124 aa, synthetic construct
MPAAKRVKLDGGDKKYSIGLDIGTNSVGWAVITDEYKVPSKKFKVLGNTDRHSIKKNLIGALLFDSGETAEATRLKRTARRRYTRRKNRICYLQEIFSNEMAKVDDSFFHRLEESFLVEEDKKHERHPIFGNIVDEVAYHEKYPTIYHLRKKLVDSTDKADLRLIYLALAHMIKFRGHFLIEGDLNPDNSDVDKLFIQLVQTYNQLFEENPINASGVDAKAILSARLSKSRRLENLIAQLPGEKKNGLFGNLIALSLGLTPNFKSNFDLAEDAKLQLSKDTYDDDLDNLLAQIGDQYADLFLAAKNLSDAILLSDILRVNTEITKAPLSASMIKRYDEHHQDLTLLKALVRQQLPEKYKEIFFDQSKNGYAGYIDGGASQEEFYKFIKPILEKMDGTEELLVKLNREDLLRKQRTFDNGSIPHQIHLGELHAILRRQEDFYPFLKDNREKIEKILTFRIPYYVGPLARGNSRFAWMTRKSEETITPWNFEEVVDKGASAQSFIERMTNFDKNLPNEKVLPKHSLLYEYFTVYNELTKVKYVTEGMRKPAFLSGEQKKAIVDLLFKTNRKVTVKQLKEDYFKKIECFDSVEISGVEDRFNASLGTYHDLLKIIKDKDFLDNEENEDILEDIVLTLTLFEDREMIEERLKTYAHLFDDKVMKQLKRRRYTGWGRLSRKLINGIRDKQSGKTILDFLKSDGFANRNFMQLIHDDSLTFKEDIQKAQVSGQGDSLHEHIANLAGSPAIKKGILQTVKVVDELVKVMGRHKPENIVIEMARENQTTQKGQKNSRERMKRIEEGIKELGSQILKEHPVENTQLQNEKLYLYYLQNGRDMYVDQELDINRLSDYDVDHIVPQSFLKDDSIDNKVLTRSDKARGKSDNVPSEEVVKKMKNYWRQLLNAKLITQRKFDNLTKAERGGLSELDKAGFIKRQLVETRQITKHVAQILDSRMNTKYDENDKLIREVKVITLKSKLVSDFRKDFQFYKVREINNYHHAHDAYLNAVVGTALIKKYPKLESEFVYGDYKVYDVRKMIAKSEQEIGKATAKYFFYSNIMNFFKTEITLANGEIRKRPLIETNGETGEIVWDKGRDFATVRKVLSMPQVNIVKKTEVQTGGFSKESILPKRNSDKLIARKKDWDPKKYGGFDSPTVAYSVLVVAKVEKGKSKKLKSVKELLGITIMERSSFEKNPIDFLEAKGYKEVKKDLIIKLPKYSLFELENGRKRMLASAGELQKGNELALPSKYVNFLYLASHYEKLKGSPEDNEQKQLFVEQHKHYLDEIIEQISEFSKRVILADANLDKVLSAYNKHRDKPIREQAENIIHLFTLTNLGAPAAFKYFDTTIDRKRYTSTKEVLDATLIHQSITGLYETRIDLSQLGGDGGPAPEAAAKGGLLGRDLLTKLKAQIQFSTEGPQVTWEDRPAMCLVLNLEEEYRLHEKPVPPSIDPSWLQLFPMVWAEKAGMGLANQVPPVVVELKSDASPVAVRQYPMSKEAREGIRPHIQRFLDLGILVPCQSPWNTPLLPVKKPGTNDYRPVQDLREVNKRVQDIHPTVPNPYNLLSSLPPSHTWYSVLDLKDAFFCLKLHPNSQPLFAFEWRDPEKGNTGQLTWTRLPQGFKNSPTLFNEALHRDLASFRALNPQVVMLQYVDDLLVAAPTYRDCKEGTRRLLQELSKLGYRVSAKKAQLCREEVTYLGYLLKGGKRWLTPARKATVMKIPTPTTPRQVREFLGTAGFCRLWIPGFASLAAPLYPLTRPKVPFTWTEAHQEAFGRIKEALLSAPALALPDLTKPFALYVDEKEGVARGVLTQTLGPWRRPVAYLSKKLDPVASGWPTCLKAIAAVALLLKDADKLTLGQNVLVIAPHNLESIVRQPPDRWMTNARMTHYQSLLLNERVSFAPPAILNPATLLPVESDDTPIHICSEILAEETGTRPDLRDQPLPGVPAWYTDGSSFIMDGRRQAGAAIVDNKRTVWASNLPEGTSAQKAELIALTQALRLAEGKSINIYTDSRYAFATAHVHGAIYKQRGWLTSAGKDIKNKEEILALLEAIHLPKRVAIIHCPGHQRGTDPVATGNRKADEAAKQAAQSTRILTETTKNAGKRTADGSEFEKRTADGSEFESPKKKAKVE

SEQ ID NO: 6787 - protein, 2215 aa, synthetic construct
MPAAKRVKLDGGDKKYSIGLDIGTNSVGWAVITDEYKVPSKKFKVLGNTDRHSIKKNLIGALLFDSGETAEATRLKRTARRRYTRRKNRICYLQEIFSNEMAKVDDSFFHRLEESFLVEEDKKHERHPIFGNIVDEVAYHEKYPTIYHLRKKLVDSTDKADLRLIYLALAHMIKFRGHFLIEGDLNPDNSDVDKLFIQLVQTYNQLFEENPINASGVDAKAILSARLSKSRRLENLIAQLPGEKKNGLFGNLIALSLGLTPNFKSNFDLAEDAKLQLSKDTYDDDLDNLLAQIGDQYADLFLAAKNLSDAILLSDILRVNTEITKAPLSASMIKRYDEHHQDLTLLKALVRQQLPEKYKEIFFDQSKNGYAGYIDGGASQEEFYKFIKPILEKMDGTEELLVKLNREDLLRKQRTFDNGSIPHQIHLGELHAILRRQEDFYPFLKDNREKIEKILTFRIPYYVGPLARGNSRFAWMTRKSEETITPWNFEEVVDKGASAQSFIERMTNFDKNLPNEKVLPKHSLLYEYFTVYNELTKVKYVTEGMRKPAFLSGEQKKAIVDLLFKTNRKVTVKQLKEDYFKKIECFDSVEISGVEDRFNASLGTYHDLLKIIKDKDFLDNEENEDILEDIVLTLTLFEDREMIEERLKTYAHLFDDKVMKQLKRRRYTGWGRLSRKLINGIRDKQSGKTILDFLKSDGFANRNFMQLIHDDSLTFKEDIQKAQVSGQGDSLHEHIANLAGSPAIKKGILQTVKVVDELVKVMGRHKPENIVIEMARENQTTQKGQKNSRERMKRIEEGIKELGSQILKEHPVENTQLQNEKLYLYYLQNGRDMYVDQELDINRLSDYDVDHIVPQSFLKDDSIDNKVLTRSDKARGKSDNVPSEEVVKKMKNYWRQLLNAKLITQRKFDNLTKAERGGLSELDKAGFIKRQLVETRQITKHVAQILDSRMNTKYDENDKLIREVKVITLKSKLVSDFRKDFQFYKVREINNYHHAHDAYLNAVVGTALIKKYPKLESEFVYGDYKVYDVRKMIAKSEQEIGKATAKYFFYSNIMNFFKTEITLANGEIRKRPLIETNGETGEIVWDKGRDFATVRKVLSMPQVNIVKKTEVQTGGFSKESILPKRNSDKLIARKKDWDPKKYGGFDSPTVAYSVLVVAKVEKGKSKKLKSVKELLGITIMERSSFEKNPIDFLEAKGYKEVKKDLIIKLPKYSLFELENGRKRMLASAGELQKGNELALPSKYVNFLYLASHYEKLKGSPEDNEQKQLFVEQHKHYLDEIIEQISEFSKRVILADANLDKVLSAYNKHRDKPIREQAENIIHLFTLTNLGAPAAFKYFDTTIDRKRYTSTKEVLDATLIHQSITGLYETRIDLSQLGGDGGPAPEAAAKGGTLGDQGSRGSDPLPEPRVTLTVEGIPTEFLVNTGAEHSVLTKPMGKMGSKRTVVAGATGSKVYPWTTKRLLKIGQKQVTHSFLVIPECPAPLLGRDLLTKLKAQIQFSTEGPQVTWEDRPAMCLVLNLEEEYRLHEKPVPPSIDPSWLQLFPMVWAEKAGMGLANQVPPVVVELKSDASPVAVRQYPMSKEAREGIRPHIQRFLDLGILVPCQSPWNTPLLPVKKPGTNDYRPVQDLREVNKRVQDIHPTVPNPYNLLSSLPPSHTWYSVLDLKDAFFCLKLHPNSQPLFAFEWRDPEKGNTGQLTWTRLPQGFKNSPTLFNEALHRDLASFRALNPQVVMLQYVDDLLVAAPTYRDCKEGTRRLLQELSKLGYRVSAKKAQLCREEVTYLGYLLKGGKRWLTPARKATVMKIPTPTTPRQVREFLGKAGFCRLFIPGFASLAAPLYPLTRPKVPFTWTEAHQEAFGRIKEALLSAPALALPDLTKPFALYVDEKEGVARGVLTQTLGPWRRPVAYLSKKLDPVASGWPTCLKAIAAVALLLKDADKLTLGQNVLVIAPHNLESIVRQPPDRWMTNARMTHYQSLLLNERVSFAPPAILNPATLLPVESDDTPIHICSEILAEETGTRPDLRDQPLPGVPAWYTDGSSFIMDGRRQAGAAIVDNKRTVWASNLPEGTSAQKAELIALTQALRLAEGKSINIYTDSRYAFATAHVHGAIYKQRGWLTSAGKDIKNKEEILALLEAIHLPKRVAIIHCPGHQRGTDPVATGNRKADEAAKQAAQSTRILTETTKNAGKRTADGSEFEKRTADGSEFESPKKKAKVE

SEQ ID NO: 6788 - protein, 2093 aa, synthetic construct; identical to SEQ ID NO: 4516

SEQ ID NO: 6789 - protein, 2093 aa, synthetic construct
MPAAKRVKLDGGDKKYSIGLDIGTNSVGWAVITDEYKVPSKKFKVLGNTDRHSIKKNLIGALLFDSGETAEATRLKRTARRRYTRRKNRICYLQEIFSNEMAKVDDSFFHRLEESFLVEEDKKHERHPIFGNIVDEVAYHEKYPTIYHLRKKLVDSTDKADLRLIYLALAHMIKFRGHFLIEGDLNPDNSDVDKLFIQLVQTYNQLFEENPINASGVDAKAILSARLSKSRRLENLIAQLPGEKKNGLFGNLIALSLGLTPNFKSNFDLAEDAKLQLSKDTYDDDLDNLLAQIGDQYADLFLAAKNLSDAILLSDILRVNTEITKAPLSASMIKRYDEHHQDLTLLKALVRQQLPEKYKEIFFDQSKNGYAGYIDGGASQEEFYKFIKPILEKMDGTEELLVKLNREDLLRKQRTFDNGSIPHQIHLGELHAILRRQEDFYPFLKDNREKIEKILTFRIPYYVGPLARGNSRFAWMTRKSEETITPWNFEEVVDKGASAQSFIERMTNFDKNLPNEKVLPKHSLLYEYFTVYNELTKVKYVTEGMRKPAFLSGEQKKAIVDLLFKTNRKVTVKQLKEDYFKKIECFDSVEISGVEDRFNASLGTYHDLLKIIKDKDFLDNEENEDILEDIVLTLTLFEDREMIEERLKTYAHLFDDKVMKQLKRRRYTGWGRLSRKLINGIRDKQSGKTILDFLKSDGFANRNFMQLIHDDSLTFKEDIQKAQVSGQGDSLHEHIANLAGSPAIKKGILQTVKVVDELVKVMGRHKPENIVIEMARENQTTQKGQKNSRERMKRIEEGIKELGSQILKEHPVENTQLQNEKLYLYYLQNGRDMYVDQELDINRLSDYDVDHIVPQSFLKDDSIDNKVLTRSDKARGKSDNVPSEEVVKKMKNYWRQLLNAKLITQRKFDNLTKAERGGLSELDKAGFIKRQLVETRQITKHVAQILDSRMNTKYDENDKLIREVKVITLKSKLVSDFRKDFQFYKVREINNYHHAHDAYLNAVVGTALIKKYPKLESEFVYGDYKVYDVRKMIAKSEQEIGKATAKYFFYSNIMNFFKTEITLANGEIRKRPLIETNGETGEIVWDKGRDFATVRKVLSMPQVNIVKKTEVQTGGFSKESILPKRNSDKLIARKKDWDPKKYGGFDSPTVAYSVLVVAKVEKGKSKKLKSVKELLGITIMERSSFEKNPIDFLEAKGYKEVKKDLIIKLPKYSLFELENGRKRMLASAGELQKGNELALPSKYVNFLYLASHYEKLKGSPEDNEQKQLFVEQHKHYLDEIIEQISEFSKRVILADANLDKVLSAYNKHRDKPIREQAENIIHLFTLTNLGAPAAFKYFDTTIDRKRYTSTKEVLDATLIHQSITGLYETRIDLSQLGGDGGPAPEAAAKGGTLNIEDEYRLHETSKEPDVSLGSTWLSDFPQAWAETGGMGLAVRQAPLIIPLKATSTPVSIKQYPMSQEARLGIKPHIQRLLDQGILVPCQSPWNTPLLPVKKPGTNDYRPVQDLREVNKRVEDIHPTVPNPYNLLSGLPPSHQWYTVLDLKDAFFCLRLHPTSQPLFAFEWRDPEMGISGQLTWTRLPQGFKNSPTLFNEALHRDLAGFRIQHPDLILLQYVDDLLLAATSELDCQQGTRALLQTLGDLGYRASAKKAQICQKQVKYLGYLLKEGQRWLTEARKETVMGQPIPKTPRQLREFLGTAGFCRLWIPGFAEMAAPLYPLTKPGTLFNWGPDQQKAFQEIKQALLTAPALGLPDLTKPFELFVDEKQGYAKGVLTQKLGPWRRPVAYLSKKLDPVAAGWPPCLRMVAAIAVLTKDAGKLTMGQPLVILAPHAVEALVKQPPDRWLSNARMTHYQALLLDTDRVQFGPVVALNPATLLPLPEEGLQHDCLDILAEAHGTRSDLMDQPLPDADHTWYTDGSSFLQEGQRKAGAAVTTETEVIWARALPAGTSAQRAELIALTQALKMAEGKKLNVYTDSRYAFATAHIHGEIYRRRGWLTSEGKEIKNKDEILALLKALFLPKRLSIIHCPGHQKGNSAEARGNRMADQAAREVATRETPETSTLLAGKRTADGSEFEKRTADGSEFESPKKKAKVE

SEQ ID NO: 6790 - protein, 2113 aa, synthetic construct
MPAAKRVKLDGGDKKYSIGLDIGTNSVGWAVITDEYKVPSKKFKVLGNTDRHSIKKNLIGALLFDSGETAEATRLKRTARRRYTRRKNRICYLQEIFSNEMAKVDDSFFHRLEESFLVEEDKKHERHPIFGNIVDEVAYHEKYPTIYHLRKKLVDSTDKADLRLIYLALAHMIKFRGHFLIEGDLNPDNSDVDKLFIQLVQTYNQLFEENPINASGVDAKAILSARLSKSRRLENLIAQLPGEKKNGLFGNLIALSLGLTPNFKSNFDLAEDAKLQLSKDTYDDDLDNLLAQIGDQYADLFLAAKNLSDAILLSDILRVNTEITKAPLSASMIKRYDEHHQDLTLLKALVRQQLPEKYKEIFFDQSKNGYAGYIDGGASQEEFYKFIKPILEKMDGTEELLVKLNREDLLRKQRTFDNGSIPHQIHLGELHAILRRQEDFYPFLKDNREKIEKILTFRIPYYVGPLARGNSRFAWMTRKSEETITPWNFEEVVDKGASAQSFIERMTNFDKNLPNEKVLPKHSLLYEYFTVYNELTKVKYVTEGMRKPAFLSGEQKKAIVDLLFKTNRKVTVKQLKEDYFKKIECFDSVEISGVEDRFNASLGTYHDLLKIIKDKDFLDNEENEDILEDIVLTLTLFEDREMIEERLKTYAHLFDDKVMKQLKRRRYTGWGRLSRKLINGIRDKQSGKTILDFLKSDGFANRNFMQLIHDDSLTFKEDIQKAQVSGQGDSLHEHIANLAGSPAIKKGILQTVKVVDELVKVMGRHKPENIVIEMARENQTTQKGQKNSRERMKRIEEGIKELGSQILKEHPVENTQLQNEKLYLYYLQNGRDMYVDQELDINRLSDYDVDHIVPQSFLKDDSIDNKVLTRSDKARGKSDNVPSEEVVKKMKNYWRQLLNAKLITQRKFDNLTKAERGGLSELDKAGFIKRQLVETRQITKHVAQILDSRMNTKYDENDKLIREVKVITLKSKLVSDFRKDFQFYKVREINNYHHAHDAYLNAVVGTALIKKYPKLESEFVYGDYKVYDVRKMIAKSEQEIGKATAKYFFYSNIMNFFKTEITLANGEIRKRPLIETNGETGEIVWDKGRDFATVRKVLSMPQVNIVKKTEVQTGGFSKESILPKRNSDKLIARKKDWDPKKYGGFDSPTVAYSVLVVAKVEKGKSKKLKSVKELLGITIMERSSFEKNPIDFLEAKGYKEVKKDLIIKLPKYSLFELENGRKRMLASAGELQKGNELALPSKYVNFLYLASHYEKLKGSPEDNEQKQLFVEQHKHYLDEIIEQISEFSKRVILADANLDKVLSAYNKHRDKPIREQAENIIHLFTLTNLGAPAAFKYFDTTIDRKRYTSTKEVLDATLIHQSITGLYETRIDLSQLGGDGGPAPEAAAKGGVQEISDSRPMLHIYLNGRRFLGLLDTGADKTCIAGRDWPANWPIHQTESSLQGLGMACGVARSSQPLRWQHEDKSGIIHPFVIPTLPFTLWGRDIMKDIKVRLMTDSPDDSQDLMIGAIESNLFADQISWKSDQPVWLNQWPLKQEKLQALQQLVTEQLQLGHLEESNSPWNTPVFVIKKKSGKWRLLQDLRAVNATMHDMGALQPGLPSPVAVPKGWEIIIIDLQDCFFNIKLHPEDCKRFAFSVPSPNFKRPYQRFQWKVLPQGMKNSPTLCQKFVDKAILTVRDKYQDSYIVHYMDDILLAHPSRSIVDEILTSMIQALNKHGLVVSTEKIQKYDNLKYLGTHIQGDSVSYQKLQIRTDKLRTLNDFQKLLGNINWIRPFLKLTTGELKPLFEILNPDSNPISTRKLTPEACKALQLMNERLSTARVKRLDLSQPWSLCILKTEYTPTACLWQDGVVEWIHLPHISPKVITPYDIFCTQLIIKGRHRSKELFSKDPDYIVVPYTKVQFDLLLQEKEDWPISLLGFLGEVHFHLPKDPLLTFTLQTAIIFPHMTSTTPLEKGIVIFTDGSANGRSVTYIQGREPIIKENTQNTAQQAEIVAVITAFEEVSQPFNLYTDSKYVTGLFPEIETATLSPRTKIYTELKHLQRLIHKRQEKFYIGHIRGHTGLPGPLAQGNAYADSLTRILTAAGKRTADGSEFEKRTADGSEFESPKKKAKVE

SEQ ID NO: 6791 - protein, 2085 aa, synthetic construct
MPAAKRVKLDGGDKKYSIGLDIGTNSVGWAVITDEYKVPSKKFKVLGNTDRHSIKKNLIGALLFDSGETAEATRLKRTARRRYTRRKNRICYLQEIFSNEMAKVDDSFFHRLEESFLVEEDKKHERHPIFGNIVDEVAYHEKYPTIYHLRKKLVDSTDKADLRLIYLALAHMIKFRGHFLIEGDLNPDNSDVDKLFIQLVQTYNQLFEENPINASGVDAKAILSARLSKSRRLENLIAQLPGEKKNGLFGNLIALSLGLTPNFKSNFDLAEDAKLQLSKDTYDDDLDNLLAQIGDQYADLFLAAKNLSDAILLSDILRVNTEITKAPLSASMIKRYDEHHQDLTLLKALVRQQLPEKYKEIFFDQSKNGYAGYIDGGASQEEFYKFIKPILEKMDGTEELLVKLNREDLLRKQRTFDNGSIPHQIHLGELHAILRRQEDFYPFLKDNREKIEKILTFRIPYYVGPLARGNSRFAWMTRKSEETITPWNFEEVVDKGASAQSFIERMTNFDKNLPNEKVLPKHSLLYEYFTVYNELTKVKYVTEGMRKPAFLSGEQKKAIVDLLFKTNRKVTVKQLKEDYFKKIECFDSVEISGVEDRFNASLGTYHDLLKIIKDKDFLDNEENEDILEDIVLTLTLFEDREMIEERLKTYAHLFDDKVMKQLKRRRYTGWGRLSRKLINGIRDKQSGKTILDFLKSDGFANRNFMQLIHDDSLTFKEDIQKAQVSGQGDSLHEHIANLAGSPAIKKGILQTVKVVDELVKVMGRHKPENIVIEMARENQTTQKGQKNSRERMKRIEEGIKELGSQILKEHPVENTQLQNEKLYLYYLQNGRDMYVDQELDINRLSDYDVDHIVPQSFLKDDSIDNKVLTRSDKARGKSDNVPSEEVVKKMKNYWRQLLNAKLITQRKFDNLTKAERGGLSELDKAGFIKRQLVETRQITKHVAQILDSRMNTKYDENDKLIREVKVITLKSKLVSDFRKDFQFYKVREINNYHHAHDAYLNAVVGTALIKKYPKLESEFVYGDYKVYDVRKMIAKSEQEIGKATAKYFFYSNIMNFFKTEITLANGEIRKRPLIETNGETGEIVWDKGRDFATVRKVLSMPQVNIVKKTEVQTGGFSKESILPKRNSDKLIARKKDWDPKKYGGFDSPTVAYSVLVVAKVEKGKSKKLKSVKELLGITIMERSSFEKNPIDFLEAKGYKEVKKDLIIKLPKYSLFELENGRKRMLASAGELQKGNELALPSKYVNFLYLASHYEKLKGSPEDNEQKQLFVEQHKHYLDEIIEQISEFSKRVILADANLDKVLSAYNKHRDKPIREQAENIIHLFTLTNLGAPAAFKYFDTTIDRKRYTSTKEVLDATLIHQSITGLYETRIDLSQLGGDGGPAPEAAAKGGLDDEYRLYSPLVKPDQNIQFWLEQFPQAWAETAGMGLAKQVPPQVIQLKASATPVSVRQYPLSKEAQEGIRPHVQRLIQQGILVPVQSPWNTPLLPVRKPGTNDYRPVQDLREVNKRVQDIHPTVPNPYNLLCALPPQRSWYTVLDLKDAFFCLRLHPTSQPLFAFEWRDPGTGRTGQLTWTRLPQGFKNSPTIFNEALHRDLANFRIQHPQVTLLQYVDDLLLAGATKQDCLEGTKALLLELSDLGYRASAKKAQICRREVTYLGYSLRDGQRWLTEARKKTVVQIPAPTTAKQVREFLGKAGFCRLFIPGFATLAAPLYPLTKPKGEFSWAPEHQKAFDAIKKALLSAPALALPDVTKPFTLYVDERKGVARGVLTQTLGPWRRPVAYLSKKLDPVASGWPVCLKAIAAVAILVKDADKLTLGQNITVIAPHALENIVRQPPDRWMTNARMTHYQSLLLTERVTFAPPAALNPATLLPEETDEPVTHDCHQLLIEETGVRKDLTDIPLTGEVLTWFTDGSSYVVEGKRMAGAAVVDGTRTIWASSLPEGTSAQKAELMALTQALRLAEGKSINIYTDSRYAFATAHVHGAIYKQRGWLTSAGREIKNKEEILSLLEALHLPKRLAIIHCPGHQKAKDPISRGNQMADRVAKQAAQGVNLLPAGKRTADGSEFEKRTADGSEFESPKKKAKVE

SEQ ID NO: 6792 - protein, 2087 aa, synthetic construct
MPAAKRVKLDGGDKKYSIGLDIGTNSVGWAVITDEYKVPSKKFKVLGNTDRHSIKKNLIGALLFDSGETAEATRLKRTARRRYTRRKNRICYLQEIFSNEMAKVDDSFFHRLEESFLVEEDKKHERHPIFGNIVDEVAYHEKYPTIYHLRKKLVDSTDKADLRLIYLALAHMIKFRGHFLIEGDLNPDNSDVDKLFIQLVQTYNQLFEENPINASGVDAKAILSARLSKSRRLENLIAQLPGEKKNGLFGNLIALSLGLTPNFKSNFDLAEDAKLQLSKDTYDDDLDNLLAQIGDQYADLFLAAKNLSDAILLSDILRVNTEITKAPLSASMIKRYDEHHQDLTLLKALVRQQLPEKYKEIFFDQSKNGYAGYIDGGASQEEFYKFIKPILEKMDGTEELLVKLNREDLLRKQRTFDNGSIPHQIHLGELHAILRRQEDFYPFLKDNREKIEKILTFRIPYYVGPLARGNSRFAWMTRKSEETITPWNFEEVVDKGASAQSFIERMTNFDKNLPNEKVLPKHSLLYEYFTVYNELTKVKYVTEGMRKPAFLSGEQKKAIVDLLFKTNRKVTVKQLKEDYFKKIECFDSVEISGVEDRFNASLGTYHDLLKIIKDKDFLDNEENEDILEDIVLTLTLFEDREMIEERLKTYAHLFDDKVMKQLKRRRYTGWGRLSRKLINGIRDKQSGKTILDFLKSDGFANRNFMQLIHDDSLTFKEDIQKAQVSGQGDSLHEHIANLAGSPAIKKGILQTVKVVDELVKVMGRHKPENIVIEMARENQTTQKGQKNSRERMKRIEEGIKELGSQILKEHPVENTQLQNEKLYLYYLQNGRDMYVDQELDINRLSDYDVDHIVPQSFLKDDSIDNKVLTRSDKARGKSDNVPSEEVVKKMKNYWRQLLNAKLITQRKFDNLTKAERGGLSELDKAGFIKRQLVETRQITKHVAQILDSRMNTKYDENDKLIREVKVITLKSKLVSDFRKDFQFYKVREINNYHHAHDAYLNAVVGTALIKKYPKLESEFVYGDYKVYDVRKMIAKSEQEIGKATAKYFFYSNIMNFFKTEITLANGEIRKRPLIETNGETGEIVWDKGRDFATVRKVLSMPQVNIVKKTEVQTGGFSKESILPKRNSDKLIARKKDWDPKKYGGFDSPTVAYSVLVVAKVEKGKSKKLKSVKELLGITIMERSSFEKNPIDFLEAKGYKEVKKDLIIKLPKYSLFELENGRKRMLASAGELQKGNELALPSKYVNFLYLASHYEKLKGSPEDNEQKQLFVEQHKHYLDEIIEQISEFSKRVILADANLDKVLSAYNKHRDKPIREQAENIIHLFTLTNLGAPAAFKYFDTTIDRKRYTSTKEVLDATLIHQSITGLYETRIDLSQLGGDGGPAPEAAAKGGTLQLDDEYRLYSPLVKPDQNIQFWLEQFPQAWAETAGMGLAKQVPPQVIQLKASATPVSVRQYPLSKEAQEGIRPHVQRLIQQGILVPVQSPWNTPLLPVRKPGTNDYRPVQDLREVNKRVQDIHPTVPNPYNLLCALPPQRSWYTVLDLKDAFFCLRLHPTSQPLFAFEWRDPGTGRTGQLTWTRLPQGFKNSPTIFDEALHRDLANFRIQHPQVTLLQYVDDLLLAGATKQDCLEGTKALLLELSDLGYRASAKKAQICRREVTYLGYSLRDGQRWLTEARKKTVVQIPAPTTAKQVREFLGTAGFCRLWIPGFATLAAPLYPLTKEKGEFSWAPEHQKAFDAIKKALLSAPALALPDVTKPFTLYVDERKGVARGVLTQTLGPWRRPVAYLSKKLDPVASGWPVCLKAIAAVAILVKDADKLTLGQNITVIAPHALENIVRQPPDRWMTNARMTHYQSLLLTERVTFAPPAALNPATLLPEETDEPVTHDCHQLLIEETGVRKDLTDIPLTGEVLTWFTDGSSYVVEGKRMAGAAVVDGTRTIWASSLPEGTSAQKAELMALTQALRLAEGKSINIYTDSRYAFATAHVHGAIYKQRGLLTSAGREIKNKEEILSLLEALHLPKRLAIIHCPGHQKAKDPISRGNQMADRVAKQAAQGVNLLAGKRTADGSEFEKRTADGSEFESPKKKAKVE

SEQ ID NO: 6793 - protein, 2085 aa, synthetic construct; identical to SEQ ID NO: 6791

SEQ ID NO: 6794 - protein, 2087 aa, synthetic construct; identical to SEQ ID NO: 6792

SEQ ID NO: 6795 - protein, 2091 aa, synthetic construct
MPAAKRVKLDGGDKKYSIGLDIGTNSVGWAVITDEYKVPSKKFKVLGNTDRHSIKKNLIGALLFDSGETAEATRLKRTARRRYTRRKNRICYLQEIFSNEMAKVDDSFFHRLEESFLVEEDKKHERHPIFGNIVDEVAYHEKYPTIYHLRKKLVDSTDKADLRLIYLALAHMIKFRGHFLIEGDLNPDNSDVDKLFIQLVQTYNQLFEENPINASGVDAKAILSARLSKSRRLENLIAQLPGEKKNGLFGNLIALSLGLTPNFKSNFDLAEDAKLQLSKDTYDDDLDNLLAQIGDQYADLFLAAKNLSDAILLSDILRVNTEITKAPLSASMIKRYDEHHQDLTLLKALVRQQLPEKYKEIFFDQSKNGYAGYIDGGASQEEFYKFIKPILEKMDGTEELLVKLNREDLLRKQRTFDNGSIPHQIHLGELHAILRRQEDFYPFLKDNREKIEKILTFRIPYYVGPLARGNSRFAWMTRKSEETITPWNFEEVVDKGASAQSFIERMTNFDKNLPNEKVLPKHSLLYEYFTVYNELTKVKYVTEGMRKPAFLSGEQKKAIVDLLFKTNRKVTVKQLKEDYFKKIECFDSVEISGVEDRFNASLGTYHDLLKIIKDKDFLDNEENEDILEDIVLTLTLFEDREMIEERLKTYAHLFDDKVMKQLKRRRYTGWGRLSRKLINGIRDKQSGKTILDFLKSDGFANRNFMQLIHDDSLTFKEDIQKAQVSGQGDSLHEHIANLAGSPAIKKGILQTVKVVDELVKVMGRHKPENIVIEMARENQTTQKGQKNSRERMKRIEEGIKELGSQILKEHPVENTQLQNEKLYLYYLQNGRDMYVDQELDINRLSDYDVDHIVPQSFLKDDSIDNKVLTRSDKARGKSDNVPSEEVVKKMKNYWRQLLNAKLITQRKFDNLTKAERGGLSELDKAGFIKRQLVETRQITKHVAQILDSRMNTKYDENDKLIREVKVITLKSKLVSDFRKDFQFYKVREINNYHHAHDAYLNAVVGTALIKKYPKLESEFVYGDYKVYDVRKMIAKSEQEIGKATAKYFFYSNIMNFFKTEITLANGEIRKRPLIETNGETGEIVWDKGRDFATVRKVLSMPQVNIVKKTEVQTGGFSKESILPKRNSDKLIARKKDWDPKKYGGFDSPTVAYSVLVVAKVEKGKSKKLKSVKELLGITIMERSSFEKNPIDFLEAKGYKEVKKDLIIKLPKYSLFELENGRKRMLASAGELQKGNELALPSKYVNFLYLASHYEKLKGSPEDNEQKQLFVEQHKHYLDEIIEQISEFSKRVILADANLDKVLSAYNKHRDKPIREQAENIIHLFTLTNLGAPAAFKYFDTTIDRKRYTSTKEVLDATLIHQSITGLYETRIDLSQLGGDGGPAPEAAAKGGVLNLEEEYRLHEKPVPSSIDPSWLQLFPTVWAERAGMGLANQVPPVVVELRSGASPVAVRQYPMSKEAREGIRPHIQRFLDLGVLVPCQSPWNTPLLPVKKPGTNDYRPVQDLREINKRVQDIHPTVPNPYNLLSSLPPSHTWYSVLDLKDAFFCLKLHPNSQPLFAFEWRDPEKGNTGQLTWTRLPQGFKNSPTLFDEALHRDLAPFRALNPQVVLLQYVDDLLVAAPTYRDCKEGTQKLLQELSKLGYRVSAKKAQLCQKEVTYLGYLLKEGKRWLTPARKATVMKIPPPTTPRQVREFLGTAGFCRLWIPGFASLAAPLYPLTKESIPFIWTEEHQKAFDRIKEALLSAPALALPDLTKPFTLYVDERAGVARGVLTQTLGPWRRPVAYLSKKLDPVASGWPTCLKAVAAVALLLKDADKLTLGQNVTVIASHSLESIVRQPPDRWMTNARMTHYQSLLLNERVSFAPPAVLNPATLLPVESEATPVHRCSEILAEETGTRRDLKDQPLPGVPAWYTDGSSFIAEGKRRAGAAIVDGKRTVWASSLPEGTSAQKAELVALTQALRLAEGKDINIYTDSRYAFATAHIHGAIYKQRGLLTSAGKDIKNKEEILALLEAIHLPKRVAIIHCPGHQKGNDPVATGNRRADEAAKQAALSTRVLAETTKPAGKRTADGSEFEKRTADGSEFESPKKKAKVE

SEQ ID NO: 6796 - protein, 2093 aa, synthetic construct
MPAAKRVKLDGGDKKYSIGLDIGTNSVGWAVITDEYKVPSKKFKVLGNTDRHSIKKNLIGALLFDSGETAEATRLKRTARRRYTRRKNRICYLQEIFSNEMAKVDDSFFHRLEESFLVEEDKKHERHPIFGNIVDEVAYHEKYPTIYHLRKKLVDSTDKADLRLIYLALAHMIKFRGHFLIEGDLNPDNSDVDKLFIQLVQTYNQLFEENPINASGVDAKAILSARLSKSRRLENLIAQLPGEKKNGLFGNLIALSLGLTPNFKSNFDLAEDAKLQLSKDTYDDDLDNLLAQIGDQYADLFLAAKNLSDAILLSDILRVNTEITKAPLSASMIKRYDEHHQDLTLLKALVRQQLPEKYKEIFFDQSKNGYAGYIDGGASQEEFYKFIKPILEKMDGTEELLVKLNREDLLRKQRTFDNGSIPHQIHLGELHAILRRQEDFYPFLKDNREKIEKILTFRIPYYVGPLARGNSRFAWMTRKSEETITPWNFEEVVDKGASAQSFIERMTNFDKNLPNEKVLPKHSLLYEYFTVYNELTKVKYVTEGMRKPAFLSGEQKKAIVDLLFKTNRKVTVKQLKEDYFKKIECFDSVEISGVEDRFNASLGTYHDLLKIIKDKDFLDNEENEDILEDIVLTLTLFEDREMIEERLKTYAHLFDDKVMKQLKRRRYTGWGRLSRKLINGIRDKQSGKTILDFLKSDGFANRNFMQLIHDDSLTFKEDIQKAQVSGQGDSLHEHIANLAGSPAIKKGILQTVKVVDELVKVMGRHKPENIVIEMARENQTTQKGQKNSRERMKRIEEGIKELGSQILKEHPVENTQLQNEKLYLYYLQNGRDMYVDQELDINRLSDYDVDHIVPQSFLKDDSIDNKVLTRSDKARGKSDNVPSEEVVKKMKNYWRQLLNAKLITQRKFDNLTKAERGGLSELDKAGFIKRQLVETRQITKHVAQILDSRMNTKYDENDKLIREVKVITLKSKLVSDFRKDFQFYKVREINNYHHAHDAYLNAVVGTALIKKYPKLESEFVYGDYKVYDVRKMIAKSEQEIGKATAKYFFYSNIMNFFKTEITLANGEIRKRPLIETNGETGEIVWDKGRDFATVRKVLSMPQVNIVKKTEVQTGGFSKESILPKRNSDKLIARKKDWDPKKYGGFDSPTVAYSVLVVAKVEKGKSKKLKSVKELLGITIMERSSFEKNPIDFLEAKGYKEVKKDLIIKLPKYSLFELENGRKRMLASAGELQKGNELALPSKYVNFLYLASHYEKLKGSPEDNEQKQLFVEQHKHYLDEIIEQISEFSKRVILADANLDKVLSAYNKHRDKPIREQAENIIHLFTLTNLGAPAAFKYFDTTIDRKRYTSTKEVLDATLIHQSITGLYETRIDLSQLGGDGGPAPEAAAKGGTLNIEDEYRLHETSKEPDVPLGSTWLSDFPQAWAETGGMGLAVRQAPLIIPLKATSTPVSIKQYPMSQEARLGIKPHIQRLLDQGILVPCQSPWNTPLLPVKKPGTNDYRPVQDLREVNKRVEDIHPTVPNPYNLLSGLPPSHQWYTVLDLKDAFFCLRLHPTSQPLFAFEWRDPEMGISGQLTWTRLPQGFKNSPTLFNEALHRDLADFRIQHPDLILLQYVDDLLLAATSEQDCQRGTRALLQTLGNLGYRASAKKAQICQKQVKYLGYLLKEGQRWLTEARKETVMGQPTPKTPRQLREFLGTAGFCRLWIPGFAEMAAPLYPLTKPGTLFNWGPDQQKAYQEIKQALLTAPALGLPDLTKPFELFVDEKQGYAKGVLTQKLGPWRRPVAYLSKKLDPVAAGWPPCLRMVAAIAVLTKDAGKLTMGQPLVILAPHAVEALVKQPPDRWLSNARMTHYQAMLLDTDRVQFGPVVALNPATLLPLPEKEAPHDCLEILAETHGTRPDLTDQPIPDADYTWYTDGSSFLQEGQRRAGAAVTTETEVIWARALPAGTSAQRAELIALTQALKMAEGKKLNVYTDSRYAFATAHVHGEIYRRRGWLTSEGREIKNKNEILALLKALFLPKRLSIIHCPGHQKGNSAEARGNRMADQAAREAAMKAVLETSTLLAGKRTADGSEFEKRTADGSEFESPKKKAKVE

SEQ ID NO: 6797 - protein, 2093 aa, synthetic construct
MPAAKRVKLDGGDKKYSIGLDIGTNSVGWAVITDEYKVPSKKFKVLGNTDRHSIKKNLIGALLFDSGETAEATRLKRTARRRYTRRKNRICYLQEIFSNEMAKVDDSFFHRLEESFLVEEDKKHERHPIFGNIVDEVAYHEKYPTIYHLRKKLVDSTDKADLRLIYLALAHMIKFRGHFLIEGDLNPDNSDVDKLFIQLVQTYNQLFEENPINASGVDAKAILSARLSKSRRLENLIAQLPGEKKNGLFGNLIALSLGLTPNFKSNFDLAEDAKLQLSKDTYDDDLDNLLAQIGDQYADLFLAAKNLSDAILLSDILRVNTEITKAPLSASMIKRYDEHHQDLTLLKALVRQQLPEKYKEIFFDQSKNGYAGYIDGGASQEEFYKFIKPILEKMDGTEELLVKLNREDLLRKQRTFDNGSIPHQIHLGELHAILRRQEDFYPFLKDNREKIEKILTFRIPYYVGPLARGNSRFAWMTRKSEETITPWNFEEVVDKGASAQSFIERMTNFDKNLPNEKVLPKHSLLYEYFTVYNELTKVKYVTEGMRKPAFLSGEQKKAIVDLLFKTNRKVTVKQLKEDYFKKIECFDSVEISGVEDRFNASLGTYHDLLKIIKDKDFLDNEENEDILEDIVLTLTLFEDREMIEERLKTYAHLFDDKVMKQLKRRRYTGWGRLSRKLINGIRDKQSGKTILDFLKSDGFANRNFMQLIHDDSLTFKEDIQKAQVSGQGDSLHEHIANLAGSPAIKKGILQTVKVVDELVKVMGRHKPENIVIEMARENQTTQKGQKNSRERMKRIEEGIKELGSQILKEHPVENTQLQNEKLYLYYLQNGRDMYVDQELDINRLSDYDVDHIVPQSFLKDDSIDNKVLTRSDKARGKSDNVPSEEVVKKMKNYWRQLLNAKLITQRKFDNLTKAERGGLSELDKAGFIKRQLVETRQITKHVAQILDSRMNTKYDENDKLIREVKVITLKSKLVSDFRKDFQFYKVREINNYHHAHDAYLNAVVGTALIKKYPKLESEFVYGDYKVYDVRKMIAKSEQEIGKATAKYFFYSNIMNFFKTEITLANGEIRKRPLIETNGETGEIVWDKGRDFATVRKVLSMPQVNIVKKTEVQTGGFSKESILPKRNSDKLIARKKDWDPKKYGGFDSPTVAYSVLVVAKVEKGKSKKLKSVKELLGITIMERSSFEKNPIDFLEAKGYKEVKKDLIIKLPKYSLFELENGRKRMLASAGELQKGNELALPSKYVNFLYLASHYEKLKGSPEDNEQKQLFVEQHKHYLDEIIEQISEFSKRVILADANLDKVLSAYNKHRDKPIREQAENIIHLFTLTNLGAPAAFKYFDTTIDRKRYTSTKEVLDATLIHQSITGLYETRIDLSQLGGDGGPAPEAAAKGGTLNIEDEYRLHETSKEPDVPLGSTWLSDFPQAWAETGGMGLAVRQAPLIIPLKATSTPVSIKQYPMSQEARLGIKPHIQRLLDQGILVPCQSPWNTPLLPVKKPGTNDYRPVQDLREVNKRVEDIHPTVPNPYNLLSGLPPSHQWYTVLDLKDAFFCLRLHPTSQPLFAFEWRDPEMGISGQLTWTRLPQGFKNSPTLFNEALHRDLADFRIQHPDLILLQYVDDLLLAATSEQDCQRGTRALLQTLGNLGYRASAKKAQICQKQVKYLGYLLKEGQRWLTEARKETVMGQPTPKTPRQLREFLGKAGFCRLFIPGFAEMAAPLYPLTKPGTLFNWGPDQQKAYQEIKQALLTAPALGLPDLTKPFELFVDEKQGYAKGVLTQKLGPWRRPVAYLSKKLDPVAAGWPPCLRMVAAIAVLTKDAGKLTMGQPLVILAPHAVEALVKQPPDRWLSNARMTHYQAMLLDTDRVQFGPVVALNPATLLPLPEKEAPHDCLEILAETHGTRPDLTDQPIPDADYTWYTDGSSFLQEGQRRAGAAVTTETEVIWARALPAGTSAQRAELIALTQALKMAEGKKLNVYTDSRYAFATAHVHGEIYRRRGWLTSEGREIKNKNEILALLKALFLPKRLSIIHCPGHQKGNSAEARGNRMADQAAREAAMKAVLETSTLLAGKRTADGSEFEKRTADGSEFESPKKKAKVE

SEQ ID NO: 6798 - protein, 2096 aa, synthetic construct
MPAAKRVKLDGGDKKYSIGLDIGTNSVGWAVITDEYKVPSKKFKVLGNTDRHSIKKNLIGALLFDSGETAEATRLKRTARRRYTRRKNRICYLQEIFSNEMAKVDDSFFHRLEESFLVEEDKKHERHPIFGNIVDEVAYHEKYPTIYHLRKKLVDSTDKADLRLIYLALAHMIKFRGHFLIEGDLNPDNSDVDKLFIQLVQTYNQLFEENPINASGVDAKAILSARLSKSRRLENLIAQLPGEKKNGLFGNLIALSLGLTPNFKSNFDLAEDAKLQLSKDTYDDDLDNLLAQIGDQYADLFLAAKNLSDAILLSDILRVNTEITKAPLSASMIKRYDEHHQDLTLLKALVRQQLPEKYKEIFFDQSKNGYAGYIDGGASQEEFYKFIKPILEKMDGTEELLVKLNREDLLRKQRTFDNGSIPHQIHLGELHAILRRQEDFYPFLKDNREKIEKILTFRIPYYVGPLARGNSRFAWMTRKSEETITPWNFEEVVDKGASAQSFIERMTNFDKNLPNEKVLPKHSLLYEYFTVYNELTKVKYVTEGMRKPAFLSGEQKKAIVDLLFKTNRKVTVKQLKEDYFKKIECFDSVEISGVEDRFNASLGTYHDLLKIIKDKDFLDNEENEDILEDIVLTLTLFEDREMIEERLKTYAHLFDDKVMKQLKRRRYTGWGRLSRKLINGIRDKQSGKTILDFLKSDGFANRNFMQLIHDDSLTFKEDIQKAQVSGQGDSLHEHIANLAGSPAIKKGILQTVKVVDELVKVMGRHKPENIVIEMARENQTTQKGQKNSRERMKRIEEGIKELGSQILKEHPVENTQLQNEKLYLYYLQNGRDMYVDQELDINRLSDYDVDHIVPQSFLKDDSIDNKVLTRSDKARGKSDNVPSEEVVKKMKNYWRQLLNAKLITQRKFDNLTKAERGGLSELDKAGFIKRQLVETRQITKHVAQILDSRMNTKYDENDKLIREVKVITLKSKLVSDFRKDFQFYKVREINNYHHAHDAYLNAVVGTALIKKYPKLESEFVYGDYKVYDVRKMIAKSEQEIGKATAKYFFYSNIMNFFKTEITLANGEIRKRPLIETNGETGEIVWDKGRDFATVRKVLSMPQVNIVKKTEVQTGGFSKESILPKRNSDKLIARKKDWDPKKYGGFDSPTVAYSVLVVAKVEKGKSKKLKSVKELLGITIMERSSFEKNPIDFLEAKGYKEVKKDLIIKLPKYSLFELENGRKRMLASAGELQKGNELALPSKYVNFLYLASHYEKLKGSPEDNEQKQLFVEQHKHYLDEIIEQISEFSKRVILADANLDKVLSAYNKHRDKPIREQAENIIHLFTLTNLGAPAAFKYFDTTIDRKRYTSTKEVLDATLIHQSITGLYETRIDLSQLGGDGGGGSGGGGSSGGTAPLEEEYRLFLEAPIQNVTLLEQWKREIPKVWAEINPPGLASTQAPIHVQLLSTALPVRVRQYPITLEAKRSLRETIRKFRAAGILRPVHSPWNTPLLPVRKSGTSEYRMVQDLREVNKRVETIHPTVPNPYTLLSLLPPDRIWYSVLDLKDAFFCIPLAPESQLIFAFEWADAEEGESGQLTWTRLPQGFKNSPTLFNEALNRDLQGFRLDHPSVSLLQYVDDLLIAADTQAACLSATRDLLMTLAELGYRVSGKKAQLCQEEVTYLGFKIHKGSRSLSNSRTQAILQIPVPKTKRQVREFLGKIGYCRLFIPGFAELAQPLYAATRPGNDPLVWGEKEEEAFQSLKLALTQPPALALPSLDKPFQLFVEETSGAAKGVLTQALGPWKRPVAYLSKRLDPVAAGWPRCLRAIAAAALLTREASKLTFGQDIEITSSHNLESLLRSPPDKWLTNARITQYQVLLLDPPRVRFKQTAALNPATLLPETDDTLPIHHCLDTLDSLTSTRPDLTDQPLAQAEATLFTDGSSYIRDGKRYAGAAVVTLDSVIWAEPLPIGTSAQKAELIALTKALEWSKDKSVNIYTDSRYAFATLHVHGMIYRERGWLTAGGKAIKNAPEILALLTAVWLPKRVAVMHCKGHQKDDAPTSTGNRRADEVAREVAIRPLSTQATISAGKRTADGSEFEKRTADGSEFESPKKKAKVE

SEQ ID NO: 6799 - protein, 2100 aa, synthetic construct
MPAAKRVKLDGGDKKYSIGLDIGTNSVGWAVITDEYKVPSKKFKVLGNTDRHSIKKNLIGALLFDSGETAEATRLKRTARRRYTRRKNRICYLQEIFSNEMAKVDDSFFHRLEESFLVEEDKKHERHPIFGNIVDEVAYHEKYPTIYHLRKKLVDSTDKADLRLIYLALAHMIKFRGHFLIEGDLNPDNSDVDKLFIQLVQTYNQLFEENPINASGVDAKAILSARLSKSRRLENLIAQLPGEKKNGLFGNLIALSLGLTPNFKSNFDLAEDAKLQLSKDTYDDDLDNLLAQIGDQYADLFLAAKNLSDAILLSDILRVNTEITKAPLSASMIKRYDEHHQDLTLLKALVRQQLPEKYKEIFFDQSKNGYAGYIDGGASQEEFYKFIKPILEKMDGTEELLVKLNREDLLRKQRTFDNGSIPHQIHLGELHAILRRQEDFYPFLKDNREKIEKILTFRIPYYVGPLARGNSRFAWMTRKSEETITPWNFEEVVDKGASAQSFIERMTNFDKNLPNEKVLPKHSLLYEYFTVYNELTKVKYVTEGMRKPAFLSGEQKKAIVDLLFKTNRKVTVKQLKEDYFKKIECFDSVEISGVEDRFNASLGTYHDLLKIIKDKDFLDNEENEDILEDIVLTLTLFEDREMIEERLKTYAHLFDDKVMKQLKRRRYTGWGRLSRKLINGIRDKQSGKTILDFLKSDGFANRNFMQLIHDDSLTFKEDIQKAQVSGQGDSLHEHIANLAGSPAIKKGILQTVKVVDELVKVMGRHKPENIVIEMARENQTTQKGQKNSRERMKRIEEGIKELGSQILKEHPVENTQLQNEKLYLYYLQNGRDMYVDQELDINRLSDYDVDHIVPQSFLKDDSIDNKVLTRSDKARGKSDNVPSEEVVKKMKNYWRQLLNAKLITQRKFDNLTKAERGGLSELDKAGFIKRQLVETRQITKHVAQILDSRMNTKYDENDKLIREVKVITLKSKLVSDFRKDFQFYKVREINNYHHAHDAYLNAVVGTALIKKYPKLESEFVYGDYKVYDVRKMIAKSEQEIGKATAKYFFYSNIMNFFKTEITLANGEIRKRPLIETNGETGEIVWDKGRDFATVRKVLSMPQVNIVKKTEVQTGGFSKESILPKRNSDKLIARKKDWDPKKYGGFDSPTVAYSVLVVAKVEKGKSKKLKSVKELLGITIMERSSFEKNPIDFLEAKGYKEVKKDLIIKLPKYSLFELENGRKRMLASAGELQKGNELALPSKYVNFLYLASHYEKLKGSPEDNEQKQLFVEQHKHYLDEIIEQISEFSKRVILADANLDKVLSAYNKHRDKPIREQAENIIHLFTLTNLGAPAAFKYFDTTIDRKRYTSTKEVLDATLIHQSITGLYETRIDLSQLGGDGGGGSGGGGSSGGTVSLQDEHRLFDIPVTTSLPDVWLQDFPQAWAETGGLGRAKCQAPIIIDLKPTAVPVSIKQYPMSLEAHMGIRQHIIKFLELGVLRPCRSPWNTPLLPVKKPGTQDYRPVQDLREINKRTVDIHPTVPNPYNLLSTLKPDYSWYTVLDLKDAFFCLPLAPQSQELFAFEWKDPERGISGQLTWTRLPQGFKNSPTLFDEALHRDLTDFRTQHPEVTLLQYVDDLLLAAPTKKACTQGTRHLLQELGEKGYRASAKKAQICQTKVTYLGYILSEGKRWLTPGRIETVARIPPPRNPREVREFLGTAGFCRLWIPGFAELAAPLYALTKESTPFTWQTEHQLAFEALKKALLSAPALGLPDTSKPFTLFLDERQGIAKGVLTQKLGPWKRPVAYLSKKLDPVAAGWPPCLRIMAATAMLVKDSAKLTLGQPLTVITPHTLEAIVRQPPDRWITNARLTHYQALLLDTDRVQFGPPVTLNPATLLPVPENQPSPHDCRQVLAETHGTREDLKDQELPDADHTWYTDGSSYLDSGTRRAGAAVVDGHNTIWAQSLPPGTSAQKAELIALTKALELSKGKKANIYTDSRYAFATAHTHGSIYERRGLLTSEGKEIKNKAEIIALLKALFLPQEVAIIHCPGHQKGQDPVAVGNRQADRVARQAAMAEVLTLATEPDNTSHITAGKRTADGSEFEKRTADGSEFESPKKKAKVE

SEQ ID NO: 6800 - protein, 1999 aa, synthetic construct
MPAAKRVKLDGGDKKYSIGLDIGTNSVGWAVITDEYKVPSKKFKVLGNTDRHSIKKNLIGALLFDSGETAEATRLKRTARRRYTRRKNRICYLQEIFSNEMAKVDDSFFHRLEESFLVEEDKKHERHPIFGNIVDEVAYHEKYPTIYHLRKKLVDSTDKADLRLIYLALAHMIKFRGHFLIEGDLNPDNSDVDKLFIQLVQTYNQLFEENPINASGVDAKAILSARLSKSRRLENLIAQLPGEKKNGLFGNLIALSLGLTPNFKSNFDLAEDAKLQLSKDTYDDDLDNLLAQIGDQYADLFLAAKNLSDAILLSDILRVNTEITKAPLSASMIKRYDEHHQDLTLLKALVRQQLPEKYKEIFFDQSKNGYAGYIDGGASQEEFYKFIKPILEKMDGTEELLVKLNREDLLRKQRTFDNGSIPHQIHLGELHAILRRQEDFYPFLKDNREKIEKILTFRIPYYVGPLARGNSRFAWMTRKSEETITPWNFEEVVDKGASAQSFIERMTNFDKNLPNEKVLPKHSLLYEYFTVYNELTKVKYVTEGMRKPAFLSGEQKKAIVDLLFKTNRKVTVKQLKEDYFKKIECFDSVEISGVEDRFNASLGTYHDLLKIIKDKDFLDNEENEDILEDIVLTLTLFEDREMIEERLKTYAHLFDDKVMKQLKRRRYTGWGRLSRKLINGIRDKQSGKTILDFLKSDGFANRNFMQLIHDDSLTFKEDIQKAQVSGQGDSLHEHIANLAGSPAIKKGILQTVKVVDELVKVMGRHKPENIVIEMARENQTTQKGQKNSRERMKRIEEGIKELGSQILKEHPVENTQLQNEKLYLYYLQNGRDMYVDQELDINRLSDYDVDHIVPQSFLKDDSIDNKVLTRSDKARGKSDNVPSEEVVKKMKNYWRQLLNAKLITQRKFDNLTKAERGGLSELDKAGFIKRQLVETRQITKHVAQILDSRMNTKYDENDKLIREVKVITLKSKLVSDFRKDFQFYKVREINNYHHAHDAYLNAVVGTALIKKYPKLESEFVYGDYKVYDVRKMIAKSEQEIGKATAKYFFYSNIMNFFKTEITLANGEIRKRPLIETNGETGEIVWDKGRDFATVRKVLSMPQVNIVKKTEVQTGGFSKESILPKRNSDKLIARKKDWDPKKYGGFDSPTVAYSVLVVAKVEKGKSKKLKSVKELLGITIMERSSFEKNPIDFLEAKGYKEVKKDLIIKLPKYSLFELENGRKRMLASAGELQKGNELALPSKYVNFLYLASHYEKLKGSPEDNEQKQLFVEQHKHYLDEIIEQISEFSKRVILADANLDKVLSAYNKHRDKPIREQAENIIHLFTLTNLGAPAAFKYFDTTIDRKRYTSTKEVLDATLIHQSITGLYETRIDLSQLGGDGGGGSGGGGSSGGGVLDTPPSHIGLEHLPPPPEVPQFPLNLERLQALQDLVHRSLEAGYISPWDGPGNNPVFPVRKPNGAWRFVHDLRATNALTKPIPALSPGPPDLTAPPTHPPHIICLDLKDAFFQIPVEDRFRFYLSFTLPSPGGLQPHRRFAWRVLPQGFINSPALFQRALQEPLRQVSAAFSQSLLVSYMDDILYASPTEEQRSQCYQALAARLRDLGFQVASEKTSQTPSPVPFLGQMVHEQIVTYQSLPTLQISSPISLHQLQAVLGDLQWVSRGTPTTRRPLQLLYSSLKRHHDPRAIIQLSPEQLQGIAELRQALSHNARSRYNEQEPLLAYVHLTRAGSTLVLFQKGAQFPLAYFQTPLTDNQASPWGLLLLLGCQYLQTQALSSYAKPILKYYHNLPKTSLDNWIQSSEDPRVQELLQLWPQISSQGIQPPGPWKTLITRAEVFLTPQFSPDPIPAALCLFSDGATGRGAYCLWKDHLLDFQAVPAPESAQKGELAGLLAGLAAAPPEPVNIWVDSKYLYSLLRTWVLGAWLQPDPVPSYALLYKSLLRHPAIVVGHVRSHSSASHPIASLNNYVDQLAGKRTADGSEFEKRTADGSEFESPKKKAKVE

SEQ ID NO: 6801 - protein, 2085 aa, synthetic construct
MPAAKRVKLDGGDKKYSIGLDIGTNSVGWAVITDEYKVPSKKFKVLGNTDRHSIKKNLIGALLFDSGETAEATRLKRTARRRYTRRKNRICYLQEIFSNEMAKVDDSFFHRLEESFLVEEDKKHERHPIFGNIVDEVAYHEKYPTIYHLRKKLVDSTDKADLRLIYLALAHMIKFRGHFLIEGDLNPDNSDVDKLFIQLVQTYNQLFEENPINASGVDAKAILSARLSKSRRLENLIAQLPGEKKNGLFGNLIALSLGLTPNFKSNFDLAEDAKLQLSKDTYDDDLDNLLAQIGDQYADLFLAAKNLSDAILLSDILRVNTEITKAPLSASMIKRYDEHHQDLTLLKALVRQQLPEKYKEIFFDQSKNGYAGYIDGGASQEEFYKFIKPILEKMDGTEELLVKLNREDLLRKQRTFDNGSIPHQIHLGELHAILRRQEDFYPFLKDNREKIEKILTFRIPYYVGPLARGNSRFAWMTRKSEETITPWNFEEVVDKGASAQSFIERMTNFDKNLPNEKVLPKHSLLYEYFTVYNELTKVKYVTEGMRKPAFLSGEQKKAIVDLLFKTNRKVTVKQLKEDYFKKIECFDSVEISGVEDRFNASLGTYHDLLKIIKDKDFLDNEENEDILEDIVLTLTLFEDREMIEERLKTYAHLFDDKVMKQLKRRRYTGWGRLSRKLINGIRDKQSGKTILDFLKSDGFANRNFMQLIHDDSLTFKEDIQKAQVSGQGDSLHEHIANLAGSPAIKKGILQTVKVVDELVKVMGRHKPENIVIEMARENQTTQKGQKNSRERMKRIEEGIKELGSQILKEHPVENTQLQNEKLYLYYLQNGRDMYVDQELDINRLSDYDVDHIVPQSFLKDDSIDNKVLTRSDKARGKSDNVPSEEVVKKMKNYWRQLLNAKLITQRKFDNLTKAERGGLSELDKAGFIKRQLVETRQITKHVAQILDSRMNTKYDENDKLIREVKVITLKSKLVSDFRKDFQFYKVREINNYHHAHDAYLNAVVGTALIKKYPKLESEFVYGDYKVYDVRKMIAKSEQEIGKATAKYFFYSNIMNFFKTEITLANGEIRKRPLIETNGETGEIVWDKGRDFATVRKVLSMPQVNIVKKTEVQTGGFSKESILPKRNSDKLIARKKDWDPKKYGGFDSPTVAYSVLVVAKVEKGKSKKLKSVKELLGITIMERSSFEKNPIDFLEAKGYKEVKKDLIIKLPKYSLFELENGRKRMLASAGELQKGNELALPSKYVNFLYLASHYEKLKGSPEDNEQKQLFVEQHKHYLDEIIEQISEFSKRVILADANLDKVLSAYNKHRDKPIREQAENIIHLFTLTNLGAPAAFKYFDTTIDRKRYTSTKEVLDATLIHQSITGLYETRIDLSQLGGDGGGGSGGGGSSGGVPWILKKPLELTIKLDLEEQQGTLLNNSILSKKGKEELKQLFEKYSALWQSWENQVGHRRIRPHKIATGTVKPTPQKQYHINPKAKPDIQIVINDLLKQGVLIQKESTMNTPVYPVPKPNGRWRMVLDYRAVNKVTPLIAVQNQHSYGILGSLFKGRYKTTIDLSNGFWAHPIVPEDYWITAFTWQGKQYCWTVLPQGFLNSPGLFTGDVVDLLQGIPNVEVYVDDVYISHDSEKEHLEYLDILFNRLKEAGYIISLKKSNIANSIVDFLGFQITNEGRGLTDTFKEKLENITAPTTLKQLQSILGLLNFARNFIPDFTELIAPLYALIPKSTKNYVPWQIEHSTTLETLITKLNGAEYLQGRKGDKTLIMKVNASYTTGYIRYYNEGEKKPISYVSIVFSKTELKFTELEKLLTTVHKGLLKALDLSMGQNIHVYSPIVSMQNIQKTPQTAKKALASRWLSWLSYLEDPRIRFFYDPQMPALKDLPAVDTGKDNKKHPSNFQHIFYTDGSAITSPTKEGHLNAGMGIVYFINKDGNLQKQQEWSISLGNHTAQFAEIAAFEFALKKCLPLGGNILVVTDSNYVAKAYNEELDVWASNGFVNNRKKPLKHISKWKSVADLKRLRPDVVVTHEPGHQKLDSSPHAYGNNLADQLATQASFKVHAGKRTADGSEFEKRTADGSEFESPKKKAKVE

SEQ ID NO: 6802 - protein, 2093 aa, synthetic construct
MPAAKRVKLDGGDKKYSIGLDIGTNSVGWAVITDEYKVPSKKFKVLGNTDRHSIKKNLIGALLFDSGETAEATRLKRTARRRYTRRKNRICYLQEIFSNEMAKVDDSFFHRLEESFLVEEDKKHERHPIFGNIVDEVAYHEKYPTIYHLRKKLVDSTDKADLRLIYLALAHMIKFRGHFLIEGDLNPDNSDVDKLFIQLVQTYNQLFEENPINASGVDAKAILSARLSKSRRLENLIAQLPGEKKNGLFGNLIALSLGLTPNFKSNFDLAEDAKLQLSKDTYDDDLDNLLAQIGDQYADLFLAAKNLSDAILLSDILRVNTEITKAPLSASMIKRYDEHHQDLTLLKALVRQQLPEKYKEIFFDQSKNGYAGYIDGGASQEEFYKFIKPILEKMDGTEELLVKLNREDLLRKQRTFDNGSIPHQIHLGELHAILRRQEDFYPFLKDNREKIEKILTFRIPYYVGPLARGNSRFAWMTRKSEETITPWNFEEVVDKGASAQSFIERMTNFDKNLPNEKVLPKHSLLYEYFTVYNELTKVKYVTEGMRKPAFLSGEQKKAIVDLLFKTNRKVTVKQLKEDYFKKIECFDSVEISGVEDRFNASLGTYHDLLKIIKDKDFLDNEENEDILEDIVLTLTLFEDREMIEERLKTYAHLFDDKVMKQLKRRRYTGWGRLSRKLINGIRDKQSGKTILDFLKSDGFANRNFMQLIHDDSLTFKEDIQKAQVSGQGDSLHEHIANLAGSPAIKKGILQTVKVVDELVKVMGRHKPENIVIEMARENQTTQKGQKNSRERMKRIEEGIKELGSQILKEHPVENTQLQNEKLYLYYLQNGRDMYVDQELDINRLSDYDVDHIVPQSFLKDDSIDNKVLTRSDKARGKSDNVPSEEVVKKMKNYWRQLLNAKLITQRKFDNLTKAERGGLSELDKAGFIKRQLVETRQITKHVAQILDSRMNTKYDENDKLIREVKVITLKSKLVSDFRKDFQFYKVREINNYHHAHDAYLNAVVGTALIKKYPKLESEFVYGDYKVYDVRKMIAKSEQEIGKATAKYFFYSNIMNFFKTEITLANGEIRKRPLIETNGETGEIVWDKGRDFATVRKVLSMPQVNIVKKTEVQTGGFSKESILPKRNSDKLIARKKDWDPKKYGGFDSPTVAYSVLVVAKVEKGKSKKLKSVKELLGITIMERSSFEKNPIDFLEAKGYKEVKKDLIIKLPKYSLFELENGRKRMLASAGELQKGNELALPSKYVNFLYLASHYEKLKGSPEDNEQKQLFVEQHKHYLDEIIEQISEFSKRVILADANLDKVLSAYNKHRDKPIREQAENIIHLFTLTNLGAPAAFKYFDTTIDRKRYTSTKEVLDATLIHQSITGLYETRIDLSQLGGDGGGGSGGGGSSGGTLQLEEEYRLFEPESTQKQEMDIWLKNFPQAWAETGGMGTAHCQAPVLIQLKATATPISIRQYPMPHEAYQGIKPHIRRMLDQGILKPCQSPWNTPLLPVKKPGTEDYRPVQDLREVNKRVEDIHPTVPNPYNLLSTLPPSHPWYTVLDLKDAFFCLRLHSESQLLFAFEWRDPEIGLSGQLTWTRLPQGFKNSPTLFNEALHSDLADFRVRYPALVLLQYVDDLLLAAATRTECLEGTKALLETLGNKGYRASAKKAQICLQEVTYLGYSLKDGQRWLTKARKEAILSIPVPKNSRQVREFLGTAGYCRLWIPGFAELAAPLYPLTRPGTLFQWGTEQQLAFEDIKKALLSSPALGLPDITKPFELFIDENSGFAKGVLVQKLGPWKRPVAYLSKKLDTVASGWPPCLRMVAAIAILVKDAGKLTLGQPLTILTSHPVEALVRQPPNKWLSNARMTHYQAMLLDAERVHFGPTVSLNPATLLPLPSGGNHHDCLQILAETHGTRPDLTDQPLPDADLTWYTDGSSFIRNGEREAGAAVTTESEVIWAAPLPPGTSAQRAELIALTQALKMAEGKKLTVYTDSRYAFATTHVHGEIYRRRGWLTSEGKEIKNKNEILALLEALFLPKRLSIIHCPGHQKGDSPQAKGNRLADDTAKKAATETHSSLTVLPAGKRTADGSEFEKRTADGSEFESPKKKAKVE

SEQ ID NO: 6803 - protein, 2125 aa, synthetic construct
MPAAKRVKLDGGDKKYSIGLDIGTNSVGWAVITDEYKVPSKKFKVLGNTDRHSIKKNLIGALLFDSGETAEATRLKRTARRRYTRRKNRICYLQEIFSNEMAKVDDSFFHRLEESFLVEEDKKHERHPIFGNIVDEVAYHEKYPTIYHLRKKLVDSTDKADLRLIYLALAHMIKFRGHFLIEGDLNPDNSDVDKLFIQLVQTYNQLFEENPINASGVDAKAILSARLSKSRRLENLIAQLPGEKKNGLFGNLIALSLGLTPNFKSNFDLAEDAKLQLSKDTYDDDLDNLLAQIGDQYADLFLAAKNLSDAILLSDILRVNTEITKAPLSASMIKRYDEHHQDLTLLKALVRQQLPEKYKEIFFDQSKNGYAGYIDGGASQEEFYKFIKPILEKMDGTEELLVKLNREDLLRKQRTFDNGSIPHQIHLGELHAILRRQEDFYPFLKDNREKIEKILTFRIPYYVGPLARGNSRFAWMTRKSEETITPWNFEEVVDKGASAQSFIERMTNFDKNLPNEKVLPKHSLLYEYFTVYNELTKVKYVTEGMRKPAFLSGEQKKAIVDLLFKTNRKVTVKQLKEDYFKKIECFDSVEISGVEDRFNASLGTYHDLLKIIKDKDFLDNEENEDILEDIVLTLTLFEDREMIEERLKTYAHLFDDKVMKQLKRRRYTGWGRLSRKLINGIRDKQSGKTILDFLKSDGFANRNFMQLIHDDSLTFKEDIQKAQVSGQGDSLHEHIANLAGSPAIKKGILQTVKVVDELVKVMGRHKPENIVIEMARENQTTQKGQKNSRERMKRIEEGIKELGSQILKEHPVENTQLQNEKLYLYYLQNGRDMYVDQELDINRLSDYDVDHIVPQSFLKDDSIDNKVLTRSDKARGKSDNVPSEEVVKKMKNYWRQLLNAKLITQRKFDNLTKAERGGLSELDKAGFIKRQLVETRQITKHVAQILDSRMNTKYDENDKLIREVKVITLKSKLVSDFRKDFQFYKVREINNYHHAHDAYLNAVVGTALIKKYPKLESEFVYGDYKVYDVRKMIAKSEQEIGKATAKYFFYSNIMNFFKTEITLANGEIRKRPLIETNGETGEIVWDKGRDFATVRKVLSMPQVNIVKKTEVQTGGFSKESILPKRNSDKLIARKKDWDPKKYGGFDSPTVAYSVLVVAKVEKGKSKKLKSVKELLGITIMERSSFEKNPIDFLEAKGYKEVKKDLIIKLPKYSLFELENGRKRMLASAGELQKGNELALPSKYVNFLYLASHYEKLKGSPEDNEQKQLFVEQHKHYLDEIIEQISEFSKRVILADANLDKVLSAYNKHRDKPIREQAENIIHLFTLTNLGAPAAFKYFDTTIDRKRYTSTKEVLDATLIHQSITGLYETRIDLSQLGGDGGGGSGGGGSSGGLLGRDLLTKLKAQIQFSTEGPQVTWEDRPAMCLVLNLEEEYRLHEKPVPPSIDPSWLQLFPMVWAEKAGMGLANQVPPVVVELKSDASPVAVRQYPMSKEAREGIRPHIQRFLDLGILVPCQSPWNTPLLPVKKPGTNDYRPVQDLREVNKRVQDIHPTVPNPYNLLSSLPPSHTWYSVLDLKDAFFCLKLHPNSQPLFAFEWRDPEKGNTGQLTWTRLPQGFKNSPTLFNEALHRDLASFRALNPQVVMLQYVDDLLVAAPTYRDCKEGTRRLLQELSKLGYRVSAKKAQLCREEVTYLGYLLKGGKRWLTPARKATVMKIPTPTTPRQVREFLGTAGFCRLWIPGFASLAAPLYPLTRPKVPFTWTEAHQEAFGRIKEALLSAPALALPDLTKPFALYVDEKEGVARGVLTQTLGPWRRPVAYLSKKLDPVASGWPTCLKAIAAVALLLKDADKLTLGQNVLVIAPHNLESIVRQPPDRWMTNARMTHYQSLLLNERVSFAPPAILNPATLLPVESDDTPIHICSEILAEETGTRPDLRDQPLPGVPAWYTDGSSFIMDGRRQAGAAIVDNKRTVWASNLPEGTSAQKAELIALTQALRLAEGKSINIYTDSRYAFATAHVHGAIYKQRGWLTSAGKDIKNKEEILALLEAIHLPKRVAIIHCPGHQRGTDPVATGNRKADEAAKQAAQSTRILTETTKNAGKRTADGSEFEKRTADGSEFESPKKKAKVE

SEQ ID NO: 6804 - protein, 2125 aa, synthetic construct
MPAAKRVKLDGGDKKYSIGLDIGTNSVGWAVITDEYKVPSKKFKVLGNTDRHSIKKNLIGALLFDSGETAEATRLKRTARRRYTRRKNRICYLQEIFSNEMAKVDDSFFHRLEESFLVEEDKKHERHPIFGNIVDEVAYHEKYPTIYHLRKKLVDSTDKADLRLIYLALAHMIKFRGHFLIEGDLNPDNSDVDKLFIQLVQTYNQLFEENPINASGVDAKAILSARLSKSRRLENLIAQLPGEKKNGLFGNLIALSLGLTPNFKSNFDLAEDAKLQLSKDTYDDDLDNLLAQIGDQYADLFLAAKNLSDAILLSDILRVNTEITKAPLSASMIKRYDEHHQDLTLLKALVRQQLPEKYKEIFFDQSKNGYAGYIDGGASQEEFYKFIKPILEKMDGTEELLVKLNREDLLRKQRTFDNGSIPHQIHLGELHAILRRQEDFYPFLKDNREKIEKILTFRIPYYVGPLARGNSRFAWMTRKSEETITPWNFEEVVDKGASAQSFIERMTNFDKNLPNEKVLPKHSLLYEYFTVYNELTKVKYVTEGMRKPAFLSGEQKKAIVDLLFKTNRKVTVKQLKEDYFKKIECFDSVEISGVEDRFNASLGTYHDLLKIIKDKDFLDNEENEDILEDIVLTLTLFEDREMIEERLKTYAHLFDDKVMKQLKRRRYTGWGRLSRKLINGIRDKQSGKTILDFLKSDGFANRNFMQLIHDDSLTFKEDIQKAQVSGQGDSLHEHIANLAGSPAIKKGILQTVKVVDELVKVMGRHKPENIVIEMARENQTTQKGQKNSRERMKRIEEGIKELGSQILKEHPVENTQLQNEKLYLYYLQNGRDMYVDQELDINRLSDYDVDHIVPQSFLKDDSIDNKVLTRSDKARGKSDNVPSEEVVKKMKNYWRQLLNAKLITQRKFDNLTKAERGGLSELDKAGFIKRQLVETRQITKHVAQILDSRMNTKYDENDKLIREVKVITLKSKLVSDFRKDFQFYKVREINNYHHAHDAYLNAVVGTALIKKYPKLESEFVYGDYKVYDVRKMIAKSEQEIGKATAKYFFYSNIMNFFKTEITLANGEIRKRPLIETNGETGEIVWDKGRDFATVRKVLSMPQVNIVKKTEVQTGGFSKESILPKRNSDKLIARKKDWDPKKYGGFDSPTVAYSVLVVAKVEKGKSKKLKSVKELLGITIMERSSFEKNPIDFLEAKGYKEVKKDLIIKLPKYSLFELENGRKRMLASAGELQKGNELALPSKYVNFLYLASHYEKLKGSPEDNEQKQLFVEQHKHYLDEIIEQISEFSKRVILADANLDKVLSAYNKHRDKPIREQAENIIHLFTLTNLGAPAAFKYFDTTIDRKRYTSTKEVLDATLIHQSITGLYETRIDLSQLGGDGGGGSGGGGSSGGLLGRDLLTKLKAQIQFSTEGPQVTWEDRPAMCLVLNLEEEYRLHEKPVPPSIDPSWLQLFPMVWAEKAGMGLANQVPPVVVELKSDASPVAVRQYPMSKEAREGIRPHIQRFLDLGILVPCQSPWNTPLLPVKKPGTNDYRPVQDLREVNKRVQDIHPTVPNPYNLLSSLPPSHTWYSVLDLKDAFFCLKLHPNSQPLFAFEWRDPEKGNTGQLTWTRLPQGFKNSPTLFNEALHRDLASFRALNPQVVMLQYVDDLLVAAPTYRDCKEGTRRLLQELSKLGYRVSAKKAQLCREEVTYLGYLLKGGKRWLTPARKATVMKIPTPTTPRQVREFLGKAGFCRLFIPGFASLAAPLYPLTRPKVPFTWTEAHQEAFGRIKEALLSAPALALPDLTKPFALYVDEKEGVARGVLTQTLGPWRRPVAYLSKKLDPVASGWPTCLKAIAAVALLLKDADKLTLGQNVLVIAPHNLESIVRQPPDRWMTNARMTHYQSLLLNERVSFAPPAILNPATLLPVESDDTPIHICSEILAEETGTRPDLRDQPLPGVPAWYTDGSSFIMDGRRQAGAAIVDNKRTVWASNLPEGTSAQKAELIALTQALRLAEGKSINIYTDSRYAFATAHVHGAIYKQRGWLTSAGKDIKNKEEILALLEAIHLPKRVAIIHCPGHQRGTDPVATGNRKADEAAKQAAQSTRILTETTKNAGKRTADGSEFEKRTADGSEFESPKKKAKVE

SEQ ID NO: 6805 - protein, 2094 aa, synthetic construct
MPAAKRVKLDGGDKKYSIGLDIGTNSVGWAVITDEYKVPSKKFKVLGNTDRHSIKKNLIGALLFDSGETAEATRLKRTARRRYTRRKNRICYLQEIFSNEMAKVDDSFFHRLEESFLVEEDKKHERHPIFGNIVDEVAYHEKYPTIYHLRKKLVDSTDKADLRLIYLALAHMIKFRGHFLIEGDLNPDNSDVDKLFIQLVQTYNQLFEENPINASGVDAKAILSARLSKSRRLENLIAQLPGEKKNGLFGNLIALSLGLTPNFKSNFDLAEDAKLQLSKDTYDDDLDNLLAQIGDQYADLFLAAKNLSDAILLSDILRVNTEITKAPLSASMIKRYDEHHQDLTLLKALVRQQLPEKYKEIFFDQSKNGYAGYIDGGASQEEFYKFIKPILEKMDGTEELLVKLNREDLLRKQRTFDNGSIPHQIHLGELHAILRRQEDFYPFLKDNREKIEKILTFRIPYYVGPLARGNSRFAWMTRKSEETITPWNFEEVVDKGASAQSFIERMTNFDKNLPNEKVLPKHSLLYEYFTVYNELTKVKYVTEGMRKPAFLSGEQKKAIVDLLFKTNRKVTVKQLKEDYFKKIECFDSVEISGVEDRFNASLGTYHDLLKIIKDKDFLDNEENEDILEDIVLTLTLFEDREMIEERLKTYAHLFDDKVMKQLKRRRYTGWGRLSRKLINGIRDKQSGKTILDFLKSDGFANRNFMQLIHDDSLTFKEDIQKAQVSGQGDSLHEHIANLAGSPAIKKGILQTVKVVDELVKVMGRHKPENIVIEMARENQTTQKGQKNSRERMKRIEEGIKELGSQILKEHPVENTQLQNEKLYLYYLQNGRDMYVDQELDINRLSDYDVDHIVPQSFLKDDSIDNKVLTRSDKARGKSDNVPSEEVVKKMKNYWRQLLNAKLITQRKFDNLTKAERGGLSELDKAGFIKRQLVETRQITKHVAQILDSRMNTKYDENDKLIREVKVITLKSKLVSDFRKDFQFYKVREINNYHHAHDAYLNAVVGTALIKKYPKLESEFVYGDYKVYDVRKMIAKSEQEIGKATAKYFFYSNIMNFFKTEITLANGEIRKRPLIETNGETGEIVWDKGRDFATVRKVLSMPQVNIVKKTEVQTGGFSKESILPKRNSDKLIARKKDWDPKKYGGFDSPTVAYSVLVVAKVEKGKSKKLKSVKELLGITIMERSSFEKNPIDFLEAKGYKEVKKDLIIKLPKYSLFELENGRKRMLASAGELQKGNELALPSKYVNFLYLASHYEKLKGSPEDNEQKQLFVEQHKHYLDEIIEQISEFSKRVILADANLDKVLSAYNKHRDKPIREQAENIIHLFTLTNLGAPAAFKYFDTTIDRKRYTSTKEVLDATLIHQSITGLYETRIDLSQLGGDGGGGSGGGGSSGGTLNLEDEYRLYETSAEPEVSPGSTWLSDFPQAWAETGGMGLAVRQAPLIIPLKATSTPVSIKQYPMSQEAKLGIKPHIQRLLDQGILVPCQSPWNTPLLPVKKPGTNDYRPVQDLREVNKRVEDIHPTVPNPYNLLSGLPPSHRWYTVLDLKDAFFCLRLHPTSQPLFAFEWRDPGMGISGQLTWTRLPQGFKNSPTLFNEALHRDLADFRIQHPDLILLQYVDDILLAATSELDCQQGTRALLLTLGNLGYRASAKKAQLCQKQVKYLGYLLKEGQRWLTEARKETVMGQPTPKTPRQLREFLGKAGFCRLFIPGFAEMAAPLYPLTKPGTLFNWGPDQQKAYQEIKQALLTAPALGLPDLTKPFELFVDEKQGYAKGVLTQKLGPWRRPVAYLSKKLDPVAAGWPPCLRMVAAIAVLRKDAGKLTMGQPLVILAPHAVEALVKQPPDRWLSNARMTHYQAMLLDTDRVQFGPVVALNPATLLPLPEEGAPHDCLEILAETHGTRPDLTDQPIPDADHTWYTDGSSFLQEGQRKAGAAVTTETEVIWARALPAGTSAQRAELIALTQALKMAEGKRLNVYTDSRYAFATAHIHGEIYRRRGWLTSEGREIKNKSEILALLKALFLPKRLSIIHCLGHQKGDSAEARGNRLADQAAREAAIKTPPDTSTLLAGKRTADGSEFEKRTADGSEFESPKKKAKVE

SEQ ID NO: 6806 - protein, 2094 aa, synthetic construct
MPAAKRVKLDGGDKKYSIGLDIGTNSVGWAVITDEYKVPSKKFKVLGNTDRHSIKKNLIGALLFDSGETAEATRLKRTARRRYTRRKNRICYLQEIFSNEMAKVDDSFFHRLEESFLVEEDKKHERHPIFGNIVDEVAYHEKYPTIYHLRKKLVDSTDKADLRLIYLALAHMIKFRGHFLIEGDLNPDNSDVDKLFIQLVQTYNQLFEENPINASGVDAKAILSARLSKSRRLENLIAQLPGEKKNGLFGNLIALSLGLTPNFKSNFDLAEDAKLQLSKDTYDDDLDNLLAQIGDQYADLFLAAKNLSDAILLSDILRVNTEITKAPLSASMIKRYDEHHQDLTLLKALVRQQLPEKYKEIFFDQSKNGYAGYIDGGASQEEFYKFIKPILEKMDGTEELLVKLNREDLLRKQRTFDNGSIPHQIHLGELHAILRRQEDFYPFLKDNREKIEKILTFRIPYYVGPLARGNSRFAWMTRKSEETITPWNFEEVVDKGASAQSFIERMTNFDKNLPNEKVLPKHSLLYEYFTVYNELTKVKYVTEGMRKPAFLSGEQKKAIVDLLFKTNRKVTVKQLKEDYFKKIECFDSVEISGVEDRFNASLGTYHDLLKIIKDKDFLDNEENEDILEDIVLTLTLFEDREMIEERLKTYAHLFDDKVMKQLKRRRYTGWGRLSRKLINGIRDKQSGKTILDFLKSDGFANRNFMQLIHDDSLTFKEDIQKAQVSGQGDSLHEHIANLAGSPAIKKGILQTVKVVDELVKVMGRHKPENIVIEMARENQTTQKGQKNSRERMKRIEEGIKELGSQILKEHPVENTQLQNEKLYLYYLQNGRDMYVDQELDINRLSDYDVDHIVPQSFLKDDSIDNKVLTRSDKARGKSDNVPSEEVVKKMKNYWRQLLNAKLITQRKFDNLTKAERGGLSELDKAGFIKRQLVETRQITKHVAQILDSRMNTKYDENDKLIREVKVITLKSKLVSDFRKDFQFYKVREINNYHHAHDAYLNAVVGTALIKKYPKLESEFVYGDYKVYDVRKMIAKSEQEIGKATAKYFFYSNIMNFFKTEITLANGEIRKRPLIETNGETGEIVWDKGRDFATVRKVLSMPQVNIVKKTEVQTGGFSKESILPKRNSDKLIARKKDWDPKKYGGFDSPTVAYSVLVVAKVEKGKSKKLKSVKELLGITIMERSSFEKNPIDFLEAKGYKEVKKDLIIKLPKYSLFELENGRKRMLASAGELQKGNELALPSKYVNFLYLASHYEKLKGSPEDNEQKQLFVEQHKHYLDEIIEQISEFSKRVILADANLDKVLSAYNKHRDKPIREQAENIIHLFTLTNLGAPAAFKYFDTTIDRKRYTSTKEVLDATLIHQSITGLYETRIDLSQLGGDGGGGSGGGGSSGGTLGIEDEYRLHETSTEPDVSLGSTWLSDFPQAWAETGGMGLAVRQAPLIIPLKATSTPVSIQQYPMSHEARLGIKPHIQRLLDQGILVPCQSPWNTPLLPVKKPGTNDYRPVQDLREVNKRVEDIHPTVPNPYNLLSGLPPSHQWYTVLDLKDAFFCLRLHPTSQPLFAFEWRDPGMGISGQLTWTRLPQGFKNSPTLFNEALHRDLADFRIQHPDLILLQYVDDILLAATSELDCQQGTRALLQTLGDLGYRASAKKAQICQKQVKYLGYLLREGQRWLTEARKETVMGQPVPKTPRQLREFLGTAGFCRLWIPGFAEMAAPLYPLTKPGTLFSWGPDQQKAYQEIKQALLTAPALGLPDLTKPFELFVDEKQGYAKGVLTQKLGPWRRPVAYLSKKLDPVAAGWPPCLRMVAAIAVLTKDAGKLTMGQPLVILAPHAVEALVKQPPDRWLSNARMTHYQAMLLDTDRVQFGPVVALNPATLLPLPEEGAPHDCLEILAETHGTRPDLTDQPIPDADHTWYTDGSSFLQEGQRKAGAAVTTETEVIWAGALPAGTSAQRAELIALTQALKMAEGKRLNVYTDSRYAFATAHIHGEIYRRRGWLTSEGREIKNKSEILALLKALFLPKRLSIIHCLGHQKGDSAEARGNRLADQAAREAAIKTPPDTSTLLAGKRTADGSEFEKRTADGSEFESPKKKAKVE

SEQ ID NO: 6807 - protein, 2094 aa, synthetic construct; identical to SEQ ID NO: 6806

SEQ ID NO: 6808 - protein, 2094 aa, synthetic construct
MPAAKRVKLDGGDKKYSIGLDIGTNSVGWAVITDEYKVPSKKFKVLGNTDRHSIKKNLIGALLFDSGETAEATRLKRTARRRYTRRKNRICYLQEIFSNEMAKVDDSFFHRLEESFLVEEDKKHERHPIFGNIVDEVAYHEKYPTIYHLRKKLVDSTDKADLRLIYLALAHMIKFRGHFLIEGDLNPDNSDVDKLFIQLVQTYNQLFEENPINASGVDAKAILSARLSKSRRLENLIAQLPGEKKNGLFGNLIALSLGLTPNFKSNFDLAEDAKLQLSKDTYDDDLDNLLAQIGDQYADLFLAAKNLSDAILLSDILRVNTEITKAPLSASMIKRYDEHHQDLTLLKALVRQQLPEKYKEIFFDQSKNGYAGYIDGGASQEEFYKFIKPILEKMDGTEELLVKLNREDLLRKQRTFDNGSIPHQIHLGELHAILRRQEDFYPFLKDNREKIEKILTFRIPYYVGPLARGNSRFAWMTRKSEETITPWNFEEVVDKGASAQSFIERMTNFDKNLPNEKVLPKHSLLYEYFTVYNELTKVKYVTEGMRKPAFLSGEQKKAIVDLLFKTNRKVTVKQLKEDYFKKIECFDSVEISGVEDRFNASLGTYHDLLKIIKDKDFLDNEENEDILEDIVLTLTLFEDREMIEERLKTYAHLFDDKVMKQLKRRRYTGWGRLSRKLINGIRDKQSGKTILDFLKSDGFANRNFMQLIHDDSLTFKEDIQKAQVSGQGDSLHEHIANLAGSPAIKKGILQTVKVVDELVKVMGRHKPENIVIEMARENQTTQKGQKNSRERMKRIEEGIKELGSQILKEHPVENTQLQNEKLYLYYLQNGRDMYVDQELDINRLSDYDVDHIVPQSFLKDDSIDNKVLTRSDKARGKSDNVPSEEVVKKMKNYWRQLLNAKLITQRKFDNLTKAERGGLSELDKAGFIKRQLVETRQITKHVAQILDSRMNTKYDENDKLIREVKVITLKSKLVSDFRKDFQFYKVREINNYHHAHDAYLNAVVGTALIKKYPKLESEFVYGDYKVYDVRKMIAKSEQEIGKATAKYFFYSNIMNFFKTEITLANGEIRKRPLIETNGETGEIVWDKGRDFATVRKVLSMPQVNIVKKTEVQTGGFSKESILPKRNSDKLIARKKDWDPKKYGGFDSPTVAYSVLVVAKVEKGKSKKLKSVKELLGITIMERSSFEKNPIDFLEAKGYKEVKKDLIIKLPKYSLFELENGRKRMLASAGELQKGNELALPSKYVNFLYLASHYEKLKGSPEDNEQKQLFVEQHKHYLDEIIEQISEFSKRVILADANLDKVLSAYNKHRDKPIREQAENIIHLFTLTNLGAPAAFKYFDTTIDRKRYTSTKEVLDATLIHQSITGLYETRIDLSQLGGDGGGGSGGGGSSGGTLNIEDEYRLHETSKEPDVSLGSTWLSDFPQAWAETGGMGLAVRQAPLIIPLKATSTPVSIKQYPMSQEARLGIKPHIQRLLDQGILVPCQSPWNTPLLPVKKPGTNDYRPVQDLREVNKRVEDIHPTVPNPYNLLSGLPPSHQWYTVLDLKDAFFCLRLHPTSQPLFAFEWRDPEMGISGQLTWTRLPQGFKNSPTLFNEALHRDLAGFRIQHPDLILLQYVDDLLLAATSELDCQQGTRALLQTLGDLGYRASAKKAQICQKQVKYLGYLLKEGQRWLTEARKETVMGQPIPKTPRQLREFLGTAGFCRLWIPGFAEMAAPLYPLTKPGTLFNWGPDQQKAFQEIKQALLTAPALGLPDLTKPFELFVDEKQGYAKGVLTQKLGPWRRPVAYLSKKLDPVAAGWPPCLRMVAAIAVLTKDAGKLTMGQPLVILAPHAVEALVKQPPDRWLSNARMTHYQALLLDTDRVQFGPVVALNPATLLPLPEEGLQHDCLDILAEAHGTRSDLMDQPLPDADHTWYTDGSSFLQEGQRKAGAAVTTETEVIWARALPAGTSAQRAELIALTQALKMAEGKKLNVYTDSRYAFATAHIHGEIYRRRGWLTSEGKEIKNKDEILALLKALFLPKRLSIIHCPGHQKGNSAEARGNRMADQAAREVATRETPETSTLLAGKRTADGSEFEKRTADGSEFESPKKKAKVE

SEQ ID NO: 6809 - protein, 2094 aa, synthetic construct
MPAAKRVKLDGGDKKYSIGLDIGTNSVGWAVITDEYKVPSKKFKVLGNTDRHSIKKNLIGALLFDSGETAEATRLKRTARRRYTRRKNRICYLQEIFSNEMAKVDDSFFHRLEESFLVEEDKKHERHPIFGNIVDEVAYHEKYPTIYHLRKKLVDSTDKADLRLIYLALAHMIKFRGHFLIEGDLNPDNSDVDKLFIQLVQTYNQLFEENPINASGVDAKAILSARLSKSRRLENLIAQLPGEKKNGLFGNLIALSLGLTPNFKSNFDLAEDAKLQLSKDTYDDDLDNLLAQIGDQYADLFLAAKNLSDAILLSDILRVNTEITKAPLSASMIKRYDEHHQDLTLLKALVRQQLPEKYKEIFFDQSKNGYAGYIDGGASQEEFYKFIKPILEKMDGTEELLVKLNREDLLRKQRTFDNGSIPHQIHLGELHAILRRQEDFYPFLKDNREKIEKILTFRIPYYVGPLARGNSRFAWMTRKSEETITPWNFEEVVDKGASAQSFIERMTNFDKNLPNEKVLPKHSLLYEYFTVYNELTKVKYVTEGMRKPAFLSGEQKKAIVDLLFKTNRKVTVKQLKEDYFKKIECFDSVEISGVEDRFNASLGTYHDLLKIIKDKDFLDNEENEDILEDIVLTLTLFEDREMIEERLKTYAHLFDDKVMKQLKRRRYTGWGRLSRKLINGIRDKQSGKTILDFLKSDGFANRNFMQLIHDDSLTFKEDIQKAQVSGQGDSLHEHIANLAGSPAIKKGILQTVKVVDELVKVMGRHKPENIVIEMARENQTTQKGQKNSRERMKRIEEGIKELGSQILKEHPVENTQLQNEKLYLYYLQNGRDMYVDQELDINRLSDYDVDHIVPQSFLKDDSIDNKVLTRSDKARGKSDNVPSEEVVKKMKNYWRQLLNAKLITQRKFDNLTKAERGGLSELDKAGFIKRQLVETRQITKHVAQILDSRMNTKYDENDKLIREVKVITLKSKLVSDFRKDFQFYKVREINNYHHAHDAYLNAVVGTALIKKYPKLESEFVYGDYKVYDVRKMIAKSEQEIGKATAKYFFYSNIMNFFKTEITLANGEIRKRPLIETNGETGEIVWDKGRDFATVRKVLSMPQVNIVKKTEVQTGGFSKESILPKRNSDKLIARKKDWDPKKYGGFDSPTVAYSVLVVAKVEKGKSKKLKSVKELLGITIMERSSFEKNPIDFLEAKGYKEVKKDLIIKLPKYSLFELENGRKRMLASAGELQKGNELALPSKYVNFLYLASHYEKLKGSPEDNEQKQLFVEQHKHYLDEIIEQISEFSKRVILADANLDKVLSAYNKHRDKPIREQAENIIHLFTLTNLGAPAAFKYFDTTIDRKRYTSTKEVLDATLIHQSITGLYETRIDLSQLGGDGGGGSGGGGSSGGTLNIEDEHRLHETSKEPDVSLGSTWLSDFPQAWAETGGMGLAVRQAPLIIPLKATSTPVSIKQYPMSQEARLGIKPHIQRLLDQGILVPCQSPWNTPLLPVKKPGTNDYRPVQDLREVNKRVEDIHPTVPNPYNLLSGLPPSHQWYTVLDLKDAFFCLRLHPTSQPLFAFEWRDPEMGISGQLTWTRLPQGFKNSPTLFNEALHRDLADFRIQHPDLILLQYVDDLLLAATSELDCQQGTRALLQTLGNLGYRASAKKAQICQKQVKYLGYLLKEGQRWLTEARKETVMGQPTPKTPRQLREFLGTAGFCRLWIPGFAEMAAPLYPLTKPGTLFNWGPDQQKAYQEIKQALLTAPALGLPDLTKPFELFVDEKQGYAKGVLTQKLGPWRRPVAYLSKKLDPVAAGWPPCLRMVAAIAVLTKDAGKLTMGQPLVILAPHAVEALVKQPPDRWLSNARMTHYQALLLDTDRVQFGPVVALNPATLLPLPEEGLQHNCLDILAEAHGTRPDLTDQPLPDADHTWYTDGSSLLQEGQRKAGAAVTTETEVIWAKALPAGTSAQRAELIALTQALKMAEGKKLNVYTDSRYAFATAHIHGEIYRRRGWLTSEGKEIKNKDEILALLKALFLPKRLSIIHCPGHQKGHSAEARGNRMADQAARKAAITETPDTSTLLAGKRTADGSEFEKRTADGSEFESPKKKAKVE

SEQ ID NO: 6810 - protein, 2088 aa, synthetic construct
MPAAKRVKLDGGDKKYSIGLDIGTNSVGWAVITDEYKVPSKKFKVLGNTDRHSIKKNLIGALLFDSGETAEATRLKRTARRRYTRRKNRICYLQEIFSNEMAKVDDSFFHRLEESFLVEEDKKHERHPIFGNIVDEVAYHEKYPTIYHLRKKLVDSTDKADLRLIYLALAHMIKFRGHFLIEGDLNPDNSDVDKLFIQLVQTYNQLFEENPINASGVDAKAILSARLSKSRRLENLIAQLPGEKKNGLFGNLIALSLGLTPNFKSNFDLAEDAKLQLSKDTYDDDLDNLLAQIGDQYADLFLAAKNLSDAILLSDILRVNTEITKAPLSASMIKRYDEHHQDLTLLKALVRQQLPEKYKEIFFDQSKNGYAGYIDGGASQEEFYKFIKPILEKMDGTEELLVKLNREDLLRKQRTFDNGSIPHQIHLGELHAILRRQEDFYPFLKDNREKIEKILTFRIPYYVGPLARGNSRFAWMTRKSEETITPWNFEEVVDKGASAQSFIERMTNFDKNLPNEKVLPKHSLLYEYFTVYNELTKVKYVTEGMRKPAFLSGEQKKAIVDLLFKTNRKVTVKQLKEDYFKKIECFDSVEISGVEDRFNASLGTYHDLLKIIKDKDFLDNEENEDILEDIVLTLTLFEDREMIEERLKTYAHLFDDKVMKQLKRRRYTGWGRLSRKLINGIRDKQSGKTILDFLKSDGFANRNFMQLIHDDSLTFKEDIQKAQVSGQGDSLHEHIANLAGSPAIKKGILQTVKVVDELVKVMGRHKPENIVIEMARENQTTQKGQKNSRERMKRIEEGIKELGSQILKEHPVENTQLQNEKLYLYYLQNGRDMYVDQELDINRLSDYDVDHIVPQSFLKDDSIDNKVLTRSDKARGKSDNVPSEEVVKKMKNYWRQLLNAKLITQRKFDNLTKAERGGLSELDKAGFIKRQLVETRQITKHVAQILDSRMNTKYDENDKLIREVKVITLKSKLVSDFRKDFQFYKVREINNYHHAHDAYLNAVVGTALIKKYPKLESEFVYGDYKVYDVRKMIAKSEQEIGKATAKYFFYSNIMNFFKTEITLANGEIRKRPLIETNGETGEIVWDKGRDFATVRKVLSMPQVNIVKKTEVQTGGFSKESILPKRNSDKLIARKKDWDPKKYGGFDSPTVAYSVLVVAKVEKGKSKKLKSVKELLGITIMERSSFEKNPIDFLEAKGYKEVKKDLIIKLPKYSLFELENGRKRMLASAGELQKGNELALPSKYVNFLYLASHYEKLKGSPEDNEQKQLFVEQHKHYLDEIIEQISEFSKRVILADANLDKVLSAYNKHRDKPIREQAENIIHLFTLTNLGAPAAFKYFDTTIDRKRYTSTKEVLDATLIHQSITGLYETRIDLSQLGGDGGGGSGGGGSSGGTLQLDDEYRLYSPLVKPDQNIQFWLEQFPQAWAETAGMGLAKQVPPQVIQLKASATPVSVRQYPLSKEAQEGIRPHVQRLIQQGILVPVQSPWNTPLLPVRKPGTNDYRPVQDLREVNKRVQDIHPTVPNPYNLLCALPPQRSWYTVLDLKDAFFCLRLHPTSQPLFAFEWRDPGTGRTGQLTWTRLPQGFKNSPTIFDEALHRDLANFRIQHPQVTLLQYVDDLLLAGATKQDCLEGTKALLLELSDLGYRASAKKAQICRREVTYLGYSLRDGQRWLTEARKKTVVQIPAPTTAKQVREFLGTAGFCRLWIPGFATLAAPLYPLTKEKGEFSWAPEHQKAFDAIKKALLSAPALALPDVTKPFTLYVDERKGVARGVLTQTLGPWRRPVAYLSKKLDPVASGWPVCLKAIAAVAILVKDADKLTLGQNITVIAPHALENIVRQPPDRWMTNARMTHYQSLLLTERVTFAPPAALNPATLLPEETDEPVTHDCHQLLIEETGVRKDLTDIPLTGEVLTWFTDGSSYVVEGKRMAGAAVVDGTRTIWASSLPEGTSAQKAELMALTQALRLAEGKSINIYTDSRYAFATAHVHGAIYKQRGLLTSAGREIKNKEEILSLLEALHLPKRLAIIHCPGHQKAKDPISRGNQMADRVAKQAAQGVNLLAGKRTADGSEFEKRTADGSEFESPKKKAKVE

SEQ ID NO: 6811 - protein, 2088 aa, synthetic construct; identical to SEQ ID NO: 6810

SEQ ID NO: 6812 - protein, 2174 aa, synthetic construct
MPAAKRVKLDGGDKKYSIGLDIGTNSVGWAVITDEYKVPSKKFKVLGNTDRHSIKKNLIGALLFDSGETAEATRLKRTARRRYTRRKNRICYLQEIFSNEMAKVDDSFFHRLEESFLVEEDKKHERHPIFGNIVDEVAYHEKYPTIYHLRKKLVDSTDKADLRLIYLALAHMIKFRGHFLIEGDLNPDNSDVDKLFIQLVQTYNQLFEENPINASGVDAKAILSARLSKSRRLENLIAQLPGEKKNGLFGNLIALSLGLTPNFKSNFDLAEDAKLQLSKDTYDDDLDNLLAQIGDQYADLFLAAKNLSDAILLSDILRVNTEITKAPLSASMIKRYDEHHQDLTLLKALVRQQLPEKYKEIFFDQSKNGYAGYIDGGASQEEFYKFIKPILEKMDGTEELLVKLNREDLLRKQRTFDNGSIPHQIHLGELHAILRRQEDFYPFLKDNREKIEKILTFRIPYYVGPLARGNSRFAWMTRKSEETITPWNFEEVVDKGASAQSFIERMTNFDKNLPNEKVLPKHSLLYEYFTVYNELTKVKYVTEGMRKPAFLSGEQKKAIVDLLFKTNRKVTVKQLKEDYFKKIECFDSVEISGVEDRFNASLGTYHDLLKIIKDKDFLDNEENEDILEDIVLTLTLFEDREMIEERLKTYAHLFDDKVMKQLKRRRYTGWGRLSRKLINGIRDKQSGKTILDFLKSDGFANRNFMQLIHDDSLTFKEDIQKAQVSGQGDSLHEHIANLAGSPAIKKGILQTVKVVDELVKVMGRHKPENIVIEMARENQTTQKGQKNSRERMKRIEEGIKELGSQILKEHPVENTQLQNEKLYLYYLQNGRDMYVDQELDINRLSDYDVDHIVPQSFLKDDSIDNKVLTRSDKARGKSDNVPSEEVVKKMKNYWRQLLNAKLITQRKFDNLTKAERGGLSELDKAGFIKRQLVETRQITKHVAQILDSRMNTKYDENDKLIREVKVITLKSKLVSDFRKDFQFYKVREINNYHHAHDAYLNAVVGTALIKKYPKLESEFVYGDYKVYDVRKMIAKSEQEIGKATAKYFFYSNIMNFFKTEITLANGEIRKRPLIETNGETGEIVWDKGRDFATVRKVLSMPQVNIVKKTEVQTGGFSKESILPKRNSDKLIARKKDWDPKKYGGFDSPTVAYSVLVVAKVEKGKSKKLKSVKELLGITIMERSSFEKNPIDFLEAKGYKEVKKDLIIKLPKYSLFELENGRKRMLASAGELQKGNELALPSKYVNFLYLASHYEKLKGSPEDNEQKQLFVEQHKHYLDEIIEQISEFSKRVILADANLDKVLSAYNKHRDKPIREQAENIIHLFTLTNLGAPAAFKYFDTTIDRKRYTSTKEVLDATLIHQSITGLYETRIDLSQLGGDGGGGSGGGGSSGGMDPLQLLQPLEAEIKGTKLKAHWNSGATITCVPEAFLEDERPIQTMLIKTIHGEKQQDVYYLTFKVQGRKVEAEVLASPYDYILLNPSDVPWLMKKPLQLTVLVPLHEYQERLLQQTALPKEQKELLQKLFLKYDALWQHWENQVGHRRIKPHNIATGTLAPRPQKQYPINPKAKPSIQIVIDDLLKQGVLIQQNSTMNTPVYPVPKPDGKWRMVLDYREVNKTIPLIAAQNQHSAGILSSIYRGKYKTTLDLTNGFWAHPITPESYWLTAFTWQGKQYCWTRLPQGFLNSPALFTADVVDLLKEIPNVQAYVDDIYISHDDPQEHLEQLEKIFSILLNAGYVVSLKKSEIAQREVEFLGFNITKEGRGLTDTFKQKLLNITPPKDLKQLQSILGLLNFARNFIPNYSELVKPLYTIVANANGKFISWTEDNSNQLQHIISVLNQADNLEERNPETRLIIKVNSSPSAGYIRYYNEGSKRPIMYVNYIFSKAEAKFTQTEKLLTTMHKGLIKAMDLAMGQEILVYSPIVSMTKIQRTPLPERKALPVRWITWMTYLEDPRIQFHYDKSLPELQQIPNVTEDVIAKTKHPSEFAMVFYTDGSAIKHPDVNKSHSAGMGIAQVQFIPEYKIVHQWSIPLGDHTAQLAEIAAVEFACKKALKISGPVLIVTDSFYVAESANKELPYWKSNGFLNNKKKPLRHVSKWKSIAECLQLKPDIIIMHEKGHQQPMTTLHTEGNNLADKLATQGSYVVHAGKRTADGSEFEKRTADGSEFESPKKKAKVE

SEQ ID NO: 6813 - protein, 2085 aa, synthetic construct
MPAAKRVKLDGGDKKYSIGLDIGTNSVGWAVITDEYKVPSKKFKVLGNTDRHSIKKNLIGALLFDSGETAEATRLKRTARRRYTRRKNRICYLQEIFSNEMAKVDDSFFHRLEESFLVEEDKKHERHPIFGNIVDEVAYHEKYPTIYHLRKKLVDSTDKADLRLIYLALAHMIKFRGHFLIEGDLNPDNSDVDKLFIQLVQTYNQLFEENPINASGVDAKAILSARLSKSRRLENLIAQLPGEKKNGLFGNLIALSLGLTPNFKSNFDLAEDAKLQLSKDTYDDDLDNLLAQIGDQYADLFLAAKNLSDAILLSDILRVNTEITKAPLSASMIKRYDEHHQDLTLLKALVRQQLPEKYKEIFFDQSKNGYAGYIDGGASQEEFYKFIKPILEKMDGTEELLVKLNREDLLRKQRTFDNGSIPHQIHLGELHAILRRQEDFYPFLKDNREKIEKILTFRIPYYVGPLARGNSRFAWMTRKSEETITPWNFEEVVDKGASAQSFIERMTNFDKNLPNEKVLPKHSLLYEYFTVYNELTKVKYVTEGMRKPAFLSGEQKKAIVDLLFKTNRKVTVKQLKEDYFKKIECFDSVEISGVEDRFNASLGTYHDLLKIIKDKDFLDNEENEDILEDIVLTLTLFEDREMIEERLKTYAHLFDDKVMKQLKRRRYTGWGRLSRKLINGIRDKQSGKTILDFLKSDGFANRNFMQLIHDDSLTFKEDIQKAQVSGQGDSLHEHIANLAGSPAIKKGILQTVKVVDELVKVMGRHKPENIVIEMARENQTTQKGQKNSRERMKRIEEGIKELGSQILKEHPVENTQLQNEKLYLYYLQNGRDMYVDQELDINRLSDYDVDHIVPQSFLKDDSIDNKVLTRSDKARGKSDNVPSEEVVKKMKNYWRQLLNAKLITQRKFDNLTKAERGGLSELDKAGFIKRQLVETRQITKHVAQILDSRMNTKYDENDKLIREVKVITLKSKLVSDFRKDFQFYKVREINNYHHAHDAYLNAVVGTALIKKYPKLESEFVYGDYKVYDVRKMIAKSEQEIGKATAKYFFYSNIMNFFKTEITLANGEIRKRPLIETNGETGEIVWDKGRDFATVRKVLSMPQVNIVKKTEVQTGGFSKESILPKRNSDKLIARKKDWDPKKYGGFDSPTVAYSVLVVAKVEKGKSKKLKSVKELLGITIMERSSFEKNPIDFLEAKGYKEVKKDLIIKLPKYSLFELENGRKRMLASAGELQKGNELALPSKYVNFLYLASHYEKLKGSPEDNEQKQLFVEQHKHYLDEIIEQISEFSKRVILADANLDKVLSAYNKHRDKPIREQAENIIHLFTLTNLGAPAAFKYFDTTIDRKRYTSTKEVLDATLIHQSITGLYETRIDLSQLGGDGGGGSGGGGSSGGVPWLMKKPLQLTVLVPLHEYQERLLQQTALPKEQKELLQKLFLKYDALWQHWENQVGHRRIKPHNIATGTLAPRPQKQYPINPKAKPSIQIVIDDLLKQGVLIQQNSTMNTPVYPVPKPDGKWRMVLDYREVNKTIPLIAAQNQHSAGILSSIYRGKYKTTLDLTNGFWAHPITPESYWLTAFTWQGKQYCWTRLPQGFLNSPALFTADVVDLLKEIPNVQAYVDDIYISHDDPQEHLEQLEKIFSILLNAGYVVSLKKSEIAQREVEFLGFNITKEGRGLTDTFKQKLLNITPPKDLKQLQSILGLLNFARNFIPNYSELVKPLYTIVANANGKFISWTEDNSNQLQHIISVLNQADNLEERNPETRLIIKVNSSPSAGYIRYYNEGSKRPIMYVNYIFSKAEAKFTQTEKLLTTMHKGLIKAMDLAMGQEILVYSPIVSMTKIQRTPLPERKALPVRWITWMTYLEDPRIQFHYDKSLPELQQIPNVTEDVIAKTKHPSEFAMVFYTDGSAIKHPDVNKSHSAGMGIAQVQFIPEYKIVHQWSIPLGDHTAQLAEIAAVEFACKKALKISGPVLIVTDSFYVAESANKELPYWKSNGFLNNKKKPLRHVSKWKSIAECLQLKPDIIIMHEKGHQQPMTTLHTEGNNLADKLATQGSYVVHAGKRTADGSEFEKRTADGSEFESPKKKAKVE

SEQ ID NO: 6814 - protein, 2085 aa, synthetic construct
MPAAKRVKLDGGDKKYSIGLDIGTNSVGWAVITDEYKVPSKKFKVLGNTDRHSIKKNLIGALLFDSGETAEATRLKRTARRRYTRRKNRICYLQEIFSNEMAKVDDSFFHRLEESFLVEEDKKHERHPIFGNIVDEVAYHEKYPTIYHLRKKLVDSTDKADLRLIYLALAHMIKFRGHFLIEGDLNPDNSDVDKLFIQLVQTYNQLFEENPINASGVDAKAILSARLSKSRRLENLIAQLPGEKKNGLFGNLIALSLGLTPNFKSNFDLAEDAKLQLSKDTYDDDLDNLLAQIGDQYADLFLAAKNLSDAILLSDILRVNTEITKAPLSASMIKRYDEHHQDLTLLKALVRQQLPEKYKEIFFDQSKNGYAGYIDGGASQEEFYKFIKPILEKMDGTEELLVKLNREDLLRKQRTFDNGSIPHQIHLGELHAILRRQEDFYPFLKDNREKIEKILTFRIPYYVGPLARGNSRFAWMTRKSEETITPWNFEEVVDKGASAQSFIERMTNFDKNLPNEKVLPKHSLLYEYFTVYNELTKVKYVTEGMRKPAFLSGEQKKAIVDLLFKTNRKVTVKQLKEDYFKKIECFDSVEISGVEDRFNASLGTYHDLLKIIKDKDFLDNEENEDILEDIVLTLTLFEDREMIEERLKTYAHLFDDKVMKQLKRRRYTGWGRLSRKLINGIRDKQSGKTILDFLKSDGFANRNFMQLIHDDSLTFKEDIQKAQVSGQGDSLHEHIANLAGSPAIKKGILQTVKVVDELVKVMGRHKPENIVIEMARENQTTQKGQKNSRERMKRIEEGIKELGSQILKEHPVENTQLQNEKLYLYYLQNGRDMYVDQELDINRLSDYDVDHIVPQSFLKDDSIDNKVLTRSDKARGKSDNVPSEEVVKKMKNYWRQLLNAKLITQRKFDNLTKAERGGLSELDKAGFIKRQLVETRQITKHVAQILDSRMNTKYDENDKLIREVKVITLKSKLVSDFRKDFQFYKVREINNYHHAHDAYLNAVVGTALIKKYPKLESEFVYGDYKVYDVRKMIAKSEQEIGKATAKYFFYSNIMNFFKTEITLANGEIRKRPLIETNGETGEIVWDKGRDFATVRKVLSMPQVNIVKKTEVQTGGFSKESILPKRNSDKLIARKKDWDPKKYGGFDSPTVAYSVLVVAKVEKGKSKKLKSVKELLGITIMERSSFEKNPIDFLEAKGYKEVKKDLIIKLPKYSLFELENGRKRMLASAGELQKGNELALPSKYVNFLYLASHYEKLKGSPEDNEQKQLFVEQHKHYLDEIIEQISEFSKRVILADANLDKVLSAYNKHRDKPIREQAENIIHLFTLTNLGAPAAFKYFDTTIDRKRYTSTKEVLDATLIHQSITGLYETRIDLSQLGGDGGGGSGGGGSSGGIPWLMKKPLQLTTLVPLQEYEERLLKQTMLTGSYKEKLQSLFLKYDALWQHWENQVGHRRIKPHHIATGTVNPRPQKQYPINPKAKASIQTVINDLLKQGVLIQQNSIMNTPVYPVPKPDGKWRMVLDYREVNKTIPLIAAQNQHSAGILSSIFRGKYKTTLDLSNGFWAHSITPESYWLTAFTWLGQQYCWTRLPQGFLNSPALFNADVVDLLKEVPNVQVYVDDIYISHDDPREHLEQLEKVFSLLLNAGYVVSLKKSEIAQHEVEFLGFNITKEGRGLTETFKQKLLNITPPRDLKQLQSILGKLNFARNFIPNFSELVKPLYNIIATAPGKYITWTTDNSQQLQNIISMLNSAENLEERNPEVRLIMKVNTSPSAGYIRFYNEFAKRPIMYLNYVYTKAEVKFTNTEKLLTTIHKGLIKALDLGMGQEILVYSPIVSMTKIQKTPLPERKALPIRWITWMSYLEDPRIQFHYDKTLPELQQVPTVTDDIIAKIKHPSEFSMVFYTDGSAIKHPNVNKSHNAGMGIAQVQFKPEFTVINTWSIPLGDHTAQLAEVAAVEFACKKALKIDGPVLIVTDSFYVAESVNKELPYWQSNGFFNNKKKPLKHVSKWKSIADCIQLKPDIIIIHEKGHQPTASTFHTEGNNLADKLATQGSYVVNAGKRTADGSEFEKRTADGSEFESPKKKAKVE

SEQ ID NO: 6815 - protein, 2094 aa, synthetic construct
MPAAKRVKLDGGDKKYSIGLDIGTNSVGWAVITDEYKVPSKKFKVLGNTDRHSIKKNLIGALLFDSGETAEATRLKRTARRRYTRRKNRICYLQEIFSNEMAKVDDSFFHRLEESFLVEEDKKHERHPIFGNIVDEVAYHEKYPTIYHLRKKLVDSTDKADLRLIYLALAHMIKFRGHFLIEGDLNPDNSDVDKLFIQLVQTYNQLFEENPINASGVDAKAILSARLSKSRRLENLIAQLPGEKKNGLFGNLIALSLGLTPNFKSNFDLAEDAKLQLSKDTYDDDLDNLLAQIGDQYADLFLAAKNLSDAILLSDILRVNTEITKAPLSASMIKRYDEHHQDLTLLKALVRQQLPEKYKEIFFDQSKNGYAGYIDGGASQEEFYKFIKPILEKMDGTEELLVKLNREDLLRKQRTFDNGSIPHQIHLGELHAILRRQEDFYPFLKDNREKIEKILTFRIPYYVGPLARGNSRFAWMTRKSEETITPWNFEEVVDKGASAQSFIERMTNFDKNLPNEKVLPKHSLLYEYFTVYNELTKVKYVTEGMRKPAFLSGEQKKAIVDLLFKTNRKVTVKQLKEDYFKKIECFDSVEISGVEDRFNASLGTYHDLLKIIKDKDFLDNEENEDILEDIVLTLTLFEDREMIEERLKTYAHLFDDKVMKQLKRRRYTGWGRLSRKLINGIRDKQSGKTILDFLKSDGFANRNFMQLIHDDSLTFKEDIQKAQVSGQGDSLHEHIANLAGSPAIKKGILQTVKVVDELVKVMGRHKPENIVIEMARENQTTQKGQKNSRERMKRIEEGIKELGSQILKEHPVENTQLQNEKLYLYYLQNGRDMYVDQELDINRLSDYDVDHIVPQSFLKDDSIDNKVLTRSDKARGKSDNVPSEEVVKKMKNYWRQLLNAKLITQRKFDNLTKAERGGLSELDKAGFIKRQLVETRQITKHVAQILDSRMNTKYDENDKLIREVKVITLKSKLVSDFRKDFQFYKVREINNYHHAHDAYLNAVVGTALIKKYPKLESEFVYGDYKVYDVRKMIAKSEQEIGKATAKYFFYSNIMNFFKTEITLANGEIRKRPLIETNGETGEIVWDKGRDFATVRKVLSMPQVNIVKKTEVQTGGFSKESILPKRNSDKLIARKKDWDPKKYGGFDSPTVAYSVLVVAKVEKGKSKKLKSVKELLGITIMERSSFEKNPIDFLEAKGYKEVKKDLIIKLPKYSLFELENGRKRMLASAGELQKGNELALPSKYVNFLYLASHYEKLKGSPEDNEQKQLFVEQHKHYLDEIIEQISEFSKRVILADANLDKVLSAYNKHRDKPIREQAENIIHLFTLTNLGAPAAFKYFDTTIDRKRYTSTKEVLDATLIHQSITGLYETRIDLSQLGGDGGGGSGGGGSSGGTLNIEDEYRLHETSKEPDVPLGSTWLSDFPQAWAETGGMGLAVRQAPLIIPLKATSTPVSIKQYPMSQEARLGIKPHIQRLLDQGILVPCQSPWNTPLLPVKKPGTNDYRPVQDLREVNKRVEDIHPTVPNPYNLLSGLPPSHQWYTVLDLKDAFFCLRLHPTSQPLFAFEWRDPEMGISGQLTWTRLPQGFKNSPTLFNEALHRDLADFRIQHPDLILLQYVDDLLLAATSEQDCQRGTRALLQTLGNLGYRASAKKAQICQKQVKYLGYLLKEGQRWLTEARKETVMGQPTPKTPRQLREFLGTAGFCRLWIPGFAEMAAPLYPLTKPGTLFNWGPDQQKAYQEIKQALLTAPALGLPDLTKPFELFVDEKQGYAKGVLTQKLGPWRRPVAYLSKKLDPVAAGWPPCLRMVAAIAVLTKDAGKLTMGQPLVILAPHAVEALVKQPPDRWLSNARMTHYQAMLLDTDRVQFGPVVALNPATLLPLPEKEAPHDCLEILAETHGTRPDLTDQPIPDADYTWYTDGSSFLQEGQRRAGAAVTTETEVIWARALPAGTSAQRAELIALTQALKMAEGKKLNVYTDSRYAFATAHVHGEIYRRRGWLTSEGREIKNKNEILALLKALFLPKRLSIIHCPGHQKGNSAEARGNRMADQAAREAAMKAVLETSTLLAGKRTADGSEFEKRTADGSEFESPKKKAKVE

SEQ ID NO: 6816 - protein, 2094 aa, synthetic construct
MPAAKRVKLDGGDKKYSIGLDIGTNSVGWAVITDEYKVPSKKFKVLGNTDRHSIKKNLIGALLFDSGETAEATRLKRTARRRYTRRKNRICYLQEIFSNEMAKVDDSFFHRLEESFLVEEDKKHERHPIFGNIVDEVAYHEKYPTIYHLRKKLVDSTDKADLRLIYLALAHMIKFRGHFLIEGDLNPDNSDVDKLFIQLVQTYNQLFEENPINASGVDAKAILSARLSKSRRLENLIAQLPGEKKNGLFGNLIALSLGLTPNFKSNFDLAEDAKLQLSKDTYDDDLDNLLAQIGDQYADLFLAAKNLSDAILLSDILRVNTEITKAPLSASMIKRYDEHHQDLTLLKALVRQQLPEKYKEIFFDQSKNGYAGYIDGGASQEEFYKFIKPILEKMDGTEELLVKLNREDLLRKQRTFDNGSIPHQIHLGELHAILRRQEDFYPFLKDNREKIEKILTFRIPYYVGPLARGNSRFAWMTRKSEETITPWNFEEVVDKGASAQSFIERMTNFDKNLPNEKVLPKHSLLYEYFTVYNELTKVKYVTEGMRKPAFLSGEQKKAIVDLLFKTNRKVTVKQLKEDYFKKIECFDSVEISGVEDRFNASLGTYHDLLKIIKDKDFLDNEENEDILEDIVLTLTLFEDREMIEERLKTYAHLFDDKVMKQLKRRRYTGWGRLSRKLINGIRDKQSGKTILDFLKSDGFANRNFMQLIHDDSLTFKEDIQKAQVSGQGDSLHEHIANLAGSPAIKKGILQTVKVVDELVKVMGRHKPENIVIEMARENQTTQKGQKNSRERMKRIEEGIKELGSQILKEHPVENTQLQNEKLYLYYLQNGRDMYVDQELDINRLSDYDVDHIVPQSFLKDDSIDNKVLTRSDKARGKSDNVPSEEVVKKMKNYWRQLLNAKLITQRKFDNLTKAERGGLSELDKAGFIKRQLVETRQITKHVAQILDSRMNTKYDENDKLIREVKVITLKSKLVSDFRKDFQFYKVREINNYHHAHDAYLNAVVGTALIKKYPKLESEFVYGDYKVYDVRKMIAKSEQEIGKATAKYFFYSNIMNFFKTEITLANGEIRKRPLIETNGETGEIVWDKGRDFATVRKVLSMPQVNIVKKTEVQTGGFSKESILPKRNSDKLIARKKDWDPKKYGGFDSPTVAYSVLVVAKVEKGKSKKLKSVKELLGITIMERSSFEKNPIDFLEAKGYKEVKKDLIIKLPKYSLFELENGRKRMLASAGELQKGNELALPSKYVNFLYLASHYEKLKGSPEDNEQKQLFVEQHKHYLDEIIEQISEFSKRVILADANLDKVLSAYNKHRDKPIREQAENIIHLFTLTNLGAPAAFKYFDTTIDRKRYTSTKEVLDATLIHQSITGLYETRIDLSQLGGDGGGGSGGGGSSGGTLNIEDEYRLHETSKEPDVPLGSTWLSDFPQAWAETGGMGLAVRQAPLIIPLKATSTPVSIKQYPMSQEARLGIKPHIQRLLDQGILVPCQSPWNTPLLPVKKPGTNDYRPVQDLREVNKRVEDIHPTVPNPYNLLSGLPPSHQWYTVLDLKDAFFCLRLHPTSQPLFAFEWRDPEMGISGQLTWTRLPQGFKNSPTLFNEALHRDLADFRIQHPDLILLQYVDDLLLAATSEQDCQRGTRALLQTLGNLGYRASAKKAQICQKQVKYLGYLLKEGQRWLTEARKETVMGQPTPKTPRQLREFLGKAGFCRLFIPGFAEMAAPLYPLTKPGTLFNWGPDQQKAYQEIKQALLTAPALGLPDLTKPFELFVDEKQGYAKGVLTQKLGPWRRPVAYLSKKLDPVAAGWPPCLRMVAAIAVLTKDAGKLTMGQPLVILAPHAVEALVKQPPDRWLSNARMTHYQAMLLDTDRVQFGPVVALNPATLLPLPEKEAPHDCLEILAETHGTRPDLTDQPIPDADYTWYTDGSSFLQEGQRRAGAAVTTETEVIWARALPAGTSAQRAELIALTQALKMAEGKKLNVYTDSRYAFATAHVHGEIYRRRGWLTSEGREIKNKNEILALLKALFLPKRLSIIHCPGHQKGNSAEARGNRMADQAAREAAMKAVLETSTLLAGKRTADGSEFEKRTADGSEFESPKKKAKVE

SEQ ID NO: 6817 - protein, 2096 aa, synthetic construct
MPAAKRVKLDGGDKKYSIGLDIGTNSVGWAVITDEYKVPSKKFKVLGNTDRHSIKKNLIGALLFDSGETAEATRLKRTARRRYTRRKNRICYLQEIFSNEMAKVDDSFFHRLEESFLVEEDKKHERHPIFGNIVDEVAYHEKYPTIYHLRKKLVDSTDKADLRLIYLALAHMIKFRGHFLIEGDLNPDNSDVDKLFIQLVQTYNQLFEENPINASGVDAKAILSARLSKSRRLENLIAQLPGEKKNGLFGNLIALSLGLTPNFKSNFDLAEDAKLQLSKDTYDDDLDNLLAQIGDQYADLFLAAKNLSDAILLSDILRVNTEITKAPLSASMIKRYDEHHQDLTLLKALVRQQLPEKYKEIFFDQSKNGYAGYIDGGASQEEFYKFIKPILEKMDGTEELLVKLNREDLLRKQRTFDNGSIPHQIHLGELHAILRRQEDFYPFLKDNREKIEKILTFRIPYYVGPLARGNSRFAWMTRKSEETITPWNFEEVVDKGASAQSFIERMTNFDKNLPNEKVLPKHSLLYEYFTVYNELTKVKYVTEGMRKPAFLSGEQKKAIVDLLFKTNRKVTVKQLKEDYFKKIECFDSVEISGVEDRFNASLGTYHDLLKIIKDKDFLDNEENEDILEDIVLTLTLFEDREMIEERLKTYAHLFDDKVMKQLKRRRYTGWGRLSRKLINGIRDKQSGKTILDFLKSDGFANRNFMQLIHDDSLTFKEDIQKAQVSGQGDSLHEHIANLAGSPAIKKGILQTVKVVDELVKVMGRHKPENIVIEMARENQTTQKGQKNSRERMKRIEEGIKELGSQILKEHPVENTQLQNEKLYLYYLQNGRDMYVDQELDINRLSDYDVDHIVPQSFLKDDSIDNKVLTRSDKARGKSDNVPSEEVVKKMKNYWRQLLNAKLITQRKFDNLTKAERGGLSELDKAGFIKRQLVETRQITKHVAQILDSRMNTKYDENDKLIREVKVITLKSKLVSDFRKDFQFYKVREINNYHHAHDAYLNAVVGTALIKKYPKLESEFVYGDYKVYDVRKMIAKSEQEIGKATAKYFFYSNIMNFFKTEITLANGEIRKRPLIETNGETGEIVWDKGRDFATVRKVLSMPQVNIVKKTEVQTGGFSKESILPKRNSDKLIARKKDWDPKKYGGFDSPTVAYSVLVVAKVEKGKSKKLKSVKELLGITIMERSSFEKNPIDFLEAKGYKEVKKDLIIKLPKYSLFELENGRKRMLASAGELQKGNELALPSKYVNFLYLASHYEKLKGSPEDNEQKQLFVEQHKHYLDEIIEQISEFSKRVILADANLDKVLSAYNKHRDKPIREQAENIIHLFTLTNLGAPAAFKYFDTTIDRKRYTSTKEVLDATLIHQSITGLYETRIDLSQLGGDGGGGSGSSGGGGGTAPLEEEYRLFLEAPIQNVTLLEQWKREIPKVWAEINPPGLASTQAPIHVQLLSTALPVRVRQYPITLEAKRSLRETIRKFRAAGILRPVHSPWNTPLLPVRKSGTSEYRMVQDLREVNKRVETIHPTVPNPYTLLSLLPPDRIWYSVLDLKDAFFCIPLAPESQLIFAFEWADAEEGESGQLTWTRLPQGFKNSPTLFNEALNRDLQGFRLDHPSVSLLQYVDDLLIAADTQAACLSATRDLLMTLAELGYRVSGKKAQLCQEEVTYLGFKIHKGSRSLSNSRTQAILQIPVPKTKRQVREFLGTIGYCRLWIPGFAELAQPLYAATRPGNDPLVWGEKEEEAFQSLKLALTQPPALALPSLDKPFQLFVEETSGAAKGVLTQALGPWKRPVAYLSKRLDPVAAGWPRCLRAIAAAALLTREASKLTFGQDIEITSSHNLESLLRSPPDKWLTNARITQYQVLLLDPPRVRFKQTAALNPATLLPETDDTLPIHHCLDTLDSLTSTRPDLTDQPLAQAEATLFTDGSSYIRDGKRYAGAAVVTLDSVIWAEPLPIGTSAQKAELIALTKALEWSKDKSVNIYTDSRYAFATLHVHGMIYRERGWLTAGGKAIKNAPEILALLTAVWLPKRVAVMHCKGHQKDDAPTSTGNRRADEVAREVAIRPLSTQATISAGKRTADGSEFEKRTADGSEFESPKKKAKVE

SEQ ID NO: 6818 - protein, 2100 aa, synthetic construct
MPAAKRVKLDGGDKKYSIGLDIGTNSVGWAVITDEYKVPSKKFKVLGNTDRHSIKKNLIGALLFDSGETAEATRLKRTARRRYTRRKNRICYLQEIFSNEMAKVDDSFFHRLEESFLVEEDKKHERHPIFGNIVDEVAYHEKYPTIYHLRKKLVDSTDKADLRLIYLALAHMIKFRGHFLIEGDLNPDNSDVDKLFIQLVQTYNQLFEENPINASGVDAKAILSARLSKSRRLENLIAQLPGEKKNGLFGNLIALSLGLTPNFKSNFDLAEDAKLQLSKDTYDDDLDNLLAQIGDQYADLFLAAKNLSDAILLSDILRVNTEITKAPLSASMIKRYDEHHQDLTLLKALVRQQLPEKYKEIFFDQSKNGYAGYIDGGASQEEFYKFIKPILEKMDGTEELLVKLNREDLLRKQRTFDNGSIPHQIHLGELHAILRRQEDFYPFLKDNREKIEKILTFRIPYYVGPLARGNSRFAWMTRKSEETITPWNFEEVVDKGASAQSFIERMTNFDKNLPNEKVLPKHSLLYEYFTVYNELTKVKYVTEGMRKPAFLSGEQKKAIVDLLFKTNRKVTVKQLKEDYFKKIECFDSVEISGVEDRFNASLGTYHDLLKIIKDKDFLDNEENEDILEDIVLTLTLFEDREMIEERLKTYAHLFDDKVMKQLKRRRYTGWGRLSRKLINGIRDKQSGKTILDFLKSDGFANRNFMQLIHDDSLTFKEDIQKAQVSGQGDSLHEHIANLAGSPAIKKGILQTVKVVDELVKVMGRHKPENIVIEMARENQTTQKGQKNSRERMKRIEEGIKELGSQILKEHPVENTQLQNEKLYLYYLQNGRDMYVDQELDINRLSDYDVDHIVPQSFLKDDSIDNKVLTRSDKARGKSDNVPSEEVVKKMKNYWRQLLNAKLITQRKFDNLTKAERGGLSELDKAGFIKRQLVETRQITKHVAQILDSRMNTKYDENDKLIREVKVITLKSKLVSDFRKDFQFYKVREINNYHHAHDAYLNAVVGTALIKKYPKLESEFVYGDYKVYDVRKMIAKSEQEIGKATAKYFFYSNIMNFFKTEITLANGEIRKRPLIETNGETGEIVWDKGRDFATVRKVLSMPQVNIVKKTEVQTGGFSKESILPKRNSDKLIARKKDWDPKKYGGFDSPTVAYSVLVVAKVEKGKSKKLKSVKELLGITIMERSSFEKNPIDFLEAKGYKEVKKDLIIKLPKYSLFELENGRKRMLASAGELQKGNELALPSKYVNFLYLASHYEKLKGSPEDNEQKQLFVEQHKHYLDEIIEQISEFSKRVILADANLDKVLSAYNKHRDKPIREQAENIIHLFTLTNLGAPAAFKYFDTTIDRKRYTSTKEVLDATLIHQSITGLYETRIDLSQLGGDGGGGSGSSGGGGGTVSLQDEHRLFDIPVTTSLPDVWLQDFPQAWAETGGLGRAKCQAPIIIDLKPTAVPVSIKQYPMSLEAHMGIRQHIIKFLELGVLRPCRSPWNTPLLPVKKPGTQDYRPVQDLREINKRTVDIHPTVPNPYNLLSTLKPDYSWYTVLDLKDAFFCLPLAPQSQELFAFEWKDPERGISGQLTWTRLPQGFKNSPTLFDEALHRDLTDFRTQHPEVTLLQYVDDLLLAAPTKKACTQGTRHLLQELGEKGYRASAKKAQICQTKVTYLGYILSEGKRWLTPGRIETVARIPPPRNPREVREFLGTAGFCRLWIPGFAELAAPLYALTKESTPFTWQTEHQLAFEALKKALLSAPALGLPDTSKPFTLFLDERQGIAKGVLTQKLGPWKRPVAYLSKKLDPVAAGWPPCLRIMAATAMLVKDSAKLTLGQPLTVITPHTLEAIVRQPPDRWITNARLTHYQALLLDTDRVQFGPPVTLNPATLLPVPENQPSPHDCRQVLAETHGTREDLKDQELPDADHTWYTDGSSYLDSGTRRAGAAVVDGHNTIWAQSLPPGTSAQKAELIALTKALELSKGKKANIYTDSRYAFATAHTHGSIYERRGLLTSEGKEIKNKAEIIALLKALFLPQEVAIIHCPGHQKGQDPVAVGNRQADRVARQAAMAEVLTLATEPDNTSHITAGKRTADGSEFEKRTADGSEFESPKKKAKVE

SEQ ID NO: 6819 - protein, 2094 aa, synthetic construct
MPAAKRVKLDGGDKKYSIGLDIGTNSVGWAVITDEYKVPSKKFKVLGNTDRHSIKKNLIGALLFDSGETAEATRLKRTARRRYTRRKNRICYLQEIFSNEMAKVDDSFFHRLEESFLVEEDKKHERHPIFGNIVDEVAYHEKYPTIYHLRKKLVDSTDKADLRLIYLALAHMIKFRGHFLIEGDLNPDNSDVDKLFIQLVQTYNQLFEENPINASGVDAKAILSARLSKSRRLENLIAQLPGEKKNGLFGNLIALSLGLTPNFKSNFDLAEDAKLQLSKDTYDDDLDNLLAQIGDQYADLFLAAKNLSDAILLSDILRVNTEITKAPLSASMIKRYDEHHQDLTLLKALVRQQLPEKYKEIFFDQSKNGYAGYIDGGASQEEFYKFIKPILEKMDGTEELLVKLNREDLLRKQRTFDNGSIPHQIHLGELHAILRRQEDFYPFLKDNREKIEKILTFRIPYYVGPLARGNSRFAWMTRKSEETITPWNFEEVVDKGASAQSFIERMTNFDKNLPNEKVLPKHSLLYEYFTVYNELTKVKYVTEGMRKPAFLSGEQKKAIVDLLFKTNRKVTVKQLKEDYFKKIECFDSVEISGVEDRFNASLGTYHDLLKIIKDKDFLDNEENEDILEDIVLTLTLFEDREMIEERLKTYAHLFDDKVMKQLKRRRYTGWGRLSRKLINGIRDKQSGKTILDFLKSDGFANRNFMQLIHDDSLTFKEDIQKAQVSGQGDSLHEHIANLAGSPAIKKGILQTVKVVDELVKVMGRHKPENIVIEMARENQTTQKGQKNSRERMKRIEEGIKELGSQILKEHPVENTQLQNEKLYLYYLQNGRDMYVDQELDINRLSDYDVDHIVPQSFLKDDSIDNKVLTRSDKARGKSDNVPSEEVVKKMKNYWRQLLNAKLITQRKFDNLTKAERGGLSELDKAGFIKRQLVETRQITKHVAQILDSRMNTKYDENDKLIREVKVITLKSKLVSDFRKDFQFYKVREINNYHHAHDAYLNAVVGTALIKKYPKLESEFVYGDYKVYDVRKMIAKSEQEIGKATAKYFFYSNIMNFFKTEITLANGEIRKRPLIETNGETGEIVWDKGRDFATVRKVLSMPQVNIVKKTEVQTGGFSKESILPKRNSDKLIARKKDWDPKKYGGFDSPTVAYSVLVVAKVEKGKSKKLKSVKELLGITIMERSSFEKNPIDFLEAKGYKEVKKDLIIKLPKYSLFELENGRKRMLASAGELQKGNELALPSKYVNFLYLASHYEKLKGSPEDNEQKQLFVEQHKHYLDEIIEQISEFSKRVILADANLDKVLSAYNKHRDKPIREQAENIIHLFTLTNLGAPAAFKYFDTTIDRKRYTSTKEVLDATLIHQSITGLYETRIDLSQLGGDGGGGSGSSGGGGGTLNLEDEYRLYETSAEPEVSPGSTWLSDFPQAWAETGGMGLAVRQAPLIIPLKATSTPVSIKQYPMSQEAKLGIKPHIQRLLDQGILVPCQSPWNTPLLPVKKPGTNDYRPVQDLREVNKRVEDIHPTVPNPYNLLSGLPPSHRWYTVLDLKDAFFCLRLHPTSQPLFAFEWRDPGMGISGQLTWTRLPQGFKNSPTLFNEALHRDLADFRIQHPDLILLQYVDDILLAATSELDCQQGTRALLLTLGNLGYRASAKKAQLCQKQVKYLGYLLKEGQRWLTEARKETVMGQPTPKTPRQLREFLGKAGFCRLFIPGFAEMAAPLYPLTKPGTLFNWGPDQQKAYQEIKQALLTAPALGLPDLTKPFELFVDEKQGYAKGVLTQKLGPWRRPVAYLSKKLDPVAAGWPPCLRMVAAIAVLRKDAGKLTMGQPLVILAPHAVEALVKQPPDRWLSNARMTHYQAMLLDTDRVQFGPVVALNPATLLPLPEEGAPHDCLEILAETHGTRPDLTDQPIPDADHTWYTDGSSFLQEGQRKAGAAVTTETEVIWARALPAGTSAQRAELIALTQALKMAEGKRLNVYTDSRYAFATAHIHGEIYRRRGWLTSEGREIKNKSEILALLKALFLPKRLSIIHCLGHQKGDSAEARGNRLADQAAREAAIKTPPDTSTLLAGKRTADGSEFEKRTADGSEFESPKKKAKVE

SEQ ID NO: 6820 - protein, 2094 aa, synthetic construct
MPAAKRVKLDGGDKKYSIGLDIGTNSVGWAVITDEYKVPSKKFKVLGNTDRHSIKKNLIGALLFDSGETAEATRLKRTARRRYTRRKNRICYLQEIFSNEMAKVDDSFFHRLEESFLVEEDKKHERHPIFGNIVDEVAYHEKYPTIYHLRKKLVDSTDKADLRLIYLALAHMIKFRGHFLIEGDLNPDNSDVDKLFIQLVQTYNQLFEENPINASGVDAKAILSARLSKSRRLENLIAQLPGEKKNGLFGNLIALSLGLTPNFKSNFDLAEDAKLQLSKDTYDDDLDNLLAQIGDQYADLFLAAKNLSDAILLSDILRVNTEITKAPLSASMIKRYDEHHQDLTLLKALVRQQLPEKYKEIFFDQSKNGYAGYIDGGASQEEFYKFIKPILEKMDGTEELLVKLNREDLLRKQRTFDNGSIPHQIHLGELHAILRRQEDFYPFLKDNREKIEKILTFRIPYYVGPLARGNSRFAWMTRKSEETITPWNFEEVVDKGASAQSFIERMTNFDKNLPNEKVLPKHSLLYEYFTVYNELTKVKYVTEGMRKPAFLSGEQKKAIVDLLFKTNRKVTVKQLKEDYFKKIECFDSVEISGVEDRFNASLGTYHDLLKIIKDKDFLDNEENEDILEDIVLTLTLFEDREMIEERLKTYAHLFDDKVMKQLKRRRYTGWGRLSRKLINGIRDKQSGKTILDFLKSDGFANRNFMQLIHDDSLTFKEDIQKAQVSGQGDSLHEHIANLAGSPAIKKGILQTVKVVDELVKVMGRHKPENIVIEMARENQTTQKGQKNSRERMKRIEEGIKELGSQILKEHPVENTQLQNEKLYLYYLQNGRDMYVDQELDINRLSDYDVDHIVPQSFLKDDSIDNKVLTRSDKARGKSDNVPSEEVVKKMKNYWRQLLNAKLITQRKFDNLTKAERGGLSELDKAGFIKRQLVETRQITKHVAQILDSRMNTKYDENDKLIREVKVITLKSKLVSDFRKDFQFYKVREINNYHHAHDAYLNAVVGTALIKKYPKLESEFVYGDYKVYDVRKMIAKSEQEIGKATAKYFFYSNIMNFFKTEITLANGEIRKRPLIETNGETGEIVWDKGRDFATVRKVLSMPQVNIVKKTEVQTGGFSKESILPKRNSDKLIARKKDWDPKKYGGFDSPTVAYSVLVVAKVEKGKSKKLKSVKELLGITIMERSSFEKNPIDFLEAKGYKEVKKDLIIKLPKYSLFELENGRKRMLASAGELQKGNELALPSKYVNFLYLASHYEKLKGSPEDNEQKQLFVEQHKHYLDEIIEQISEFSKRVILADANLDKVLSAYNKHRDKPIREQAENIIHLFTLTNLGAPAAFKYFDTTIDRKRYTSTKEVLDATLIHQSITGLYETRIDLSQLGGDGGGGSGSSGGGGGLGIEDEYRLHETSTEPDVSLGSTWLSDFPQAWAETGGMGLAVRQAPLIIPLKATSTPVSIQQYPMSHEARLGIKPHIQRLLDQGILVPCQSPWNTPLLPVKKPGTNDYRPVQDLREVNKRVEDIHPTVPNPYNLLSGLPPSHQWYTVLDLKDAFFCLRLHPTSQPLFAFEWRDPGMGISGQLTWTRLPQGFKNSPTLFNEALHRDLADFRIQHPDLILLQYVDDILLAATSELDCQQGTRALLQTLGDLGYRASAKKAQICQKQVKYLGYLLREGQRWLTEARKETVMGQPVPKTPRQLREFLGKAGFCRLFIPGFAEMAAPLYPLTKPGTLFSWGPDQQKAYQEIKQALLTAPALGLPDLTKPFELFVDEKQGYAKGVLTQKLGPWRRPVAYLSKKLDPVAAGWPPCLRMVAAIAVLTKDAGKLTMGQPLVILAPHAVEALVKQPPDRWLSNARMTHYQAMLLDTDRVQFGPVVALNPATLLPLPEEGAPHDCLEILAETHGTRPDLTDQPIPDADHTWYTDGSSFLQEGQRKAGAAVTTETEVIWAGALPAGTSAQRAELIALTQALKMAEGKRLNVYTDSRYAFATAHIHGEIYRRRGWLTSEGREIKNKSEILALLKALFLPKRLSIIHCLGHQKGDSAEARGNRLADQAAREAAIKTPPDTSTLLIAGKRTADGSEFEKRTADGSEFESPKKKAKVE

SEQ ID NO: 6821 - protein, 2174 aa, synthetic construct
MPAAKRVKLDGGDKKYSIGLDIGTNSVGWAVITDEYKVPSKKFKVLGNTDRHSIKKNLIGALLFDSGETAEATRLKRTARRRYTRRKNRICYLQEIFSNEMAKVDDSFFHRLEESFLVEEDKKHERHPIFGNIVDEVAYHEKYPTIYHLRKKLVDSTDKADLRLIYLALAHMIKFRGHFLIEGDLNPDNSDVDKLFIQLVQTYNQLFEENPINASGVDAKAILSARLSKSRRLENLIAQLPGEKKNGLFGNLIALSLGLTPNFKSNFDLAEDAKLQLSKDTYDDDLDNLLAQIGDQYADLFLAAKNLSDAILLSDILRVNTEITKAPLSASMIKRYDEHHQDLTLLKALVRQQLPEKYKEIFFDQSKNGYAGYIDGGASQEEFYKFIKPILEKMDGTEELLVKLNREDLLRKQRTFDNGSIPHQIHLGELHAILRRQEDFYPFLKDNREKIEKILTFRIPYYVGPLARGNSRFAWMTRKSEETITPWNFEEVVDKGASAQSFIERMTNFDKNLPNEKVLPKHSLLYEYFTVYNELTKVKYVTEGMRKPAFLSGEQKKAIVDLLFKTNRKVTVKQLKEDYFKKIECFDSVEISGVEDRFNASLGTYHDLLKIIKDKDFLDNEENEDILEDIVLTLTLFEDREMIEERLKTYAHLFDDKVMKQLKRRRYTGWGRLSRKLINGIRDKQSGKTILDFLKSDGFANRNFMQLIHDDSLTFKEDIQKAQVSGQGDSLHEHIANLAGSPAIKKGILQTVKVVDELVKVMGRHKPENIVIEMARENQTTQKGQKNSRERMKRIEEGIKELGSQILKEHPVENTQLQNEKLYLYYLQNGRDMYVDQELDINRLSDYDVDHIVPQSFLKDDSIDNKVLTRSDKARGKSDNVPSEEVVKKMKNYWRQLLNAKLITQRKFDNLTKAERGGLSELDKAGFIKRQLVETRQITKHVAQILDSRMNTKYDENDKLIREVKVITLKSKLVSDFRKDFQFYKVREINNYHHAHDAYLNAVVGTALIKKYPKLESEFVYGDYKVYDVRKMIAKSEQEIGKATAKYFFYSNIMNFFKTEITLANGEIRKRPLIETNGETGEIVWDKGRDFATVRKVLSMPQVNIVKKTEVQTGGFSKESILPKRNSDKLIARKKDWDPKKYGGFDSPTVAYSVLVVAKVEKGKSKKLKSVKELLGITIMERSSFEKNPIDFLEAKGYKEVKKDLIIKLPKYSLFELENGRKRMLASAGELQKGNELALPSKYVNFLYLASHYEKLKGSPEDNEQKQLFVEQHKHYLDEIIEQISEFSKRVILADANLDKVLSAYNKHRDKPIREQAENIIHLFTLTNLGAPAAFKYFDTTIDRKRYTSTKEVLDATLIHQSITGLYETRIDLSQLGGDGGGGSGSSGGGGGMDPLQLLQPLEAEIKGTKLKAHWNSGATITCVPEAFLEDERPIQTMLIKTIHGEKQQDVYYLTFKVQGRKVEAEVLASPYDYILLNPSDVPWLMKKPLQLTVLVPLHEYQERLLQQTALPKEQKELLQKLFLKYDALWQHWENQVGHRRIKPHNIATGTLAPRPQKQYPINPKAKPSIQIVIDDLLKQGVLIQQNSTMNTPVYPVPKPDGKWRMVLDYREVNKTIPLIAAQNQHSAGILSSIYRGKYKTTLDLTNGFWAHPITPESYWLTAFTWQGKQYCWTRLPQGFLNSPALFNADVVDLLKEIPNVQAYVDDIYISHDDPQEHLEQLEKIFSILLNAGYVVSLKKSEIAQREVEFLGFNITKEGRGLTDTFKQKLLNITPPKDLKQLQSILGLLNFARNFIPNYSELVKPLYTIVAPANGKFISWTEDNSNQLQHIISVLNQADNLEERNPETRLIIKVNSSPSAGYIRYYNEGSKRPIMYVNYIFSKAEAKFTQTEKLLTTMHKGLIKAMDLAMGQEILVYSPIVSMTKIQRTPLPERKALPVRWITWMTYLEDPRIQFHYDKSLPELQQIPNVTEDVIAKTKHPSEFAMVFYTDGSAIKHPDVNKSHSAGMGIAQVQFIPEYKIVHQWSIPLGDHTAQLAEIAAVEFACKKALKISGPVLIVTDSFYVAESANKELPYWKSNGFLNNKKKPLRHVSKWKSIAECLQLKPDIIIMHEKGHQQPMTTLHTEGNNLADKLATQGSYVVHAGKRTADGSEFEKRTADGSEFESPKKKAKVE

SEQ ID NO: 6822 - protein, 2096 aa, synthetic construct
MPAAKRVKLDGGDKKYSIGLDIGTNSVGWAVITDEYKVPSKKFKVLGNTDRHSIKKNLIGALLFDSGETAEATRLKRTARRRYTRRKNRICYLQEIFSNEMAKVDDSFFHRLEESFLVEEDKKHERHPIFGNIVDEVAYHEKYPTIYHLRKKLVDSTDKADLRLIYLALAHMIKFRGHFLIEGDLNPDNSDVDKLFIQLVQTYNQLFEENPINASGVDAKAILSARLSKSRRLENLIAQLPGEKKNGLFGNLIALSLGLTPNFKSNFDLAEDAKLQLSKDTYDDDLDNLLAQIGDQYADLFLAAKNLSDAILLSDILRVNTEITKAPLSASMIKRYDEHHQDLTLLKALVRQQLPEKYKEIFFDQSKNGYAGYIDGGASQEEFYKFIKPILEKMDGTEELLVKLNREDLLRKQRTFDNGSIPHQIHLGELHAILRRQEDFYPFLKDNREKIEKILTFRIPYYVGPLARGNSRFAWMTRKSEETITPWNFEEVVDKGASAQSFIERMTNFDKNLPNEKVLPKHSLLYEYFTVYNELTKVKYVTEGMRKPAFLSGEQKKAIVDLLFKTNRKVTVKQLKEDYFKKIECFDSVEISGVEDRFNASLGTYHDLLKIIKDKDFLDNEENEDILEDIVLTLTLFEDREMIEERLKTYAHLFDDKVMKQLKRRRYTGWGRLSRKLINGIRDKQSGKTILDFLKSDGFANRNFMQLIHDDSLTFKEDIQKAQVSGQGDSLHEHIANLAGSPAIKKGILQTVKVVDELVKVMGRHKPENIVIEMARENQTTQKGQKNSRERMKRIEEGIKELGSQILKEHPVENTQLQNEKLYLYYLQNGRDMYVDQELDINRLSDYDVDHIVPQSFLKDDSIDNKVLTRSDKARGKSDNVPSEEVVKKMKNYWRQLLNAKLITQRKFDNLTKAERGGLSELDKAGFIKRQLVETRQITKHVAQILDSRMNTKYDENDKLIREVKVITLKSKLVSDFRKDFQFYKVREINNYHHAHDAYLNAVVGTALIKKYPKLESEFVYGDYKVYDVRKMIAKSEQEIGKATAKYFFYSNIMNFFKTEITLANGEIRKRPLIETNGETGEIVWDKGRDFATVRKVLSMPQVNIVKKTEVQTGGFSKESILPKRNSDKLIARKKDWDPKKYGGFDSPTVAYSVLVVAKVEKGKSKKLKSVKELLGITIMERSSFEKNPIDFLEAKGYKEVKKDLIIKLPKYSLFELENGRKRMLASAGELQKGNELALPSKYVNFLYLASHYEKLKGSPEDNEQKQLFVEQHKHYLDEIIEQISEFSKRVILADANLDKVLSAYNKHRDKPIREQAENIIHLFTLTNLGAPAAFKYFDTTIDRKRYTSTKEVLDATLIHQSITGLYETRIDLSQLGGDGGGGGGGSGSSGGTAPLEEEYRLFLEAPIQNVTLLEQWKREIPKVWAEINPPGLASTQAPIHVQLLSTALPVRVRQYPITLEAKRSLRETIRKFRAAGILRPVHSPWNTPLLPVRKSGTSEYRMVQDLREVNKRVETIHPTVPNPYTLLSLLPPDRIWYSVLDLKDAFFCIPLAPESQLIFAFEWADAEEGESGQLTWTRLPQGFKNSPTLFDEALNRDLQGFRLDHPSVSLLQYVDDLLIAADTQAACLSATRDLLMTLAELGYRVSGKKAQLCQEEVTYLGFKIHKGSRSLSNSRTQAILQIPVPKTKRQVREFLGTIGYCRLWIPGFAELAQPLYAATRGGNDPLVWGEKEEEAFQSLKLALTQPPALALPSLDKPFQLFVEETSGAAKGVLTQALGPWKRPVAYLSKRLDPVAAGWPRCLRAIAAAALLTREASKLTFGQDIEITSSHNLESLLRSPPDKWLTNARITQYQVLLLDPPRVRFKQTAALNPATLLPETDDTLPIHHCLDTLDSLTSTRPDLTDQPLAQAEATLFTDGSSYIRDGKRYAGAAVVTLDSVIWAEPLPIGTSAQKAELIALTKALEWSKDKSVNIYTDSRYAFATLHVHGMIYRERGLLTAGGKAIKNAPEILALLTAVWLPKRVAVMHCKGHQKDDAPTSTGNRRADEVAREVAIRPLSTQATISAGKRTADGSEFEKRTADGSEFESPKKKAKVE

SEQ ID NO: 6823 - protein, 2096 aa, synthetic construct
MPAAKRVKLDGGDKKYSIGLDIGTNSVGWAVITDEYKVPSKKFKVLGNTDRHSIKKNLIGALLFDSGETAEATRLKRTARRRYTRRKNRICYLQEIFSNEMAKVDDSFFHRLEESFLVEEDKKHERHPIFGNIVDEVAYHEKYPTIYHLRKKLVDSTDKADLRLIYLALAHMIKFRGHFLIEGDLNPDNSDVDKLFIQLVQTYNQLFEENPINASGVDAKAILSARLSKSRRLENLIAQLPGEKKNGLFGNLIALSLGLTPNFKSNFDLAEDAKLQLSKDTYDDDLDNLLAQIGDQYADLFLAAKNLSDAILLSDILRVNTEITKAPLSASMIKRYDEHHQDLTLLKALVRQQLPEKYKEIFFDQSKNGYAGYIDGGASQEEFYKFIKPILEKMDGTEELLVKLNREDLLRKQRTFDNGSIPHQIHLGELHAILRRQEDFYPFLKDNREKIEKILTFRIPYYVGPLARGNSRFAWMTRKSEETITPWNFEEVVDKGASAQSFIERMTNFDKNLPNEKVLPKHSLLYEYFTVYNELTKVKYVTEGMRKPAFLSGEQKKAIVDLLFKTNRKVTVKQLKEDYFKKIECFDSVEISGVEDRFNASLGTYHDLLKIIKDKDFLDNEENEDILEDIVLTLTLFEDREMIEERLKTYAHLFDDKVMKQLKRRRYTGWGRLSRKLINGIRDKQSGKTILDFLKSDGFANRNFMQLIHDDSLTFKEDIQKAQVSGQGDSLHEHIANLAGSPAIKKGILQTVKVVDELVKVMGRHKPENIVIEMARENQTTQKGQKNSRERMKRIEEGIKELGSQILKEHPVENTQLQNEKLYLYYLQNGRDMYVDQELDINRLSDYDVDHIVPQSFLKDDSIDNKVLTRSDKARGKSDNVPSEEVVKKMKNYWRQLLNAKLITQRKFDNLTKAERGGLSELDKAGFIKRQLVETRQITKHVAQILDSRMNTKYDENDKLIREVKVITLKSKLVSDFRKDFQFYKVREINNYHHAHDAYLNAVVGTALIKKYPKLESEFVYGDYKVYDVRKMIAKSEQEIGKATAKYFFYSNIMNFFKTEITLANGEIRKRPLIETNGETGEIVWDKGRDFATVRKVLSMPQVNIVKKTEVQTGGFSKESILPKRNSDKLIARKKDWDPKKYGGFDSPTVAYSVLVVAKVEKGKSKKLKSVKELLGITIMERSSFEKNPIDFLEAKGYKEVKKDLIIKLPKYSLFELENGRKRMLASAGELQKGNELALPSKYVNFLYLASHYEKLKGSPEDNEQKQLFVEQHKHYLDEIIEQISEFSKRVILADANLDKVLSAYNKHRDKPIREQAENIIHLFTLTNLGAPAAFKYFDTTIDRKRYTSTKEVLDATLIHQSITGLYETRIDLSQLGGDGGGGGGGSGSSGGTAPLEEEYRLFLEAPIQNVTLLEQWKREIPKVWAEINPPGLASTQAPIHVQLLSTALPVRVRQYPITLEAKRSLRETIRKFRAAGILRPVHSPWNTPLLPVRKSGTSEYRMVQDLREVNKRVETIHPTVPNPYTLLSLLPPDRIWYSVLDLKDAFFCIPLAPESQLIFAFEWADAEEGESGQLTWTRLPQGFKNSPTLFNEALNRDLQGFRLDHPSVSLLQYVDDLLIAADTQAACLSATRDLLMTLAELGYRVSGKKAQLCQEEVTYLGFKIHKGSRSLSNSRTQAILQIPVPKTKRQVREFLGTIGYCRLWIPGFAELAQPLYAATRPGNDPLVWGEKEEEAFQSLKLALTQPPALALPSLDKPFQLFVEETSGAAKGVLTQALGPWKRPVAYLSKRLDPVAAGWPRCLRAIAAAALLTREASKLTFGQDIEITSSHNLESLLRSPPDKWLTNARITQYQVLLLDPPRVRFKQTAALNPATLLPETDDTLPIHHCLDTLDSLTSTRPDLTDQPLAQAEATLFTDGSSYIRDGKRYAGAAVVTLDSVIWAEPLPIGTSAQKAELIALTKALEWSKDKSVNIYTDSRYAFATLHVHGMIYRERGWLTAGGKAIKNAPEILALLTAVWLPKRVAVMHCKGHQKDDAPTSTGNRRADEVAREVAIRPLSTQATISAGKRTADGSEFEKRTADGSEFESPKKKAKVE

SEQ ID NO: 6824 - protein, 2096 aa, synthetic construct
MPAAKRVKLDGGDKKYSIGLDIGTNSVGWAVITDEYKVPSKKFKVLGNTDRHSIKKNLIGALLFDSGETAEATRLKRTARRRYTRRKNRICYLQEIFSNEMAKVDDSFFHRLEESFLVEEDKKHERHPIFGNIVDEVAYHEKYPTIYHLRKKLVDSTDKADLRLIYLALAHMIKFRGHFLIEGDLNPDNSDVDKLFIQLVQTYNQLFEENPINASGVDAKAILSARLSKSRRLENLIAQLPGEKKNGLFGNLIALSLGLTPNFKSNFDLAEDAKLQLSKDTYDDDLDNLLAQIGDQYADLFLAAKNLSDAILLSDILRVNTEITKAPLSASMIKRYDEHHQDLTLLKALVRQQLPEKYKEIFFDQSKNGYAGYIDGGASQEEFYKFIKPILEKMDGTEELLVKLNREDLLRKQRTFDNGSIPHQIHLGELHAILRRQEDFYPFLKDNREKIEKILTFRIPYYVGPLARGNSRFAWMTRKSEETITPWNFEEVVDKGASAQSFIERMTNFDKNLPNEKVLPKHSLLYEYFTVYNELTKVKYVTEGMRKPAFLSGEQKKAIVDLLFKTNRKVTVKQLKEDYFKKIECFDSVEISGVEDRFNASLGTYHDLLKIIKDKDFLDNEENEDILEDIVLTLTLFEDREMIEERLKTYAHLFDDKVMKQLKRRRYTGWGRLSRKLINGIRDKQSGKTILDFLKSDGFANRNFMQLIHDDSLTFKEDIQKAQVSGQGDSLHEHIANLAGSPAIKKGILQTVKVVDELVKVMGRHKPENIVIEMARENQTTQKGQKNSRERMKRIEEGIKELGSQILKEHPVENTQLQNEKLYLYYLQNGRDMYVDQELDINRLSDYDVDHIVPQSFLKDDSIDNKVLTRSDKARGKSDNVPSEEVVKKMKNYWRQLLNAKLITQRKFDNLTKAERGGLSELDKAGFIKRQLVETRQITKHVAQILDSRMNTKYDENDKLIREVKVITLKSKLVSDFRKDFQFYKVREINNYHHAHDAYLNAVVGTALIKKYPKLESEFVYGDYKVYDVRKMIAKSEQEIGKATAKYFFYSNIMNFFKTEITLANGEIRKRPLIETNGETGEIVWDKGRDFATVRKVLSMPQVNIVKKTEVQTGGFSKESILPKRNSDKLIARKKDWDPKKYGGFDSPTVAYSVLVVAKVEKGKSKKLKSVKELLGITIMERSSFEKNPIDFLEAKGYKEVKKDLIIKLPKYSLFELENGRKRMLASAGELQKGNELALPSKYVNFLYLASHYEKLKGSPEDNEQKQLFVEQHKHYLDEIIEQISEFSKRVILADANLDKVLSAYNKHRDKPIREQAENIIHLFTLTNLGAPAAFKYFDTTIDRKRYTSTKEVLDATLIHQSITGLYETRIDLSQLGGDGGGGGGGSGSSGGTAPLEEEYRLFLEAPIQNVTLLEQWKREIPKVWAEINPPGLASTQAPIHVQLLSTALPVRVRQYPITLEAKRSLRETIRKFRAAGILRPVHSPWNTPLLPVRKSGTSEYRMVQDLREVNKRVETIHPTVPNPYTLLSLLPPDRIWYSVLDLKDAFFCIPLAPESQLIFAFEWADAEEGESGQLTWTRLPQGFKNSPTLFNEALNRDLQGFRLDHPSVSLLQYVDDLLIAADTQAACLSATRDLLMTLAELGYRVSGKKAQLCQEEVTYLGFKIHKGSRSLSNSRTQAILQIPVPKTKRQVREFLGKIGYCRLFIPGFAELAQPLYAATRPGNDPLVWGEKEEEAFQSLKLALTQPPALALPSLDKPFQLFVEETSGAAKGVLTQALGPWKRPVAYLSKRLDPVAAGWPRCLRAIAAAALLTREASKLTFGQDIEITSSHNLESLLRSPPDKWLTNARITQYQVLLLDPPRVRFKQTAALNPATLLPETDDTLPIHHCLDTLDSLTSTRPDLTDQPLAQAEATLFTDGSSYIRDGKRYAGAAVVTLDSVIWAEPLPIGTSAQKAELIALTKALEWSKDKSVNIYTDSRYAFATLHVHGMIYRERGWLTAGGKAIKNAPEILALLTAVWLPKRVAVMHCKGHQKDDAPTSTGNRRADEVAREVAIRPLSTQATISAGKRTADGSEFEKRTADGSEFESPKKKAKVE

SEQ ID NO: 6825 - protein, 2100 aa, synthetic construct
MPAAKRVKLDGGDKKYSIGLDIGTNSVGWAVITDEYKVPSKKFKVLGNTDRHSIKKNLIGALLFDSGETAEATRLKRTARRRYTRRKNRICYLQEIFSNEMAKVDDSFFHRLEESFLVEEDKKHERHPIFGNIVDEVAYHEKYPTIYHLRKKLVDSTDKADLRLIYLALAHMIKFRGHFLIEGDLNPDNSDVDKLFIQLVQTYNQLFEENPINASGVDAKAILSARLSKSRRLENLIAQLPGEKKNGLFGNLIALSLGLTPNFKSNFDLAEDAKLQLSKDTYDDDLDNLLAQIGDQYADLFLAAKNLSDAILLSDILRVNTEITKAPLSASMIKRYDEHHQDLTLLKALVRQQLPEKYKEIFFDQSKNGYAGYIDGGASQEEFYKFIKPILEKMDGTEELLVKLNREDLLRKQRTFDNGSIPHQIHLGELHAILRRQEDFYPFLKDNREKIEKILTFRIPYYVGPLARGNSRFAWMTRKSEETITPWNFEEVVDKGASAQSFIERMTNFDKNLPNEKVLPKHSLLYEYFTVYNELTKVKYVTEGMRKPAFLSGEQKKAIVDLLFKTNRKVTVKQLKEDYFKKIECFDSVEISGVEDRFNASLGTYHDLLKIIKDKDFLDNEENEDILEDIVLTLTLFEDREMIEERLKTYAHLFDDKVMKQLKRRRYTGWGRLSRKLINGIRDKQSGKTILDFLKSDGFANRNFMQLIHDDSLTFKEDIQKAQVSGQGDSLHEHIANLAGSPAIKKGILQTVKVVDELVKVMGRHKPENIVIEMARENQTTQKGQKNSRERMKRIEEGIKELGSQILKEHPVENTQLQNEKLYLYYLQNGRDMYVDQELDINRLSDYDVDHIVPQSFLKDDSIDNKVLTRSDKARGKSDNVPSEEVVKKMKNYWRQLLNAKLITQRKFDNLTKAERGGLSELDKAGFIKRQLVETRQITKHVAQILDSRMNTKYDENDKLIREVKVITLKSKLVSDFRKDFQFYKVREINNYHHAHDAYLNAVVGTALIKKYPKLESEFVYGDYKVYDVRKMIAKSEQEIGKATAKYFFYSNIMNFFKTEITLANGEIRKRPLIETNGETGEIVWDKGRDFATVRKVLSMPQVNIVKKTEVQTGGFSKESILPKRNSDKLIARKKDWDPKKYGGFDSPTVAYSVLVVAKVEKGKSKKLKSVKELLGITIMERSSFEKNPIDFLEAKGYKEVKKDLIIKLPKYSLFELENGRKRMLASAGELQKGNELALPSKYVNFLYLASHYEKLKGSPEDNEQKQLFVEQHKHYLDEIIEQISEFSKRVILADANLDKVLSAYNKHRDKPIREQAENIIHLFTLTNLGAPAAFKYFDTTIDRKRYTSTKEVLDATLIHQSITGLYETRIDLSQLGGDGGGGGGGSGSSGGTVSLQDEHRLFDIPVTTSLPDVWLQDFPQAWAETGGLGRAKCQAPIIIDLKPTAVPVSIKQYPMSLEAHMGIRQHIIKFLELGVLRPCRSPWNTPLLPVKKPGTQDYRPVQDLREINKRTVDIHPTVPNPYNLLSTLKPDYSWYTVLDLKDAFFCLPLAPQSQELFAFEWKDPERGISGQLTWTRLPQGFKNSPTLFNEALHRDLTDFRTQHPEVTLLQYVDDLLLAAPTKKACTQGTRHLLQELGEKGYRASAKKAQICQTKVTYLGYILSEGKRWLTPGRIETVARIPPPRNPREVREFLGTAGFCRLWIPGFAELAAPLYALTKPSTPFTWQTEHQLAFEALKKALLSAPALGLPDTSKPFTLFLDERQGIAKGVLTQKLGPWKRPVAYLSKKLDPVAAGWPPCLRIMAATAMLVKDSAKLTLGQPLTVITPHTLEAIVRQPPDRWITNARLTHYQALLLDTDRVQFGPPVTLNPATLLPVPENQPSPHDCRQVLAETHGTREDLKDQELPDADHTWYTDGSSYLDSGTRRAGAAVVDGHNTIWAQSLPPGTSAQKAELIALTKALELSKGKKANIYTDSRYAFATAHTHGSIYERRGWLTSEGKEIKNKAEIIALLKALFLPQEVAIIHCPGHQKGQDPVAVGNRQADRVARQAAMAEVLTLATEPDNTSHITAGKRTADGSEFEKRTADGSEFESPKKKAKVE

SEQ ID NO: 6826 - protein, 2093 aa, synthetic construct
MPAAKRVKLDGGDKKYSIGLDIGTNSVGWAVITDEYKVPSKKFKVLGNTDRHSIKKNLIGALLFDSGETAEATRLKRTARRRYTRRKNRICYLQEIFSNEMAKVDDSFFHRLEESFLVEEDKKHERHPIFGNIVDEVAYHEKYPTIYHLRKKLVDSTDKADLRLIYLALAHMIKFRGHFLIEGDLNPDNSDVDKLFIQLVQTYNQLFEENPINASGVDAKAILSARLSKSRRLENLIAQLPGEKKNGLFGNLIALSLGLTPNFKSNFDLAEDAKLQLSKDTYDDDLDNLLAQIGDQYADLFLAAKNLSDAILLSDILRVNTEITKAPLSASMIKRYDEHHQDLTLLKALVRQQLPEKYKEIFFDQSKNGYAGYIDGGASQEEFYKFIKPILEKMDGTEELLVKLNREDLLRKQRTFDNGSIPHQIHLGELHAILRRQEDFYPFLKDNREKIEKILTFRIPYYVGPLARGNSRFAWMTRKSEETITPWNFEEVVDKGASAQSFIERMTNFDKNLPNEKVLPKHSLLYEYFTVYNELTKVKYVTEGMRKPAFLSGEQKKAIVDLLFKTNRKVTVKQLKEDYFKKIECFDSVEISGVEDRFNASLGTYHDLLKIIKDKDFLDNEENEDILEDIVLTLTLFEDREMIEERLKTYAHLFDDKVMKQLKRRRYTGWGRLSRKLINGIRDKQSGKTILDFLKSDGFANRNFMQLIHDDSLTFKEDIQKAQVSGQGDSLHEHIANLAGSPAIKKGILQTVKVVDELVKVMGRHKPENIVIEMARENQTTQKGQKNSRERMKRIEEGIKELGSQILKEHPVENTQLQNEKLYLYYLQNGRDMYVDQELDINRLSDYDVDHIVPQSFLKDDSIDNKVLTRSDKARGKSDNVPSEEVVKKMKNYWRQLLNAKLITQRKFDNLTKAERGGLSELDKAGFIKRQLVETRQITKHVAQILDSRMNTKYDENDKLIREVKVITLKSKLVSDFRKDFQFYKVREINNYHHAHDAYLNAVVGTALIKKYPKLESEFVYGDYKVYDVRKMIAKSEQEIGKATAKYFFYSNIMNFFKTEITLANGEIRKRPLIETNGETGEIVWDKGRDFATVRKVLSMPQVNIVKKTEVQTGGFSKESILPKRNSDKLIARKKDWDPKKYGGFDSPTVAYSVLVVAKVEKGKSKKLKSVKELLGITIMERSSFEKNPIDFLEAKGYKEVKKDLIIKLPKYSLFELENGRKRMLASAGELQKGNELALPSKYVNFLYLASHYEKLKGSPEDNEQKQLFVEQHKHYLDEIIEQISEFSKRVILADANLDKVLSAYNKHRDKPIREQAENIIHLFTLTNLGAPAAFKYFDTTIDRKRYTSTKEVLDATLIHQSITGLYETRIDLSQLGGDGGGGGGGSGSSGGTLQLEEEYRLFEPESTQKQEMDIWLKNFPQAWAETGGMGTAHCQAPVLIQLKATATPISIRQYPMPHEAYQGIKPHIRRMLDQGILKPCQSPWNTPLLPVKKPGTEDYRPVQDLREVNKRVEDIHPTVPNPYNLLSTLPPSHPWYTVLDLKDAFFCLRLHSESQLLFAFEWRDPEIGLSGQLTWTRLPQGFKNSPTLFNEALHSDLADFRVRYPALVLLQYVDDLLLAAATRTECLEGTKALLETLGNKGYRASAKKAQICLQEVTYLGYSLKDGQRWLTKARKEAILSIPVPKNSRQVREFLGKAGYCRLFIPGFAELAAPLYPLTRPGTLFQWGTEQQLAFEDIKKALLSSPALGLPDITKPFELFIDENSGFAKGVLVQKLGPWKRPVAYLSKKLDTVASGWPPCLRMVAAIAILVKDAGKLTLGQPLTILTSHPVEALVRQPPNKWLSNARMTHYQAMLLDAERVHFGPTVSLNPATLLPLPSGGNHHDCLQILAETHGTRPDLTDQPLPDADLTWYTDGSSFIRNGEREAGAAVTTESEVIWAAPLPPGTSAQRAELIALTQALKMAEGKKLTVYTDSRYAFATTHVHGEIYRRRGWLTSEGKEIKNKNEILALLEALFLPKRLSIIHCPGHQKGDSPQAKGNRLADDTAKKAATETHSSLTVLPAGKRTADGSEFEKRTADGSEFESPKKKAKVE

SEQ ID NO: 6827 - protein, 2174 aa, synthetic construct
MPAAKRVKLDGGDKKYSIGLDIGTNSVGWAVITDEYKVPSKKFKVLGNTDRHSIKKNLIGALLFDSGETAEATRLKRTARRRYTRRKNRICYLQEIFSNEMAKVDDSFFHRLEESFLVEEDKKHERHPIFGNIVDEVAYHEKYPTIYHLRKKLVDSTDKADLRLIYLALAHMIKFRGHFLIEGDLNPDNSDVDKLFIQLVQTYNQLFEENPINASGVDAKAILSARLSKSRRLENLIAQLPGEKKNGLFGNLIALSLGLTPNFKSNFDLAEDAKLQLSKDTYDDDLDNLLAQIGDQYADLFLAAKNLSDAILLSDILRVNTEITKAPLSASMIKRYDEHHQDLTLLKALVRQQLPEKYKEIFFDQSKNGYAGYIDGGASQEEFYKFIKPILEKMDGTEELLVKLNREDLLRKQRTFDNGSIPHQIHLGELHAILRRQEDFYPFLKDNREKIEKILTFRIPYYVGPLARGNSRFAWMTRKSEETITPWNFEEVVDKGASAQSFIERMTNFDKNLPNEKVLPKHSLLYEYFTVYNELTKVKYVTEGMRKPAFLSGEQKKAIVDLLFKTNRKVTVKQLKEDYFKKIECFDSVEISGVEDRFNASLGTYHDLLKIIKDKDFLDNEENEDILEDIVLTLTLFEDREMIEERLKTYAHLFDDKVMKQLKRRRYTGWGRLSRKLINGIRDKQSGKTILDFLKSDGFANRNFMQLIHDDSLTFKEDIQKAQVSGQGDSLHEHIANLAGSPAIKKGILQTVKVVDELVKVMGRHKPENIVIEMARENQTTQKGQKNSRERMKRIEEGIKELGSQILKEHPVENTQLQNEKLYLYYLQNGRDMYVDQELDINRLSDYDVDHIVPQSFLKDDSIDNKVLTRSDKARGKSDNVPSEEVVKKMKNYWRQLLNAKLITQRKFDNLTKAERGGLSELDKAGFIKRQLVETRQITKHVAQILDSRMNTKYDENDKLIREVKVITLKSKLVSDFRKDFQFYKVREINNYHHAHDAYLNAVVGTALIKKYPKLESEFVYGDYKVYDVRKMIAKSEQEIGKATAKYFFYSNIMNFFKTEITLANGEIRKRPLIETNGETGEIVWDKGRDFATVRKVLSMPQVNIVKKTEVQTGGFSKESILPKRNSDKLIARKKDWDPKKYGGFDSPTVAYSVLVVAKVEKGKSKKLKSVKELLGITIMERSSFEKNPIDFLEAKGYKEVKKDLIIKLPKYSLFELENGRKRMLASAGELQKGNELALPSKYVNFLYLASHYEKLKGSPEDNEQKQLFVEQHKHYLDEIIEQISEFSKRVILADANLDKVLSAYNKHRDKPIREQAENIIHLFTLTNLGAPAAFKYFDTTIDRKRYTSTKEVLDATLIHQSITGLYETRIDLSQLGGDGGGGGGGSGSSGGMNPLQLLQPLPAEIKGTKLLAHWNSGATITCIPESFLEDEQPIKKTLIKTIHGEKQQNVYYVTFKVKGRKVEAEVIASPYEYILLSPTDVPWLTQQPLQLTILVPLQEYQEKILSKTALPEDQKQQLKTLFVKYDNLWQHWENQVGHRKIRPHNIATGDYPPRPQKQYPINPKAKPSIQIVIDDLLKQGVLTPQNSTMNTPVYPVPKPDGRWRMVLDYREVNKTIPLTAAQNQHSAGILATIVRQKYKTTLDLANGFWAHPITPESYWLTAFTWQGKQYCWTRLPQGFLNSPALFNADVVDLLKEIPNVQVYVDDIYLSHDDPKEHVQQLEKVFQILLQAGYVVSLKKSEIGQKTVEFLGFNITKEGRGLTDTFKTKLLNITPPKDLKQLQSILGKLNFARNFIPNFAELVQPLYNLIAPAKGKYIEWSEENTKQLNMVIEALNTASNLEERLPEQRLVIKVNTSPSAGYVRYYNETGKKPIMYLNYVFSKAELKFSMLEKLLTTMHKALIKAMDLAMGQEILVYSPIVSMTKIQKTPLPERKALPIRWITWMTYLEDPRIQFHYDKTLPELKHIPDVYTSSQSPVKHPSQYEGVFYTDGSAIKSPDPTKSNNAGMGIVHATYKPEYQVLNQWSIPLGNHTAQMAEIAAVEFACKKALKIPGPVLVITDSFYVAESANKELPYWKSNGFVNNKKKPLKHISKWKSIAECLSMKPDITIQHEKGISLQIPVFILKGNALADKLATQGSYVVNAGKRTADGSEFEKRTADGSEFESPKKKAKVE

SEQ ID NO: 6828 - protein, 2125 aa, synthetic construct
MPAAKRVKLDGGDKKYSIGLDIGTNSVGWAVITDEYKVPSKKFKVLGNTDRHSIKKNLIGALLFDSGETAEATRLKRTARRRYTRRKNRICYLQEIFSNEMAKVDDSFFHRLEESFLVEEDKKHERHPIFGNIVDEVAYHEKYPTIYHLRKKLVDSTDKADLRLIYLALAHMIKFRGHFLIEGDLNPDNSDVDKLFIQLVQTYNQLFEENPINASGVDAKAILSARLSKSRRLENLIAQLPGEKKNGLFGNLIALSLGLTPNFKSNFDLAEDAKLQLSKDTYDDDLDNLLAQIGDQYADLFLAAKNLSDAILLSDILRVNTEITKAPLSASMIKRYDEHHQDLTLLKALVRQQLPEKYKEIFFDQSKNGYAGYIDGGASQEEFYKFIKPILEKMDGTEELLVKLNREDLLRKQRTFDNGSIPHQIHLGELHAILRRQEDFYPFLKDNREKIEKILTFRIPYYVGPLARGNSRFAWMTRKSEETITPWNFEEVVDKGASAQSFIERMTNFDKNLPNEKVLPKHSLLYEYFTVYNELTKVKYVTEGMRKPAFLSGEQKKAIVDLLFKTNRKVTVKQLKEDYFKKIECFDSVEISGVEDRFNASLGTYHDLLKIIKDKDFLDNEENEDILEDIVLTLTLFEDREMIEERLKTYAHLFDDKVMKQLKRRRYTGWGRLSRKLINGIRDKQSGKTILDFLKSDGFANRNFMQLIHDDSLTFKEDIQKAQVSGQGDSLHEHIANLAGSPAIKKGILQTVKVVDELVKVMGRHKPENIVIEMARENQTTQKGQKNSRERMKRIEEGIKELGSQILKEHPVENTQLQNEKLYLYYLQNGRDMYVDQELDINRLSDYDVDHIVPQSFLKDDSIDNKVLTRSDKARGKSDNVPSEEVVKKMKNYWRQLLNAKLITQRKFDNLTKAERGGLSELDKAGFIKRQLVETRQITKHVAQILDSRMNTKYDENDKLIREVKVITLKSKLVSDFRKDFQFYKVREINNYHHAHDAYLNAVVGTALIKKYPKLESEFVYGDYKVYDVRKMIAKSEQEIGKATAKYFFYSNIMNFFKTEITLANGEIRKRPLIETNGETGEIVWDKGRDFATVRKVLSMPQVNIVKKTEVQTGGFSKESILPKRNSDKLIARKKDWDPKKYGGFDSPTVAYSVLVVAKVEKGKSKKLKSVKELLGITIMERSSFEKNPIDFLEAKGYKEVKKDLIIKLPKYSLFELENGRKRMLASAGELQKGNELALPSKYVNFLYLASHYEKLKGSPEDNEQKQLFVEQHKHYLDEIIEQISEFSKRVILADANLDKVLSAYNKHRDKPIREQAENIIHLFTLTNLGAPAAFKYFDTTIDRKRYTSTKEVLDATLIHQSITGLYETRIDLSQLGGDGGGGGGGSGSSGGLLGRDLLTKLKAQIQFSTEGPQVTWEDRPAMCLVLNLEEEYRLHEKPVPPSIDPSWLQLFPMVWAEKAGMGLANQVPPVVVELKSDASPVAVRQYPMSKEAREGIRPHIQRFLDLGILVPCQSPWNTPLLPVKKPGTNDYRPVQDLREVNKRVQDIHPTVPNPYNLLSSLPPSHTWYSVLDLKDAFFCLKLHPNSQPLFAFEWRDPEKGNTGQLTWTRLPQGFKNSPTLFNEALHRDLASFRALNPQVVMLQYVDDLLVAAPTYRDCKEGTRRLLQELSKLGYRVSAKKAQLCREEVTYLGYLLKGGKRWLTPARKATVMKIPTPTTPRQVREFLGTAGFCRLWIPGFASLAAPLYPLTRPKVPFTWTEAHQEAFGRIKEALLSAPALALPDLTKPFALYVDEKEGVARGVLTQTLGPWRRPVAYLSKKLDPVASGWPTCLKAIAAVALLLKDADKLTLGQNVLVIAPHNLESIVRQPPDRWMTNARMTHYQSLLLNERVSFAPPAILNPATLLPVESDDTPIHICSEILAEETGTRPDLRDQPLPGVPAWYTDGSSFIMDGRRQAGAAIVDNKRTVWASNLPEGTSAQKAELIALTQALRLAEGKSINIYTDSRYAFATAHVHGAIYKQRGWLTSAGKDIKNKEEILALLEAIHLPKRVAIIHCPGHQRGTDPVATGNRKADEAAKQAAQSTRILTETTKNAGKRTADGSEFEKRTADGSEFESPKKKAKVE

SEQ ID NO: 6829 - protein, 2125 aa, synthetic construct
MPAAKRVKLDGGDKKYSIGLDIGTNSVGWAVITDEYKVPSKKFKVLGNTDRHSIKKNLIGALLFDSGETAEATRLKRTARRRYTRRKNRICYLQEIFSNEMAKVDDSFFHRLEESFLVEEDKKHERHPIFGNIVDEVAYHEKYPTIYHLRKKLVDSTDKADLRLIYLALAHMIKFRGHFLIEGDLNPDNSDVDKLFIQLVQTYNQLFEENPINASGVDAKAILSARLSKSRRLENLIAQLPGEKKNGLFGNLIALSLGLTPNFKSNFDLAEDAKLQLSKDTYDDDLDNLLAQIGDQYADLFLAAKNLSDAILLSDILRVNTEITKAPLSASMIKRYDEHHQDLTLLKALVRQQLPEKYKEIFFDQSKNGYAGYIDGGASQEEFYKFIKPILEKMDGTEELLVKLNREDLLRKQRTFDNGSIPHQIHLGELHAILRRQEDFYPFLKDNREKIEKILTFRIPYYVGPLARGNSRFAWMTRKSEETITPWNFEEVVDKGASAQSFIERMTNFDKNLPNEKVLPKHSLLYEYFTVYNELTKVKYVTEGMRKPAFLSGEQKKAIVDLLFKTNRKVTVKQLKEDYFKKIECFDSVEISGVEDRFNASLGTYHDLLKIIKDKDFLDNEENEDILEDIVLTLTLFEDREMIEERLKTYAHLFDDKVMKQLKRRRYTGWGRLSRKLINGIRDKQSGKTILDFLKSDGFANRNFMQLIHDDSLTFKEDIQKAQVSGQGDSLHEHIANLAGSPAIKKGILQTVKVVDELVKVMGRHKPENIVIEMARENQTTQKGQKNSRERMKRIEEGIKELGSQILKEHPVENTQLQNEKLYLYYLQNGRDMYVDQELDINRLSDYDVDHIVPQSFLKDDSIDNKVLTRSDKARGKSDNVPSEEVVKKMKNYWRQLLNAKLITQRKFDNLTKAERGGLSELDKAGFIKRQLVETRQITKHVAQILDSRMNTKYDENDKLIREVKVITLKSKLVSDFRKDFQFYKVREINNYHHAHDAYLNAVVGTALIKKYPKLESEFVYGDYKVYDVRKMIAKSEQEIGKATAKYFFYSNIMNFFKTEITLANGEIRKRPLIETNGETGEIVWDKGRDFATVRKVLSMPQVNIVKKTEVQTGGFSKESILPKRNSDKLIARKKDWDPKKYGGFDSPTVAYSVLVVAKVEKGKSKKLKSVKELLGITIMERSSFEKNPIDFLEAKGYKEVKKDLIIKLPKYSLFELENGRKRMLASAGELQKGNELALPSKYVNFLYLASHYEKLKGSPEDNEQKQLFVEQHKHYLDEIIEQISEFSKRVILADANLDKVLSAYNKHRDKPIREQAENIIHLFTLTNLGAPAAFKYFDTTIDRKRYTSTKEVLDATLIHQSITGLYETRIDLSQLGGDGGGGGGGSGSSGGLLGRDLLTKLKAQIQFSTEGPQVTWEDRPAMCLVLNLEEEYRLHEKPVPPSIDPSWLQLFPMVWAEKAGMGLANQVPPVVVELKSDASPVAVRQYPMSKEAREGIRPHIQRFLDLGILVPCQSPWNTPLLPVKKPGTNDYRPVQDLREVNKRVQDIHPTVPNPYNLLSSLPPSHTWYSVLDLKDAFFCLKLHPNSQPLFAFEWRDPEKGNTGQLTWTRLPQGFKNSPTLFNEALHRDLASFRALNPQVVMLQYVDDLLVAAPTYRDCKEGTRRLLQELSKLGYRVSAKKAQLCREEVTYLGYLLKGGKRWLTPARKATVMKIPTPTTPRQVREFLGKAGFCRLFIPGFASLAAPLYPLTRPKVPFTWTEAHQEAFGRIKEALLSAPALALPDLTKPFALYVDEKEGVARGVLTQTLGPWRRPVAYLSKKLDPVASGWPTCLKAIAAVALLLKDADKLTLGQNVLVIAPHNLESIVRQPPDRWMTNARMTHYQSLLLNERVSFAPPAILNPATLLPVESDDTPIHICSEILAEETGTRPDLRDQPLPGVPAWYTDGSSFIMDGRRQAGAAIVDNKRTVWASNLPEGTSAQKAELIALTQALRLAEGKSINIYTDSRYAFATAHVHGAIYKQRGWLTSAGKDIKNKEEILALLEAIHLPKRVAIIHCPGHQRGTDPVATGNRKADEAAKQAAQSTRILTETTKNAGKRTADGSEFEKRTADGSEFESPKKKAKVE

SEQ ID NO: 6830 - protein, 2094 aa, synthetic construct
MPAAKRVKLDGGDKKYSIGLDIGTNSVGWAVITDEYKVPSKKFKVLGNTDRHSIKKNLIGALLFDSGETAEATRLKRTARRRYTRRKNRICYLQEIFSNEMAKVDDSFFHRLEESFLVEEDKKHERHPIFGNIVDEVAYHEKYPTIYHLRKKLVDSTDKADLRLIYLALAHMIKFRGHFLIEGDLNPDNSDVDKLFIQLVQTYNQLFEENPINASGVDAKAILSARLSKSRRLENLIAQLPGEKKNGLFGNLIALSLGLTPNFKSNFDLAEDAKLQLSKDTYDDDLDNLLAQIGDQYADLFLAAKNLSDAILLSDILRVNTEITKAPLSASMIKRYDEHHQDLTLLKALVRQQLPEKYKEIFFDQSKNGYAGYIDGGASQEEFYKFIKPILEKMDGTEELLVKLNREDLLRKQRTFDNGSIPHQIHLGELHAILRRQEDFYPFLKDNREKIEKILTFRIPYYVGPLARGNSRFAWMTRKSEETITPWNFEEVVDKGASAQSFIERMTNFDKNLPNEKVLPKHSLLYEYFTVYNELTKVKYVTEGMRKPAFLSGEQKKAIVDLLFKTNRKVTVKQLKEDYFKKIECFDSVEISGVEDRFNASLGTYHDLLKIIKDKDFLDNEENEDILEDIVLTLTLFEDREMIEERLKTYAHLFDDKVMKQLKRRRYTGWGRLSRKLINGIRDKQSGKTILDFLKSDGFANRNFMQLIHDDSLTFKEDIQKAQVSGQGDSLHEHIANLAGSPAIKKGILQTVKVVDELVKVMGRHKPENIVIEMARENQTTQKGQKNSRERMKRIEEGIKELGSQILKEHPVENTQLQNEKLYLYYLQNGRDMYVDQELDINRLSDYDVDHIVPQSFLKDDSIDNKVLTRSDKARGKSDNVPSEEVVKKMKNYWRQLLNAKLITQRKFDNLTKAERGGLSELDKAGFIKRQLVETRQITKHVAQILDSRMNTKYDENDKLIREVKVITLKSKLVSDFRKDFQFYKVREINNYHHAHDAYLNAVVGTALIKKYPKLESEFVYGDYKVYDVRKMIAKSEQEIGKATAKYFFYSNIMNFFKTEITLANGEIRKRPLIETNGETGEIVWDKGRDFATVRKVLSMPQVNIVKKTEVQTGGFSKESILPKRNSDKLIARKKDWDPKKYGGFDSPTVAYSVLVVAKVEKGKSKKLKSVKELLGITIMERSSFEKNPIDFLEAKGYKEVKKDLIIKLPKYSLFELENGRKRMLASAGELQKGNELALPSKYVNFLYLASHYEKLKGSPEDNEQKQLFVEQHKHYLDEIIEQISEFSKRVILADANLDKVLSAYNKHRDKPIREQAENIIHLFTLTNLGAPAAFKYFDTTIDRKRYTSTKEVLDATLIHQSITGLYETRIDLSQLGGDGGGGGGGSGSSGGTLNIEDEYRLHETSKGPDVPLGSTWLSDFPQAWAETGGMGLAVRQAPLIIPLKATSTPVSIKQYPMSQEARLGIKPHIQRLLDQGILVPCQSPWNTPLLPVKKPGTNDYRPVQDLREVNKRVEDIHPTVPNPYNLLSGLPPSHQWYTVLDLKDAFFCLRLHPTSQSLFAFEWRDPEMGISGQLTWTRLPQGFKNSPTLFNEALHRDLADFRIQHPDLILLQYVDDLLLAATSELDCQQGTRALLQTLGDLGYRASAKKAQICQKQVKYLGYLLKEGQRWLTEARKETVMGQPTPKTPRQLREFLGTAGFCRLWIPGFAEMAAPLYPLTKPGTLFEWGPDQQKAYQEIKQALLTAPALGLPDLTKPFELFVDEKQGYAKGVLTQKLGPWRRPVAYLSKKLDPVAAGWPPCLRMVAAIAVLTKDAGKLTMGQPLVILAPHAVEALVKQPPDRWLSNARMTHYQALLLDTDRVQFGPIVALNPATLLPLPEEGLQHDCLDILAEAHGTRPDLTDQPLPDADHTWYTDGSSFLQEGQRKAGAAVTTETEVVWAKALPAGTSAQRAELIALTQALKMAEGKKLNVYTDSRYAFATAHIHGEIYRRRGWLTSEGKEIKNKDEILALLKALFLPKRLSIIHCPGHQKGNRAEARGNRMADQAAREVATRETPETSTLLAGKRTADGSEFEKRTADGSEFESPKKKAKVE

SEQ ID NO: 6831 - protein, 2094 aa, synthetic construct
MPAAKRVKLDGGDKKYSIGLDIGTNSVGWAVITDEYKVPSKKFKVLGNTDRHSIKKNLIGALLFDSGETAEATRLKRTARRRYTRRKNRICYLQEIFSNEMAKVDDSFFHRLEESFLVEEDKKHERHPIFGNIVDEVAYHEKYPTIYHLRKKLVDSTDKADLRLIYLALAHMIKFRGHFLIEGDLNPDNSDVDKLFIQLVQTYNQLFEENPINASGVDAKAILSARLSKSRRLENLIAQLPGEKKNGLFGNLIALSLGLTPNFKSNFDLAEDAKLQLSKDTYDDDLDNLLAQIGDQYADLFLAAKNLSDAILLSDILRVNTEITKAPLSASMIKRYDEHHQDLTLLKALVRQQLPEKYKEIFFDQSKNGYAGYIDGGASQEEFYKFIKPILEKMDGTEELLVKLNREDLLRKQRTFDNGSIPHQIHLGELHAILRRQEDFYPFLKDNREKIEKILTFRIPYYVGPLARGNSRFAWMTRKSEETITPWNFEEVVDKGASAQSFIERMTNFDKNLPNEKVLPKHSLLYEYFTVYNELTKVKYVTEGMRKPAFLSGEQKKAIVDLLFKTNRKVTVKQLKEDYFKKIECFDSVEISGVEDRFNASLGTYHDLLKIIKDKDFLDNEENEDILEDIVLTLTLFEDREMIEERLKTYAHLFDDKVMKQLKRRRYTGWGRLSRKLINGIRDKQSGKTILDFLKSDGFANRNFMQLIHDDSLTFKEDIQKAQVSGQGDSLHEHIANLAGSPAIKKGILQTVKVVDELVKVMGRHKPENIVIEMARENQTTQKGQKNSRERMKRIEEGIKELGSQILKEHPVENTQLQNEKLYLYYLQNGRDMYVDQELDINRLSDYDVDHIVPQSFLKDDSIDNKVLTRSDKARGKSDNVPSEEVVKKMKNYWRQLLNAKLITQRKFDNLTKAERGGLSELDKAGFIKRQLVETRQITKHVAQILDSRMNTKYDENDKLIREVKVITLKSKLVSDFRKDFQFYKVREINNYHHAHDAYLNAVVGTALIKKYPKLESEFVYGDYKVYDVRKMIAKSEQEIGKATAKYFFYSNIMNFFKTEITLANGEIRKRPLIETNGETGEIVWDKGRDFATVRKVLSMPQVNIVKKTEVQTGGFSKESILPKRNSDKLIARKKDWDPKKYGGFDSPTVAYSVLVVAKVEKGKSKKLKSVKELLGITIMERSSFEKNPIDFLEAKGYKEVKKDLIIKLPKYSLFELENGRKRMLASAGELQKGNELALPSKYVNFLYLASHYEKLKGSPEDNEQKQLFVEQHKHYLDEIIEQISEFSKRVILADANLDKVLSAYNKHRDKPIREQAENIIHLFTLTNLGAPAAFKYFDTTIDRKRYTSTKEVLDATLIHQSITGLYETRIDLSQLGGDGGGGGGGSGSSGGTLNIEDEHRLHETSKEPDVSLGSTWLSDFPQAWAETGGMGLAVRQAPLIIPLKATSTPVSIKQYPMSQEARLGIKPHIQRLLDQGILVPCQSPWNTPLLPVKKPGTNDYRPVQDLREVNKRVEDIHPTVPNPYNLLSGLPPSHQWYTVLDLKDAFFCLRLHPTSQPLFAFEWRDPEMGISGQLTWTRLPQGFKNSPTLFNEALHRDLADFRIQHPDLILLQYVDDLLLAATSELDCQQGTRALLQTLGNLGYRASAKKAQICQKQVKYLGYLLKEGQRWLTEARKETVMGQPTPKTPRQLREFLGTAGFCRLWIPGFAEMAAPLYPLTKPGTLFNWGPDQQKAYQEIKQALLTAPALGLPDLTKPFELFVDEKQGYAKGVLTQKLGPWRRPVAYLSKKLDPVAAGWPPCLRMVAAIAVLTKDAGKLTMGQPLVILAPHAVEALVKQPPDRWLSNARMTHYQALLLDTDRVQFGPVVALNPATLLPLPEEGLQHNCLDILAEAHGTRPDLTDQPLPDADHTWYTDGSSLLQEGQRKAGAAVTTETEVIWAKALPAGTSAQRAELIALTQALKMAEGKKLNVYTDSRYAFATAHIHGEIYRRRGWLTSEGKEIKNKDEILALLKALFLPKRLSIIHCPGHQKGHSAEARGNRMADQAARKAAITETPDTSTLLAGKRTADGSEFEKRTADGSEFESPKKKAKVE

SEQ ID NO: 6832 - protein, 2094 aa, synthetic construct; identical to SEQ ID NO: 6831

SEQ ID NO: 6833 - protein, 2086 aa, synthetic construct
MPAAKRVKLDGGDKKYSIGLDIGTNSVGWAVITDEYKVPSKKFKVLGNTDRHSIKKNLIGALLFDSGETAEATRLKRTARRRYTRRKNRICYLQEIFSNEMAKVDDSFFHRLEESFLVEEDKKHERHPIFGNIVDEVAYHEKYPTIYHLRKKLVDSTDKADLRLIYLALAHMIKFRGHFLIEGDLNPDNSDVDKLFIQLVQTYNQLFEENPINASGVDAKAILSARLSKSRRLENLIAQLPGEKKNGLFGNLIALSLGLTPNFKSNFDLAEDAKLQLSKDTYDDDLDNLLAQIGDQYADLFLAAKNLSDAILLSDILRVNTEITKAPLSASMIKRYDEHHQDLTLLKALVRQQLPEKYKEIFFDQSKNGYAGYIDGGASQEEFYKFIKPILEKMDGTEELLVKLNREDLLRKQRTFDNGSIPHQIHLGELHAILRRQEDFYPFLKDNREKIEKILTFRIPYYVGPLARGNSRFAWMTRKSEETITPWNFEEVVDKGASAQSFIERMTNFDKNLPNEKVLPKHSLLYEYFTVYNELTKVKYVTEGMRKPAFLSGEQKKAIVDLLFKTNRKVTVKQLKEDYFKKIECFDSVEISGVEDRFNASLGTYHDLLKIIKDKDFLDNEENEDILEDIVLTLTLFEDREMIEERLKTYAHLFDDKVMKQLKRRRYTGWGRLSRKLINGIRDKQSGKTILDFLKSDGFANRNFMQLIHDDSLTFKEDIQKAQVSGQGDSLHEHIANLAGSPAIKKGILQTVKVVDELVKVMGRHKPENIVIEMARENQTTQKGQKNSRERMKRIEEGIKELGSQILKEHPVENTQLQNEKLYLYYLQNGRDMYVDQELDINRLSDYDVDHIVPQSFLKDDSIDNKVLTRSDKARGKSDNVPSEEVVKKMKNYWRQLLNAKLITQRKFDNLTKAERGGLSELDKAGFIKRQLVETRQITKHVAQILDSRMNTKYDENDKLIREVKVITLKSKLVSDFRKDFQFYKVREINNYHHAHDAYLNAVVGTALIKKYPKLESEFVYGDYKVYDVRKMIAKSEQEIGKATAKYFFYSNIMNFFKTEITLANGEIRKRPLIETNGETGEIVWDKGRDFATVRKVLSMPQVNIVKKTEVQTGGFSKESILPKRNSDKLIARKKDWDPKKYGGFDSPTVAYSVLVVAKVEKGKSKKLKSVKELLGITIMERSSFEKNPIDFLEAKGYKEVKKDLIIKLPKYSLFELENGRKRMLASAGELQKGNELALPSKYVNFLYLASHYEKLKGSPEDNEQKQLFVEQHKHYLDEIIEQISEFSKRVILADANLDKVLSAYNKHRDKPIREQAENIIHLFTLTNLGAPAAFKYFDTTIDRKRYTSTKEVLDATLIHQSITGLYETRIDLSQLGGDGGGGGGGSGSSGGLDDEYRLYSPLVKPDQNIQFWLEQFPQAWAETAGMGLAKQVPPQVIQLKASATPVSVRQYPLSKEAQEGIRPHVQRLIQQGILVPVQSPWNTPLLPVRKPGTNDYRPVQDLREVNKRVQDIHPTVPNPYNLLCALPPQRSWYTVLDLKDAFFCLRLHPTSQPLFAFEWRDPGTGRTGQLTWTRLPQGFKNSPTIFNEALHRDLANFRIQHPQVTLLQYVDDLLLAGATKQDCLEGTKALLLELSDLGYRASAKKAQICRREVTYLGYSLRDGQRWLTEARKKTVVQIPAPTTAKQVREFLGKAGFCRLFIPGFATLAAPLYPLTKPKGEFSWAPEHQKAFDAIKKALLSAPALALPDVTKPFTLYVDERKGVARGVLTQTLGPWRRPVAYLSKKLDPVASGWPVCLKAIAAVAILVKDADKLTLGQNITVIAPHALENIVRQPPDRWMTNARMTHYQSLLLTERVTFAPPAALNPATLLPEETDEPVTHDCHQLLIEETGVRKDLTDIPLTGEVLTWFTDGSSYVVEGKRMAGAAVVDGTRTIWASSLPEGTSAQKAELMALTQALRLAEGKSINIYTDSRYAFATAHVHGAIYKQRGWLTSAGREIKNKEEILSLLEALHLPKRLAIIHCPGHQKAKDPISRGNQMADRVAKQAAQGVNLLPAGKRTADGSEFEKRTADGSEFESPKKKAKVE

SEQ ID NO: 6834 - protein, 2086 aa, synthetic construct; identical to SEQ ID NO: 6833

SEQ ID NO: 6835 - protein, 2088 aa, synthetic construct
MPAAKRVKLDGGDKKYSIGLDIGTNSVGWAVITDEYKVPSKKFKVLGNTDRHSIKKNLIGALLFDSGETAEATRLKRTARRRYTRRKNRICYLQEIFSNEMAKVDDSFFHRLEESFLVEEDKKHERHPIFGNIVDEVAYHEKYPTIYHLRKKLVDSTDKADLRLIYLALAHMIKFRGHFLIEGDLNPDNSDVDKLFIQLVQTYNQLFEENPINASGVDAKAILSARLSKSRRLENLIAQLPGEKKNGLFGNLIALSLGLTPNFKSNFDLAEDAKLQLSKDTYDDDLDNLLAQIGDQYADLFLAAKNLSDAILLSDILRVNTEITKAPLSASMIKRYDEHHQDLTLLKALVRQQLPEKYKEIFFDQSKNGYAGYIDGGASQEEFYKFIKPILEKMDGTEELLVKLNREDLLRKQRTFDNGSIPHQIHLGELHAILRRQEDFYPFLKDNREKIEKILTFRIPYYVGPLARGNSRFAWMTRKSEETITPWNFEEVVDKGASAQSFIERMTNFDKNLPNEKVLPKHSLLYEYFTVYNELTKVKYVTEGMRKPAFLSGEQKKAIVDLLFKTNRKVTVKQLKEDYFKKIECFDSVEISGVEDRFNASLGTYHDLLKIIKDKDFLDNEENEDILEDIVLTLTLFEDREMIEERLKTYAHLFDDKVMKQLKRRRYTGWGRLSRKLINGIRDKQSGKTILDFLKSDGFANRNFMQLIHDDSLTFKEDIQKAQVSGQGDSLHEHIANLAGSPAIKKGILQTVKVVDELVKVMGRHKPENIVIEMARENQTTQKGQKNSRERMKRIEEGIKELGSQILKEHPVENTQLQNEKLYLYYLQNGRDMYVDQELDINRLSDYDVDHIVPQSFLKDDSIDNKVLTRSDKARGKSDNVPSEEVVKKMKNYWRQLLNAKLITQRKFDNLTKAERGGLSELDKAGFIKRQLVETRQITKHVAQILDSRMNTKYDENDKLIREVKVITLKSKLVSDFRKDFQFYKVREINNYHHAHDAYLNAVVGTALIKKYPKLESEFVYGDYKVYDVRKMIAKSEQEIGKATAKYFFYSNIMNFFKTEITLANGEIRKRPLIETNGETGEIVWDKGRDFATVRKVLSMPQVNIVKKTEVQTGGFSKESILPKRNSDKLIARKKDWDPKKYGGFDSPTVAYSVLVVAKVEKGKSKKLKSVKELLGITIMERSSFEKNPIDFLEAKGYKEVKKDLIIKLPKYSLFELENGRKRMLASAGELQKGNELALPSKYVNFLYLASHYEKLKGSPEDNEQKQLFVEQHKHYLDEIIEQISEFSKRVILADANLDKVLSAYNKHRDKPIREQAENIIHLFTLTNLGAPAAFKYFDTTIDRKRYTSTKEVLDATLIHQSITGLYETRIDLSQLGGDGGGGGGGSGSSGGTLQLDDEYRLYSPLVKPDQNIQFWLEQFPQAWAETAGMGLAKQVPPQVIQLKASATPVSVRQYPLSKEAQEGIRPHVQRLIQQGILVPVQSPWNTPLLPVRKPGTNDYRPVQDLREVNKRVQDIHPTVPNPYNLLCALPPQRSWYTVLDLKDAFFCLRLHPTSQPLFAFEWRDPGTGRTGQLTWTRLPQGFKNSPTIFDEALHRDLANFRIQHPQVTLLQYVDDLLLAGATKQDCLEGTKALLLELSDLGYRASAKKAQICRREVTYLGYSLRDGQRWLTEARKKTVVQIPAPTTAKQVREFLGTAGFCRLWIPGFATLAAPLYPLTKEKGEFSWAPEHQKAFDAIKKALLSAPALALPDVTKPFTLYVDERKGVARGVLTQTLGPWRRPVAYLSKKLDPVASGWPVCLKAIAAVAILVKDADKLTLGQNITVIAPHALENIVRQPPDRWMTNARMTHYQSLLLTERVTFAPPAALNPATLLPEETDEPVTHDCHQLLIEETGVRKDLTDIPLTGEVLTWFTDGSSYVVEGKRMAGAAVVDGTRTIWASSLPEGTSAQKAELMALTQALRLAEGKSINIYTDSRYAFATAHVHGAIYKQRGLLTSAGREIKNKEEILSLLEALHLPKRLAIIHCPGHQKAKDPISRGNQMADRVAKQAAQGVNLLAGKRTADGSEFEKRTADGSEFESPKKKAKVE

SEQ ID NO: 6836 - protein, 2085 aa, synthetic construct
MPAAKRVKLDGGDKKYSIGLDIGTNSVGWAVITDEYKVPSKKFKVLGNTDRHSIKKNLIGALLFDSGETAEATRLKRTARRRYTRRKNRICYLQEIFSNEMAKVDDSFFHRLEESFLVEEDKKHERHPIFGNIVDEVAYHEKYPTIYHLRKKLVDSTDKADLRLIYLALAHMIKFRGHFLIEGDLNPDNSDVDKLFIQLVQTYNQLFEENPINASGVDAKAILSARLSKSRRLENLIAQLPGEKKNGLFGNLIALSLGLTPNFKSNFDLAEDAKLQLSKDTYDDDLDNLLAQIGDQYADLFLAAKNLSDAILLSDILRVNTEITKAPLSASMIKRYDEHHQDLTLLKALVRQQLPEKYKEIFFDQSKNGYAGYIDGGASQEEFYKFIKPILEKMDGTEELLVKLNREDLLRKQRTFDNGSIPHQIHLGELHAILRRQEDFYPFLKDNREKIEKILTFRIPYYVGPLARGNSRFAWMTRKSEETITPWNFEEVVDKGASAQSFIERMTNFDKNLPNEKVLPKHSLLYEYFTVYNELTKVKYVTEGMRKPAFLSGEQKKAIVDLLFKTNRKVTVKQLKEDYFKKIECFDSVEISGVEDRFNASLGTYHDLLKIIKDKDFLDNEENEDILEDIVLTLTLFEDREMIEERLKTYAHLFDDKVMKQLKRRRYTGWGRLSRKLINGIRDKQSGKTILDFLKSDGFANRNFMQLIHDDSLTFKEDIQKAQVSGQGDSLHEHIANLAGSPAIKKGILQTVKVVDELVKVMGRHKPENIVIEMARENQTTQKGQKNSRERMKRIEEGIKELGSQILKEHPVENTQLQNEKLYLYYLQNGRDMYVDQELDINRLSDYDVDHIVPQSFLKDDSIDNKVLTRSDKARGKSDNVPSEEVVKKMKNYWRQLLNAKLITQRKFDNLTKAERGGLSELDKAGFIKRQLVETRQITKHVAQILDSRMNTKYDENDKLIREVKVITLKSKLVSDFRKDFQFYKVREINNYHHAHDAYLNAVVGTALIKKYPKLESEFVYGDYKVYDVRKMIAKSEQEIGKATAKYFFYSNIMNFFKTEITLANGEIRKRPLIETNGETGEIVWDKGRDFATVRKVLSMPQVNIVKKTEVQTGGFSKESILPKRNSDKLIARKKDWDPKKYGGFDSPTVAYSVLVVAKVEKGKSKKLKSVKELLGITIMERSSFEKNPIDFLEAKGYKEVKKDLIIKLPKYSLFELENGRKRMLASAGELQKGNELALPSKYVNFLYLASHYEKLKGSPEDNEQKQLFVEQHKHYLDEIIEQISEFSKRVILADANLDKVLSAYNKHRDKPIREQAENIIHLFTLTNLGAPAAFKYFDTTIDRKRYTSTKEVLDATLIHQSITGLYETRIDLSQLGGDGGGGGGGSGSSGGVPWLMKKPLQLTVLVPLHEYQERLLQQTALPKEQKELLQKLFLKYDALWQHWENQVGHRRIKPHNIATGTLAPRPQKQYPINPKAKPSIQIVIDDLLKQGVLIQQNSTMNTPVYPVPKPDGKWRMVLDYREVNKTIPLIAAQNQHSAGILSSIYRGKYKTTLDLTNGFWAHPITPESYWLTAFTWQGKQYCWTRLPQGFLNSPALFTADVVDLLKEIPNVQAYVDDIYISHDDPQEHLEQLEKIFSILLNAGYVVSLKKSEIAQREVEFLGFNITKEGRGLTDTFKQKLLNITPPKDLKQLQSILGLLNFARNFIPNYSELVKPLYTIVANANGKFISWTEDNSNQLQHIISVLNQADNLEERNPETRLIIKVNSSPSAGYIRYYNEGSKRPIMYVNYIFSKAEAKFTQTEKLLTTMHKGLIKAMDLAMGQEILVYSPIVSMTKIQRTPLPERKALPVRWITWMTYLEDPRIQFHYDKSLPELQQIPNVTEDVIAKTKHPSEFAMVFYTDGSAIKHPDVNKSHSAGMGIAQVQFIPEYKIVHQWSIPLGDHTAQLAEIAAVEFACKKALKISGPVLIVTDSFYVAESANKELPYWKSNGFLNNKKKPLRHVSKWKSIAECLQLKPDIIIMHEKGHQQPMTTLHTEGNNLADKLATQGSYVVHAGKRTADGSEFEKRTADGSEFESPKKKAKVE

SEQ ID NO: 6837 - protein, 2085 aa, synthetic construct
MPAAKRVKLDGGDKKYSIGLDIGTNSVGWAVITDEYKVPSKKFKVLGNTDRHSIKKNLIGALLFDSGETAEATRLKRTARRRYTRRKNRICYLQEIFSNEMAKVDDSFFHRLEESFLVEEDKKHERHPIFGNIVDEVAYHEKYPTIYHLRKKLVDSTDKADLRLIYLALAHMIKFRGHFLIEGDLNPDNSDVDKLFIQLVQTYNQLFEENPINASGVDAKAILSARLSKSRRLENLIAQLPGEKKNGLFGNLIALSLGLTPNFKSNFDLAEDAKLQLSKDTYDDDLDNLLAQIGDQYADLFLAAKNLSDAILLSDILRVNTEITKAPLSASMIKRYDEHHQDLTLLKALVRQQLPEKYKEIFFDQSKNGYAGYIDGGASQEEFYKFIKPILEKMDGTEELLVKLNREDLLRKQRTFDNGSIPHQIHLGELHAILRRQEDFYPFLKDNREKIEKILTFRIPYYVGPLARGNSRFAWMTRKSEETITPWNFEEVVDKGASAQSFIERMTNFDKNLPNEKVLPKHSLLYEYFTVYNELTKVKYVTEGMRKPAFLSGEQKKAIVDLLFKTNRKVTVKQLKEDYFKKIECFDSVEISGVEDRFNASLGTYHDLLKIIKDKDFLDNEENEDILEDIVLTLTLFEDREMIEERLKTYAHLFDDKVMKQLKRRRYTGWGRLSRKLINGIRDKQSGKTILDFLKSDGFANRNFMQLIHDDSLTFKEDIQKAQVSGQGDSLHEHIANLAGSPAIKKGILQTVKVVDELVKVMGRHKPENIVIEMARENQTTQKGQKNSRERMKRIEEGIKELGSQILKEHPVENTQLQNEKLYLYYLQNGRDMYVDQELDINRLSDYDVDHIVPQSFLKDDSIDNKVLTRSDKARGKSDNVPSEEVVKKMKNYWRQLLNAKLITQRKFDNLTKAERGGLSELDKAGFIKRQLVETRQITKHVAQILDSRMNTKYDENDKLIREVKVITLKSKLVSDFRKDFQFYKVREINNYHHAHDAYLNAVVGTALIKKYPKLESEFVYGDYKVYDVRKMIAKSEQEIGKATAKYFFYSNIMNFFKTEITLANGEIRKRPLIETNGETGEIVWDKGRDFATVRKVLSMPQVNIVKKTEVQTGGFSKESILPKRNSDKLIARKKDWDPKKYGGFDSPTVAYSVLVVAKVEKGKSKKLKSVKELLGITIMERSSFEKNPIDFLEAKGYKEVKKDLIIKLPKYSLFELENGRKRMLASAGELQKGNELALPSKYVNFLYLASHYEKLKGSPEDNEQKQLFVEQHKHYLDEIIEQISEFSKRVILADANLDKVLSAYNKHRDKPIREQAENIIHLFTLTNLGAPAAFKYFDTTIDRKRYTSTKEVLDATLIHQSITGLYETRIDLSQLGGDGGGGGGGSGSSGGVPWLMKKPLQLTVLVPLHEYQERLLQQTALPKEQKELLQKLFLKYDALWQHWENQVGHRRIKPHNIATGTLAPRPQKQYPINPKAKPSIQIVIDDLLKQGVLIQQNSTMNTPVYPVPKPDGKWRMVLDYREVNKTIPLIAAQNQHSAGILSSIYRGKYKTTLDLTNGFWAHPITPESYWLTAFTWQGKQYCWTRLPQGFLNSPALFNADVVDLLKEIPNVQAYVDDIYISHDDPQEHLEQLEKIFSILLNAGYVVSLKKSEIAQREVEFLGFNITKEGRGLTDTFKQKLLNITPPKDLKQLQSILGLLNFARNFIPNYSELVKPLYTIVAPANGKFISWTEDNSNQLQHIISVLNQADNLEERNPETRLIIKVNSSPSAGYIRYYNEGSKRPIMYVNYIFSKAEAKFTQTEKLLTTMHKGLIKAMDLAMGQEILVYSPIVSMTKIQRTPLPERKALPVRWITWMTYLEDPRIQFHYDKSLPELQQIPNVTEDVIAKTKHPSEFAMVFYTDGSAIKHPDVNKSHSAGMGIAQVQFIPEYKIVHQWSIPLGDHTAQLAEIAAVEFACKKALKISGPVLIVTDSFYVAESANKELPYWKSNGFLNNKKKPLRHVSKWKSIAECLQLKPDIIIMHEKGHQQPMTTLHTEGNNLADKLATQGSYVVHAGKRTADGSEFEKRTADGSEFESPKKKAKVE

SEQ ID NO: 6838 - protein, 2174 aa, synthetic construct
MPAAKRVKLDGGDKKYSIGLDIGTNSVGWAVITDEYKVPSKKFKVLGNTDRHSIKKNLIGALLFDSGETAEATRLKRTARRRYTRRKNRICYLQEIFSNEMAKVDDSFFHRLEESFLVEEDKKHERHPIFGNIVDEVAYHEKYPTIYHLRKKLVDSTDKADLRLIYLALAHMIKFRGHFLIEGDLNPDNSDVDKLFIQLVQTYNQLFEENPINASGVDAKAILSARLSKSRRLENLIAQLPGEKKNGLFGNLIALSLGLTPNFKSNFDLAEDAKLQLSKDTYDDDLDNLLAQIGDQYADLFLAAKNLSDAILLSDILRVNTEITKAPLSASMIKRYDEHHQDLTLLKALVRQQLPEKYKEIFFDQSKNGYAGYIDGGASQEEFYKFIKPILEKMDGTEELLVKLNREDLLRKQRTFDNGSIPHQIHLGELHAILRRQEDFYPFLKDNREKIEKILTFRIPYYVGPLARGNSRFAWMTRKSEETITPWNFEEVVDKGASAQSFIERMTNFDKNLPNEKVLPKHSLLYEYFTVYNELTKVKYVTEGMRKPAFLSGEQKKAIVDLLFKTNRKVTVKQLKEDYFKKIECFDSVEISGVEDRFNASLGTYHDLLKIIKDKDFLDNEENEDILEDIVLTLTLFEDREMIEERLKTYAHLFDDKVMKQLKRRRYTGWGRLSRKLINGIRDKQSGKTILDFLKSDGFANRNFMQLIHDDSLTFKEDIQKAQVSGQGDSLHEHIANLAGSPAIKKGILQTVKVVDELVKVMGRHKPENIVIEMARENQTTQKGQKNSRERMKRIEEGIKELGSQILKEHPVENTQLQNEKLYLYYLQNGRDMYVDQELDINRLSDYDVDHIVPQSFLKDDSIDNKVLTRSDKARGKSDNVPSEEVVKKMKNYWRQLLNAKLITQRKFDNLTKAERGGLSELDKAGFIKRQLVETRQITKHVAQILDSRMNTKYDENDKLIREVKVITLKSKLVSDFRKDFQFYKVREINNYHHAHDAYLNAVVGTALIKKYPKLESEFVYGDYKVYDVRKMIAKSEQEIGKATAKYFFYSNIMNFFKTEITLANGEIRKRPLIETNGETGEIVWDKGRDFATVRKVLSMPQVNIVKKTEVQTGGFSKESILPKRNSDKLIARKKDWDPKKYGGFDSPTVAYSVLVVAKVEKGKSKKLKSVKELLGITIMERSSFEKNPIDFLEAKGYKEVKKDLIIKLPKYSLFELENGRKRMLASAGELQKGNELALPSKYVNFLYLASHYEKLKGSPEDNEQKQLFVEQHKHYLDEIIEQISEFSKRVILADANLDKVLSAYNKHRDKPIREQAENIIHLFTLTNLGAPAAFKYFDTTIDRKRYTSTKEVLDATLIHQSITGLYETRIDLSQLGGDGGGGGGGSGSSGGMDPLQLLQPLEAEIKGTKLKAHWNSGATITCVPQAFLEEEVPIKNIWIKTIHGEKEQPVYYLTFKIQGRKVEAEVISSPYDYILVSPSDIPWLMKKPLQLTTLVPLQEYEERLLKQTMLTGSYKEKLQSLFLKYDALWQHWENQVGHRRIKPHHIATGTVNPRPQKQYPINPKAKASIQTVINDLLKQGVLIQQNSIMNTPVYPVPKPDGKWRMVLDYREVNKTIPLIAAQNQHSAGILSSIFRGKYKTTLDLSNGFWAHSITPESYWLTAFTWLGQQYCWTRLPQGFLNSPALFNADVVDLLKEVPNVQVYVDDIYISHDDPREHLEQLEKVFSLLLNAGYVVSLKKSEIAQHEVEFLGFNITKEGRGLTETFKQKLLNITPPRDLKQLQSILGLLNFARNFIPNFSELVKPLYNIIATAPGKYITWTTDNSQQLQNIISMLNSAENLEERNPEVRLIMKVNTSPSAGYIRFYNEFAKRPIMYLNYVYTKAEVKFTNTEKLLTTIHKGLIKALDLGMGQEILVYSPIVSMTKIQKTPLPERKALPIRWITWMSYLEDPRIQFHYDKTLPELQQVPTVTDDIIAKIKHPSEFSMVFYTDGSAIKHPNVNKSHNAGMGIAQVQFKPEFTVINTWSIPLGDHTAQLAEVAAVEFACKKALKIDGPVLIVTDSFYVAESVNKELPYWQSNGFFNNKKKPLKHVSKWKSIADCIQLKPDIIIIHEKGHQPTASTFHTEGNNLADKLATQGSYVVNAGKRTADGSEFEKRTADGSEFESPKKKAKVE

SEQ ID NO: 6839 - protein, 2092 aa, synthetic construct
MPAAKRVKLDGGDKKYSIGLDIGTNSVGWAVITDEYKVPSKKFKVLGNTDRHSIKKNLIGALLFDSGETAEATRLKRTARRRYTRRKNRICYLQEIFSNEMAKVDDSFFHRLEESFLVEEDKKHERHPIFGNIVDEVAYHEKYPTIYHLRKKLVDSTDKADLRLIYLALAHMIKFRGHFLIEGDLNPDNSDVDKLFIQLVQTYNQLFEENPINASGVDAKAILSARLSKSRRLENLIAQLPGEKKNGLFGNLIALSLGLTPNFKSNFDLAEDAKLQLSKDTYDDDLDNLLAQIGDQYADLFLAAKNLSDAILLSDILRVNTEITKAPLSASMIKRYDEHHQDLTLLKALVRQQLPEKYKEIFFDQSKNGYAGYIDGGASQEEFYKFIKPILEKMDGTEELLVKLNREDLLRKQRTFDNGSIPHQIHLGELHAILRRQEDFYPFLKDNREKIEKILTFRIPYYVGPLARGNSRFAWMTRKSEETITPWNFEEVVDKGASAQSFIERMTNFDKNLPNEKVLPKHSLLYEYFTVYNELTKVKYVTEGMRKPAFLSGEQKKAIVDLLFKTNRKVTVKQLKEDYFKKIECFDSVEISGVEDRFNASLGTYHDLLKIIKDKDFLDNEENEDILEDIVLTLTLFEDREMIEERLKTYAHLFDDKVMKQLKRRRYTGWGRLSRKLINGIRDKQSGKTILDFLKSDGFANRNFMQLIHDDSLTFKEDIQKAQVSGQGDSLHEHIANLAGSPAIKKGILQTVKVVDELVKVMGRHKPENIVIEMARENQTTQKGQKNSRERMKRIEEGIKELGSQILKEHPVENTQLQNEKLYLYYLQNGRDMYVDQELDINRLSDYDVDHIVPQSFLKDDSIDNKVLTRSDKARGKSDNVPSEEVVKKMKNYWRQLLNAKLITQRKFDNLTKAERGGLSELDKAGFIKRQLVETRQITKHVAQILDSRMNTKYDENDKLIREVKVITLKSKLVSDFRKDFQFYKVREINNYHHAHDAYLNAVVGTALIKKYPKLESEFVYGDYKVYDVRKMIAKSEQEIGKATAKYFFYSNIMNFFKTEITLANGEIRKRPLIETNGETGEIVWDKGRDFATVRKVLSMPQVNIVKKTEVQTGGFSKESILPKRNSDKLIARKKDWDPKKYGGFDSPTVAYSVLVVAKVEKGKSKKLKSVKELLGITIMERSSFEKNPIDFLEAKGYKEVKKDLIIKLPKYSLFELENGRKRMLASAGELQKGNELALPSKYVNFLYLASHYEKLKGSPEDNEQKQLFVEQHKHYLDEIIEQISEFSKRVILADANLDKVLSAYNKHRDKPIREQAENIIHLFTLTNLGAPAAFKYFDTTIDRKRYTSTKEVLDATLIHQSITGLYETRIDLSQLGGDGGGGGGGSGSSGGVLNLEEEYRLHEKPVPSSIDPSWLQLFPTVWAERAGMGLANQVPPVVVELRSGASPVAVRQYPMSKEAREGIRPHIQRFLDLGVLVPCQSPWNTPLLPVKKPGTNDYRPVQDLREINKRVQDIHPTVPNPYNLLSSLPPSHTWYSVLDLKDAFFCLKLHPNSQPLFAFEWRDPEKGNTGQLTWTRLPQGFKNSPTLFNEALHRDLAPFRALNPQVVLLQYVDDLLVAAPTYRDCKEGTQKLLQELSKLGYRVSAKKAQLCQKEVTYLGYLLKEGKRWLTPARKATVMKIPPPTTPRQVREFLGTAGFCRLWIPGFASLAAPLYPLTKPSIPFIWTEEHQKAFDRIKEALLSAPALALPDLTKPFTLYVDERAGVARGVLTQTLGPWRRPVAYLSKKLDPVASGWPTCLKAVAAVALLLKDADKLTLGQNVTVIASHSLESIVRQPPDRWMTNARMTHYQSLLLNERVSFAPPAVLNPATLLPVESEATPVHRCSEILAEETGTRRDLKDQPLPGVPAWYTDGSSFIAEGKRRAGAAIVDGKRTVWASSLPEGTSAQKAELVALTQALRLAEGKDINIYTDSRYAFATAHIHGAIYKQRGWLTSAGKDIKNKEEILALLEAIHLPKRVAIIHCPGHQKGNDPVATGNRRADEAAKQAALSTRVLAETTKPAGKRTADGSEFEKRTADGSEFESPKKKAKVE

SEQ ID NO: 6840 - protein, 2096 aa, synthetic construct
MPAAKRVKLDGGDKKYSIGLDIGTNSVGWAVITDEYKVPSKKFKVLGNTDRHSIKKNLIGALLFDSGETAEATRLKRTARRRYTRRKNRICYLQEIFSNEMAKVDDSFFHRLEESFLVEEDKKHERHPIFGNIVDEVAYHEKYPTIYHLRKKLVDSTDKADLRLIYLALAHMIKFRGHFLIEGDLNPDNSDVDKLFIQLVQTYNQLFEENPINASGVDAKAILSARLSKSRRLENLIAQLPGEKKNGLFGNLIALSLGLTPNFKSNFDLAEDAKLQLSKDTYDDDLDNLLAQIGDQYADLFLAAKNLSDAILLSDILRVNTEITKAPLSASMIKRYDEHHQDLTLLKALVRQQLPEKYKEIFFDQSKNGYAGYIDGGASQEEFYKFIKPILEKMDGTEELLVKLNREDLLRKQRTFDNGSIPHQIHLGELHAILRRQEDFYPFLKDNREKIEKILTFRIPYYVGPLARGNSRFAWMTRKSEETITPWNFEEVVDKGASAQSFIERMTNFDKNLPNEKVLPKHSLLYEYFTVYNELTKVKYVTEGMRKPAFLSGEQKKAIVDLLFKTNRKVTVKQLKEDYFKKIECFDSVEISGVEDRFNASLGTYHDLLKIIKDKDFLDNEENEDILEDIVLTLTLFEDREMIEERLKTYAHLFDDKVMKQLKRRRYTGWGRLSRKLINGIRDKQSGKTILDFLKSDGFANRNFMQLIHDDSLTFKEDIQKAQVSGQGDSLHEHIANLAGSPAIKKGILQTVKVVDELVKVMGRHKPENIVIEMARENQTTQKGQKNSRERMKRIEEGIKELGSQILKEHPVENTQLQNEKLYLYYLQNGRDMYVDQELDINRLSDYDVDHIVPQSFLKDDSIDNKVLTRSDKARGKSDNVPSEEVVKKMKNYWRQLLNAKLITQRKFDNLTKAERGGLSELDKAGFIKRQLVETRQITKHVAQILDSRMNTKYDENDKLIREVKVITLKSKLVSDFRKDFQFYKVREINNYHHAHDAYLNAVVGTALIKKYPKLESEFVYGDYKVYDVRKMIAKSEQEIGKATAKYFFYSNIMNFFKTEITLANGEIRKRPLIETNGETGEIVWDKGRDFATVRKVLSMPQVNIVKKTEVQTGGFSKESILPKRNSDKLIARKKDWDPKKYGGFDSPTVAYSVLVVAKVEKGKSKKLKSVKELLGITIMERSSFEKNPIDFLEAKGYKEVKKDLIIKLPKYSLFELENGRKRMLASAGELQKGNELALPSKYVNFLYLASHYEKLKGSPEDNEQKQLFVEQHKHYLDEIIEQISEFSKRVILADANLDKVLSAYNKHRDKPIREQAENIIHLFTLTNLGAPAAFKYFDTTIDRKRYTSTKEVLDATLIHQSITGLYETRIDLSQLGGDGGGGGGSSGGSGGTAPLEEEYRLFLEAPIQNVTLLEQWKREIPKVWAEINPPGLASTQAPIHVQLLSTALPVRVRQYPITLEAKRSLRETIRKFRAAGILRPVHSPWNTPLLPVRKSGTSEYRMVQDLREVNKRVETIHPTVPNPYTLLSLLPPDRIWYSVLDLKDAFFCIPLAPESQLIFAFEWADAEEGESGQLTWTRLPQGFKNSPTLFDEALNRDLQGFRLDHPSVSLLQYVDDLLIAADTQAACLSATRDLLMTLAELGYRVSGKKAQLCQEEVTYLGFKIHKGSRSLSNSRTQAILQIPVPKTKRQVREFLGTIGYCRLWIPGFAELAQPLYAATRGGNDPLVWGEKEEEAFQSLKLALTQPPALALPSLDKPFQLFVEETSGAAKGVLTQALGPWKRPVAYLSKRLDPVAAGWPRCLRAIAAAALLTREASKLTFGQDIEITSSHNLESLLRSPPDKWLTNARITQYQVLLLDPPRVRFKQTAALNPATLLPETDDTLPIHHCLDTLDSLTSTRPDLTDQPLAQAEATLFTDGSSYIRDGKRYAGAAVVTLDSVIWAEPLPIGTSAQKAELIALTKALEWSKDKSVNIYTDSRYAFATLHVHGMIYRERGLLTAGGKAIKNAPEILALLTAVWLPKRVAVMHCKGHQKDDAPTSTGNRRADEVAREVAIRPLSTQATISAGKRTADGSEFEKRTADGSEFESPKKKAKVE

SEQ ID NO: 6841 - protein, 2096 aa, synthetic construct
MPAAKRVKLDGGDKKYSIGLDIGTNSVGWAVITDEYKVPSKKFKVLGNTDRHSIKKNLIGALLFDSGETAEATRLKRTARRRYTRRKNRICYLQEIFSNEMAKVDDSFFHRLEESFLVEEDKKHERHPIFGNIVDEVAYHEKYPTIYHLRKKLVDSTDKADLRLIYLALAHMIKFRGHFLIEGDLNPDNSDVDKLFIQLVQTYNQLFEENPINASGVDAKAILSARLSKSRRLENLIAQLPGEKKNGLFGNLIALSLGLTPNFKSNFDLAEDAKLQLSKDTYDDDLDNLLAQIGDQYADLFLAAKNLSDAILLSDILRVNTEITKAPLSASMIKRYDEHHQDLTLLKALVRQQLPEKYKEIFFDQSKNGYAGYIDGGASQEEFYKFIKPILEKMDGTEELLVKLNREDLLRKQRTFDNGSIPHQIHLGELHAILRRQEDFYPFLKDNREKIEKILTFRIPYYVGPLARGNSRFAWMTRKSEETITPWNFEEVVDKGASAQSFIERMTNFDKNLPNEKVLPKHSLLYEYFTVYNELTKVKYVTEGMRKPAFLSGEQKKAIVDLLFKTNRKVTVKQLKEDYFKKIECFDSVEISGVEDRFNASLGTYHDLLKIIKDKDFLDNEENEDILEDIVLTLTLFEDREMIEERLKTYAHLFDDKVMKQLKRRRYTGWGRLSRKLINGIRDKQSGKTILDFLKSDGFANRNFMQLIHDDSLTFKEDIQKAQVSGQGDSLHEHIANLAGSPAIKKGILQTVKVVDELVKVMGRHKPENIVIEMARENQTTQKGQKNSRERMKRIEEGIKELGSQILKEHPVENTQLQNEKLYLYYLQNGRDMYVDQELDINRLSDYDVDHIVPQSFLKDDSIDNKVLTRSDKARGKSDNVPSEEVVKKMKNYWRQLLNAKLITQRKFDNLTKAERGGLSELDKAGFIKRQLVETRQITKHVAQILDSRMNTKYDENDKLIREVKVITLKSKLVSDFRKDFQFYKVREINNYHHAHDAYLNAVVGTALIKKYPKLESEFVYGDYKVYDVRKMIAKSEQEIGKATAKYFFYSNIMNFFKTEITLANGEIRKRPLIETNGETGEIVWDKGRDFATVRKVLSMPQVNIVKKTEVQTGGFSKESILPKRNSDKLIARKKDWDPKKYGGFDSPTVAYSVLVVAKVEKGKSKKLKSVKELLGITIMERSSFEKNPIDFLEAKGYKEVKKDLIIKLPKYSLFELENGRKRMLASAGELQKGNELALPSKYVNFLYLASHYEKLKGSPEDNEQKQLFVEQHKHYLDEIIEQISEFSKRVILADANLDKVLSAYNKHRDKPIREQAENIIHLFTLTNLGAPAAFKYFDTTIDRKRYTSTKEVLDATLIHQSITGLYETRIDLSQLGGDGGGGGGSSGGSGGTAPLEEEYRLFLEAPIQNVTLLEQWKREIPKVWAEINPPGLASTQAPIHVQLLSTALPVRVRQYPITLEAKRSLRETIRKFRAAGILRPVHSPWNTPLLPVRKSGTSEYRMVQDLREVNKRVETIHPTVPNPYTLLSLLPPDRIWYSVLDLKDAFFCIPLAPESQLIFAFEWADAEEGESGQLTWTRLPQGFKNSPTLFNEALNRDLQGFRLDHPSVSLLQYVDDLLIAADTQAACLSATRDLLMTLAELGYRVSGKKAQLCQEEVTYLGFKIHKGSRSLSNSRTQAILQIPVPKTKRQVREFLGTIGYCRLWIPGFAELAQPLYAATRPGNDPLVWGEKEEEAFQSLKLALTQPPALALPSLDKPFQLFVEETSGAAKGVLTQALGPWKRPVAYLSKRLDPVAAGWPRCLRAIAAAALLTREASKLTFGQDIEITSSHNLESLLRSPPDKWLTNARITQYQVLLLDPPRVRFKQTAALNPATLLPETDDTLPIHHCLDTLDSLTSTRPDLTDQPLAQAEATLFTDGSSYIRDGKRYAGAAVVTLDSVIWAEPLPIGTSAQKAELIALTKALEWSKDKSVNIYTDSRYAFATLHVHGMIYRERGWLTAGGKAIKNAPEILALLTAVWLPKRVAVMHCKGHQKDDAPTSTGNRRADEVAREVAIRPLSTQATISAGKRTADGSEFEKRTADGSEFESPKKKAKVE

SEQ ID NO: 6842 - protein, 2100 aa, synthetic construct
MPAAKRVKLDGGDKKYSIGLDIGTNSVGWAVITDEYKVPSKKFKVLGNTDRHSIKKNLIGALLFDSGETAEATRLKRTARRRYTRRKNRICYLQEIFSNEMAKVDDSFFHRLEESFLVEEDKKHERHPIFGNIVDEVAYHEKYPTIYHLRKKLVDSTDKADLRLIYLALAHMIKFRGHFLIEGDLNPDNSDVDKLFIQLVQTYNQLFEENPINASGVDAKAILSARLSKSRRLENLIAQLPGEKKNGLFGNLIALSLGLTPNFKSNFDLAEDAKLQLSKDTYDDDLDNLLAQIGDQYADLFLAAKNLSDAILLSDILRVNTEITKAPLSASMIKRYDEHHQDLTLLKALVRQQLPEKYKEIFFDQSKNGYAGYIDGGASQEEFYKFIKPILEKMDGTEELLVKLNREDLLRKQRTFDNGSIPHQIHLGELHAILRRQEDFYPFLKDNREKIEKILTFRIPYYVGPLARGNSRFAWMTRKSEETITPWNFEEVVDKGASAQSFIERMTNFDKNLPNEKVLPKHSLLYEYFTVYNELTKVKYVTEGMRKPAFLSGEQKKAIVDLLFKTNRKVTVKQLKEDYFKKIECFDSVEISGVEDRFNASLGTYHDLLKIIKDKDFLDNEENEDILEDIVLTLTLFEDREMIEERLKTYAHLFDDKVMKQLKRRRYTGWGRLSRKLINGIRDKQSGKTILDFLKSDGFANRNFMQLIHDDSLTFKEDIQKAQVSGQGDSLHEHIANLAGSPAIKKGILQTVKVVDELVKVMGRHKPENIVIEMARENQTTQKGQKNSRERMKRIEEGIKELGSQILKEHPVENTQLQNEKLYLYYLQNGRDMYVDQELDINRLSDYDVDHIVPQSFLKDDSIDNKVLTRSDKARGKSDNVPSEEVVKKMKNYWRQLLNAKLITQRKFDNLTKAERGGLSELDKAGFIKRQLVETRQITKHVAQILDSRMNTKYDENDKLIREVKVITLKSKLVSDFRKDFQFYKVREINNYHHAHDAYLNAVVGTALIKKYPKLESEFVYGDYKVYDVRKMIAKSEQEIGKATAKYFFYSNIMNFFKTEITLANGEIRKRPLIETNGETGEIVWDKGRDFATVRKVLSMPQVNIVKKTEVQTGGFSKESILPKRNSDKLIARKKDWDPKKYGGFDSPTVAYSVLVVAKVEKGKSKKLKSVKELLGITIMERSSFEKNPIDFLEAKGYKEVKKDLIIKLPKYSLFELENGRKRMLASAGELQKGNELALPSKYVNFLYLASHYEKLKGSPEDNEQKQLFVEQHKHYLDEIIEQISEFSKRVILADANLDKVLSAYNKHRDKPIREQAENIIHLFTLTNLGAPAAFKYFDTTIDRKRYTSTKEVLDATLIHQSITGLYETRIDLSQLGGDGGGGGGSSGGSGGTVSLQDEHRLFDIPVTTSLPDVWLQDFPQAWAETGGLGRAKCQAPIIIDLKPTAVPVSIKQYPMSLEAHMGIRQHIIKFLELGVLRPCRSPWNTPLLPVKKPGTQDYRPVQDLREINKRTVDIHPTVPNPYNLLSTLKPDYSWYTVLDLKDAFFCLPLAPQSQELFAFEWKDPERGISGQLTWTRLPQGFKNSPTLFNEALHRDLTDFRTQHPEVTLLQYVDDLLLAAPTKKACTQGTRHLLQELGEKGYRASAKKAQICQTKVTYLGYILSEGKRWLTPGRIETVARIPPPRNPREVREFLGTAGFCRLWIPGFAELAAPLYALTKPSTPFTWQTEHQLAFEALKKALLSAPALGLPDTSKPFTLFLDERQGIAKGVLTQKLGPWKRPVAYLSKKLDPVAAGWPPCLRIMAATAMLVKDSAKLTLGQPLTVITPHTLEAIVRQPPDRWITNARLTHYQALLLDTDRVQFGPPVTLNPATLLPVPENQPSPHDCRQVLAETHGTREDLKDQELPDADHTWYTDGSSYLDSGTRRAGAAVVDGHNTIWAQSLPPGTSAQKAELIALTKALELSKGKKANIYTDSRYAFATAHTHGSIYERRGWLTSEGKEIKNKAEIIALLKALFLPQEVAIIHCPGHQKGQDPVAVGNRQADRVARQAAMAEVLTLATEPDNTSHITAGKRTADGSEFEKRTADGSEFESPKKKAKVE

SEQ ID NO: 6843 - protein, 2085 aa, synthetic construct
MPAAKRVKLDGGDKKYSIGLDIGTNSVGWAVITDEYKVPSKKFKVLGNTDRHSIKKNLIGALLFDSGETAEATRLKRTARRRYTRRKNRICYLQEIFSNEMAKVDDSFFHRLEESFLVEEDKKHERHPIFGNIVDEVAYHEKYPTIYHLRKKLVDSTDKADLRLIYLALAHMIKFRGHFLIEGDLNPDNSDVDKLFIQLVQTYNQLFEENPINASGVDAKAILSARLSKSRRLENLIAQLPGEKKNGLFGNLIALSLGLTPNFKSNFDLAEDAKLQLSKDTYDDDLDNLLAQIGDQYADLFLAAKNLSDAILLSDILRVNTEITKAPLSASMIKRYDEHHQDLTLLKALVRQQLPEKYKEIFFDQSKNGYAGYIDGGASQEEFYKFIKPILEKMDGTEELLVKLNREDLLRKQRTFDNGSIPHQIHLGELHAILRRQEDFYPFLKDNREKIEKILTFRIPYYVGPLARGNSRFAWMTRKSEETITPWNFEEVVDKGASAQSFIERMTNFDKNLPNEKVLPKHSLLYEYFTVYNELTKVKYVTEGMRKPAFLSGEQKKAIVDLLFKTNRKVTVKQLKEDYFKKIECFDSVEISGVEDRFNASLGTYHDLLKIIKDKDFLDNEENEDILEDIVLTLTLFEDREMIEERLKTYAHLFDDKVMKQLKRRRYTGWGRLSRKLINGIRDKQSGKTILDFLKSDGFANRNFMQLIHDDSLTFKEDIQKAQVSGQGDSLHEHIANLAGSPAIKKGILQTVKVVDELVKVMGRHKPENIVIEMARENQTTQKGQKNSRERMKRIEEGIKELGSQILKEHPVENTQLQNEKLYLYYLQNGRDMYVDQELDINRLSDYDVDHIVPQSFLKDDSIDNKVLTRSDKARGKSDNVPSEEVVKKMKNYWRQLLNAKLITQRKFDNLTKAERGGLSELDKAGFIKRQLVETRQITKHVAQILDSRMNTKYDENDKLIREVKVITLKSKLVSDFRKDFQFYKVREINNYHHAHDAYLNAVVGTALIKKYPKLESEFVYGDYKVYDVRKMIAKSEQEIGKATAKYFFYSNIMNFFKTEITLANGEIRKRPLIETNGETGEIVWDKGRDFATVRKVLSMPQVNIVKKTEVQTGGFSKESILPKRNSDKLIARKKDWDPKKYGGFDSPTVAYSVLVVAKVEKGKSKKLKSVKELLGITIMERSSFEKNPIDFLEAKGYKEVKKDLIIKLPKYSLFELENGRKRMLASAGELQKGNELALPSKYVNFLYLASHYEKLKGSPEDNEQKQLFVEQHKHYLDEIIEQISEFSKRVILADANLDKVLSAYNKHRDKPIREQAENIIHLFTLTNLGAPAAFKYFDTTIDRKRYTSTKEVLDATLIHQSITGLYETRIDLSQLGGDGGGGGGSSGGSGGVPWILKKPLELTIKLDLEEQQGTLLNNSILSKKGKEELKQLFEKYSALWQSWENQVGHRRIRPHKIATGTVKPTPQKQYHINPKAKPDIQIVINDLLKQGVLIQKESTMNTPVYPVPKPNGRWRMVLDYRAVNKVTPLIAVQNQHSYGILGSLFKGRYKTTIDLSNGFWAHPIVPEDYWITAFTWQGKQYCWTVLPQGFLNSPGLFTGDVVDLLQGIPNVEVYVDDVYISHDSEKEHLEYLDILFNRLKEAGYIISLKKSNIANSIVDFLGFQITNEGRGLTDTFKEKLENITAPTTLKQLQSILGLLNFARNFIPDFTELIAPLYALIPKSTKNYVPWQIEHSTTLETLITKLNGAEYLQGRKGDKTLIMKVNASYTTGYIRYYNEGEKKPISYVSIVFSKTELKFTELEKLLTTVHKGLLKALDLSMGQNIHVYSPIVSMQNIQKTPQTAKKALASRWLSWLSYLEDPRIRFFYDPQMPALKDLPAVDTGKDNKKHPSNFQHIFYTDGSAITSPTKEGHLNAGMGIVYFINKDGNLQKQQEWSISLGNHTAQFAEIAAFEFALKKCLPLGGNILVVTDSNYVAKAYNEELDVWASNGFVNNRKKPLKHISKWKSVADLKRLRPDVVVTHEPGHQKLDSSPHAYGNNLADQLATQASFKVHAGKRTADGSEFEKRTADGSEFESPKKKAKVE

SEQ ID NO: 6844 - protein, 2093 aa, synthetic construct
MPAAKRVKLDGGDKKYSIGLDIGTNSVGWAVITDEYKVPSKKFKVLGNTDRHSIKKNLIGALLFDSGETAEATRLKRTARRRYTRRKNRICYLQEIFSNEMAKVDDSFFHRLEESFLVEEDKKHERHPIFGNIVDEVAYHEKYPTIYHLRKKLVDSTDKADLRLIYLALAHMIKFRGHFLIEGDLNPDNSDVDKLFIQLVQTYNQLFEENPINASGVDAKAILSARLSKSRRLENLIAQLPGEKKNGLFGNLIALSLGLTPNFKSNFDLAEDAKLQLSKDTYDDDLDNLLAQIGDQYADLFLAAKNLSDAILLSDILRVNTEITKAPLSASMIKRYDEHHQDLTLLKALVRQQLPEKYKEIFFDQSKNGYAGYIDGGASQEEFYKFIKPILEKMDGTEELLVKLNREDLLRKQRTFDNGSIPHQIHLGELHAILRRQEDFYPFLKDNREKIEKILTFRIPYYVGPLARGNSRFAWMTRKSEETITPWNFEEVVDKGASAQSFIERMTNFDKNLPNEKVLPKHSLLYEYFTVYNELTKVKYVTEGMRKPAFLSGEQKKAIVDLLFKTNRKVTVKQLKEDYFKKIECFDSVEISGVEDRFNASLGTYHDLLKIIKDKDFLDNEENEDILEDIVLTLTLFEDREMIEERLKTYAHLFDDKVMKQLKRRRYTGWGRLSRKLINGIRDKQSGKTILDFLKSDGFANRNFMQLIHDDSLTFKEDIQKAQVSGQGDSLHEHIANLAGSPAIKKGILQTVKVVDELVKVMGRHKPENIVIEMARENQTTQKGQKNSRERMKRIEEGIKELGSQILKEHPVENTQLQNEKLYLYYLQNGRDMYVDQELDINRLSDYDVDHIVPQSFLKDDSIDNKVLTRSDKARGKSDNVPSEEVVKKMKNYWRQLLNAKLITQRKFDNLTKAERGGLSELDKAGFIKRQLVETRQITKHVAQILDSRMNTKYDENDKLIREVKVITLKSKLVSDFRKDFQFYKVREINNYHHAHDAYLNAVVGTALIKKYPKLESEFVYGDYKVYDVRKMIAKSEQEIGKATAKYFFYSNIMNFFKTEITLANGEIRKRPLIETNGETGEIVWDKGRDFATVRKVLSMPQVNIVKKTEVQTGGFSKESILPKRNSDKLIARKKDWDPKKYGGFDSPTVAYSVLVVAKVEKGKSKKLKSVKELLGITIMERSSFEKNPIDFLEAKGYKEVKKDLIIKLPKYSLFELENGRKRMLASAGELQKGNELALPSKYVNFLYLASHYEKLKGSPEDNEQKQLFVEQHKHYLDEIIEQISEFSKRVILADANLDKVLSAYNKHRDKPIREQAENIIHLFTLTNLGAPAAFKYFDTTIDRKRYTSTKEVLDATLIHQSITGLYETRIDLSQLGGDGGGGGGSSGGSGGTLQLEEEYRLFEPESTQKQEMDIWLKNFPQAWAETGGMGTAHCQAPVLIQLKATATPISIRQYPMPHEAYQGIKPHIRRMLDQGILKPCQSPWNTPLLPVKKPGTEDYRPVQDLREVNKRVEDIHPTVPNPYNLLSTLPPSHPWYTVLDLKDAFFCLRLHSESQLLFAFEWRDPEIGLSGQLTWTRLPQGFKNSPTLFNEALHSDLADFRVRYPALVLLQYVDDLLLAAATRTECLEGTKALLETLGNKGYRASAKKAQICLQEVTYLGYSLKDGQRWLTKARKEAILSIPVPKNSRQVREFLGTAGYCRLWIPGFAELAAPLYPLTRPGTLFQWGTEQQLAFEDIKKALLSSPALGLPDITKPFELFIDENSGFAKGVLVQKLGPWKRPVAYLSKKLDTVASGWPPCLRMVAAIAILVKDAGKLTLGQPLTILTSHPVEALVRQPPNKWLSNARMTHYQAMLLDAERVHFGPTVSLNPATLLPLPSGGNHHDCLQILAETHGTRPDLTDQPLPDADLTWYTDGSSFIRNGEREAGAAVTTESEVIWAAPLPPGTSAQRAELIALTQALKMAEGKKLTVYTDSRYAFATTHVHGEIYRRRGWLTSEGKEIKNKNEILALLEALFLPKRLSIIHCPGHQKGDSPQAKGNRLADDTAKKAATETHSSLTVLPAGKRTADGSEFEKRTADGSEFESPKKKAKVE

SEQ ID NO: 6845 - protein, 2125 aa, synthetic construct
MPAAKRVKLDGGDKKYSIGLDIGTNSVGWAVITDEYKVPSKKFKVLGNTDRHSIKKNLIGALLFDSGETAEATRLKRTARRRYTRRKNRICYLQEIFSNEMAKVDDSFFHRLEESFLVEEDKKHERHPIFGNIVDEVAYHEKYPTIYHLRKKLVDSTDKADLRLIYLALAHMIKFRGHFLIEGDLNPDNSDVDKLFIQLVQTYNQLFEENPINASGVDAKAILSARLSKSRRLENLIAQLPGEKKNGLFGNLIALSLGLTPNFKSNFDLAEDAKLQLSKDTYDDDLDNLLAQIGDQYADLFLAAKNLSDAILLSDILRVNTEITKAPLSASMIKRYDEHHQDLTLLKALVRQQLPEKYKEIFFDQSKNGYAGYIDGGASQEEFYKFIKPILEKMDGTEELLVKLNREDLLRKQRTFDNGSIPHQIHLGELHAILRRQEDFYPFLKDNREKIEKILTFRIPYYVGPLARGNSRFAWMTRKSEETITPWNFEEVVDKGASAQSFIERMTNFDKNLPNEKVLPKHSLLYEYFTVYNELTKVKYVTEGMRKPAFLSGEQKKAIVDLLFKTNRKVTVKQLKEDYFKKIECFDSVEISGVEDRFNASLGTYHDLLKIIKDKDFLDNEENEDILEDIVLTLTLFEDREMIEERLKTYAHLFDDKVMKQLKRRRYTGWGRLSRKLINGIRDKQSGKTILDFLKSDGFANRNFMQLIHDDSLTFKEDIQKAQVSGQGDSLHEHIANLAGSPAIKKGILQTVKVVDELVKVMGRHKPENIVIEMARENQTTQKGQKNSRERMKRIEEGIKELGSQILKEHPVENTQLQNEKLYLYYLQNGRDMYVDQELDINRLSDYDVDHIVPQSFLKDDSIDNKVLTRSDKARGKSDNVPSEEVVKKMKNYWRQLLNAKLITQRKFDNLTKAERGGLSELDKAGFIKRQLVETRQITKHVAQILDSRMNTKYDENDKLIREVKVITLKSKLVSDFRKDFQFYKVREINNYHHAHDAYLNAVVGTALIKKYPKLESEFVYGDYKVYDVRKMIAKSEQEIGKATAKYFFYSNIMNFFKTEITLANGEIRKRPLIETNGETGEIVWDKGRDFATVRKVLSMPQVNIVKKTEVQTGGFSKESILPKRNSDKLIARKKDWDPKKYGGFDSPTVAYSVLVVAKVEKGKSKKLKSVKELLGITIMERSSFEKNPIDFLEAKGYKEVKKDLIIKLPKYSLFELENGRKRMLASAGELQKGNELALPSKYVNFLYLASHYEKLKGSPEDNEQKQLFVEQHKHYLDEIIEQISEFSKRVILADANLDKVLSAYNKHRDKPIREQAENIIHLFTLTNLGAPAAFKYFDTTIDRKRYTSTKEVLDATLIHQSITGLYETRIDLSQLGGDGGGGGGSSGGSGGLLGRDLLTKLKAQIQFSTEGPQVTWEDRPAMCLVLNLEEEYRLHEKPVPPSIDPSWLQLFPMVWAEKAGMGLANQVPPVVVELKSDASPVAVRQYPMSKEAREGIRPHIQRFLDLGILVPCQSPWNTPLLPVKKPGTNDYRPVQDLREVNKRVQDIHPTVPNPYNLLSSLPPSHTWYSVLDLKDAFFCLKLHPNSQPLFAFEWRDPEKGNTGQLTWTRLPQGFKNSPTLFNEALHRDLASFRALNPQVVMLQYVDDLLVAAPTYRDCKEGTRRLLQELSKLGYRVSAKKAQLCREEVTYLGYLLKGGKRWLTPARKATVMKIPTPTTPRQVREFLGTAGFCRLWIPGFASLAAPLYPLTRPKVPFTWTEAHQEAFGRIKEALLSAPALALPDLTKPFALYVDEKEGVARGVLTQTLGPWRRPVAYLSKKLDPVASGWPTCLKAIAAVALLLKDADKLTLGQNVLVIAPHNLESIVRQPPDRWMTNARMTHYQSLLLNERVSFAPPAILNPATLLPVESDDTPIHICSEILAEETGTRPDLRDQPLPGVPAWYTDGSSFIMDGRRQAGAAIVDNKRTVWASNLPEGTSAQKAELIALTQALRLAEGKSINIYTDSRYAFATAHVHGAIYKQRGWLTSAGKDIKNKEEILALLEAIHLPKRVAIIHCPGHQRGTDPVATGNRKADEAAKQAAQSTRILTETTKNAGKRTADGSEFEKRTADGSEFESPKKKAKVE

SEQ ID NO: 6846 - protein, 2125 aa, synthetic construct
MPAAKRVKLDGGDKKYSIGLDIGTNSVGWAVITDEYKVPSKKFKVLGNTDRHSIKKNLIGALLFDSGETAEATRLKRTARRRYTRRKNRICYLQEIFSNEMAKVDDSFFHRLEESFLVEEDKKHERHPIFGNIVDEVAYHEKYPTIYHLRKKLVDSTDKADLRLIYLALAHMIKFRGHFLIEGDLNPDNSDVDKLFIQLVQTYNQLFEENPINASGVDAKAILSARLSKSRRLENLIAQLPGEKKNGLFGNLIALSLGLTPNFKSNFDLAEDAKLQLSKDTYDDDLDNLLAQIGDQYADLFLAAKNLSDAILLSDILRVNTEITKAPLSASMIKRYDEHHQDLTLLKALVRQQLPEKYKEIFFDQSKNGYAGYIDGGASQEEFYKFIKPILEKMDGTEELLVKLNREDLLRKQRTFDNGSIPHQIHLGELHAILRRQEDFYPFLKDNREKIEKILTFRIPYYVGPLARGNSRFAWMTRKSEETITPWNFEEVVDKGASAQSFIERMTNFDKNLPNEKVLPKHSLLYEYFTVYNELTKVKYVTEGMRKPAFLSGEQKKAIVDLLFKTNRKVTVKQLKEDYFKKIECFDSVEISGVEDRFNASLGTYHDLLKIIKDKDFLDNEENEDILEDIVLTLTLFEDREMIEERLKTYAHLFDDKVMKQLKRRRYTGWGRLSRKLINGIRDKQSGKTILDFLKSDGFANRNFMQLIHDDSLTFKEDIQKAQVSGQGDSLHEHIANLAGSPAIKKGILQTVKVVDELVKVMGRHKPENIVIEMARENQTTQKGQKNSRERMKRIEEGIKELGSQILKEHPVENTQLQNEKLYLYYLQNGRDMYVDQELDINRLSDYDVDHIVPQSFLKDDSIDNKVLTRSDKARGKSDNVPSEEVVKKMKNYWRQLLNAKLITQRKFDNLTKAERGGLSELDKAGFIKRQLVETRQITKHVAQILDSRMNTKYDENDKLIREVKVITLKSKLVSDFRKDFQFYKVREINNYHHAHDAYLNAVVGTALIKKYPKLESEFVYGDYKVYDVRKMIAKSEQEIGKATAKYFFYSNIMNFFKTEITLANGEIRKRPLIETNGETGEIVWDKGRDFATVRKVLSMPQVNIVKKTEVQTGGFSKESILPKRNSDKLIARKKDWDPKKYGGFDSPTVAYSVLVVAKVEKGKSKKLKSVKELLGITIMERSSFEKNPIDFLEAKGYKEVKKDLIIKLPKYSLFELENGRKRMLASAGELQKGNELALPSKYVNFLYLASHYEKLKGSPEDNEQKQLFVEQHKHYLDEIIEQISEFSKRVILADANLDKVLSAYNKHRDKPIREQAENIIHLFTLTNLGAPAAFKYFDTTIDRKRYTSTKEVLDATLIHQSITGLYETRIDLSQLGGDGGGGGGSSGGSGGLLGRDLLTKLKAQIQFSTEGPQVTWEDRPAMCLVLNLEEEYRLHEKPVPPSIDPSWLQLFPMVWAEKAGMGLANQVPPVVVELKSDASPVAVRQYPMSKEAREGIRPHIQRFLDLGILVPCQSPWNTPLLPVKKPGTNDYRPVQDLREVNKRVQDIHPTVPNPYNLLSSLPPSHTWYSVLDLKDAFFCLKLHPNSQPLFAFEWRDPEKGNTGQLTWTRLPQGFKNSPTLFNEALHRDLASFRALNPQVVMLQYVDDLLVAAPTYRDCKEGTRRLLQELSKLGYRVSAKKAQLCREEVTYLGYLLKGGKRWLTPARKATVMKIPTPTTPRQVREFLGKAGFCRLFIPGFASLAAPLYPLTRPKVPFTWTEAHQEAFGRIKEALLSAPALALPDLTKPFALYVDEKEGVARGVLTQTLGPWRRPVAYLSKKLDPVASGWPTCLKAIAAVALLLKDADKLTLGQNVLVIAPHNLESIVRQPPDRWMTNARMTHYQSLLLNERVSFAPPAILNPATLLPVESDDTPIHICSEILAEETGTRPDLRDQPLPGVPAWYTDGSSFIMDGRRQAGAAIVDNKRTVWASNLPEGTSAQKAELIALTQALRLAEGKSINIYTDSRYAFATAHVHGAIYKQRGWLTSAGKDIKNKEEILALLEAIHLPKRVAIIHCPGHQRGTDPVATGNRKADEAAKQAAQSTRILTETTKNAGKRTADGSEFEKRTADGSEFESPKKKAKVE

SEQ ID NO: 6847 - protein, 2216 aa, synthetic construct
MPAAKRVKLDGGDKKYSIGLDIGTNSVGWAVITDEYKVPSKKFKVLGNTDRHSIKKNLIGALLFDSGETAEATRLKRTARRRYTRRKNRICYLQEIFSNEMAKVDDSFFHRLEESFLVEEDKKHERHPIFGNIVDEVAYHEKYPTIYHLRKKLVDSTDKADLRLIYLALAHMIKFRGHFLIEGDLNPDNSDVDKLFIQLVQTYNQLFEENPINASGVDAKAILSARLSKSRRLENLIAQLPGEKKNGLFGNLIALSLGLTPNFKSNFDLAEDAKLQLSKDTYDDDLDNLLAQIGDQYADLFLAAKNLSDAILLSDILRVNTEITKAPLSASMIKRYDEHHQDLTLLKALVRQQLPEKYKEIFFDQSKNGYAGYIDGGASQEEFYKFIKPILEKMDGTEELLVKLNREDLLRKQRTFDNGSIPHQIHLGELHAILRRQEDFYPFLKDNREKIEKILTFRIPYYVGPLARGNSRFAWMTRKSEETITPWNFEEVVDKGASAQSFIERMTNFDKNLPNEKVLPKHSLLYEYFTVYNELTKVKYVTEGMRKPAFLSGEQKKAIVDLLFKTNRKVTVKQLKEDYFKKIECFDSVEISGVEDRFNASLGTYHDLLKIIKDKDFLDNEENEDILEDIVLTLTLFEDREMIEERLKTYAHLFDDKVMKQLKRRRYTGWGRLSRKLINGIRDKQSGKTILDFLKSDGFANRNFMQLIHDDSLTFKEDIQKAQVSGQGDSLHEHIANLAGSPAIKKGILQTVKVVDELVKVMGRHKPENIVIEMARENQTTQKGQKNSRERMKRIEEGIKELGSQILKEHPVENTQLQNEKLYLYYLQNGRDMYVDQELDINRLSDYDVDHIVPQSFLKDDSIDNKVLTRSDKARGKSDNVPSEEVVKKMKNYWRQLLNAKLITQRKFDNLTKAERGGLSELDKAGFIKRQLVETRQITKHVAQILDSRMNTKYDENDKLIREVKVITLKSKLVSDFRKDFQFYKVREINNYHHAHDAYLNAVVGTALIKKYPKLESEFVYGDYKVYDVRKMIAKSEQEIGKATAKYFFYSNIMNFFKTEITLANGEIRKRPLIETNGETGEIVWDKGRDFATVRKVLSMPQVNIVKKTEVQTGGFSKESILPKRNSDKLIARKKDWDPKKYGGFDSPTVAYSVLVVAKVEKGKSKKLKSVKELLGITIMERSSFEKNPIDFLEAKGYKEVKKDLIIKLPKYSLFELENGRKRMLASAGELQKGNELALPSKYVNFLYLASHYEKLKGSPEDNEQKQLFVEQHKHYLDEIIEQISEFSKRVILADANLDKVLSAYNKHRDKPIREQAENIIHLFTLTNLGAPAAFKYFDTTIDRKRYTSTKEVLDATLIHQSITGLYETRIDLSQLGGDGGGGGGSSGGSGGTLGDQGSRGSDPLPEPRVTLTVEGIPTEFLVNTGAEHSVLTKPMGKMGSKRTVVAGATGSKVYPWTTKRLLKIGQKQVTHSFLVIPECPAPLLGRDLLTKLKAQIQFSTEGPQVTWEDRPAMCLVLNLEEEYRLHEKPVPPSIDPSWLQLFPMVWAEKAGMGLANQVPPVVVELKSDASPVAVRQYPMSKEAREGIRPHIQRFLDLGILVPCQSPWNTPLLPVKKPGTNDYRPVQDLREVNKRVQDIHPTVPNPYNLLSSLPPSHTWYSVLDLKDAFFCLKLHPNSQPLFAFEWRDPEKGNTGQLTWTRLPQGFKNSPTLFNEALHRDLASFRALNPQVVMLQYVDDLLVAAPTYRDCKEGTRRLLQELSKLGYRVSAKKAQLCREEVTYLGYLLKGGKRWLTPARKATVMKIPTPTTPRQVREFLGKAGFCRLFIPGFASLAAPLYPLTRPKVPFTWTEAHQEAFGRIKEALLSAPALALPDLTKPFALYVDEKEGVARGVLTQTLGPWRRPVAYLSKKLDPVASGWPTCLKAIAAVALLLKDADKLTLGQNVLVIAPHNLESIVRQPPDRWMTNARMTHYQSLLLNERVSFAPPAILNPATLLPVESDDTPIHICSEILAEETGTRPDLRDQPLPGVPAWYTDGSSFIMDGRRQAGAAIVDNKRTVWASNLPEGTSAQKAELIALTQALRLAEGKSINIYTDSRYAFATAHVHGAIYKQRGWLTSAGKDIKNKEEILALLEAIHLPKRVAIIHCPGHQRGTDPVATGNRKADEAAKQAAQSTRILTETTKNAGKRTADGSEFEKRTADGSEFESPKKKAKVE

SEQ ID NO: 6848 - protein, 2094 aa, synthetic construct
MPAAKRVKLDGGDKKYSIGLDIGTNSVGWAVITDEYKVPSKKFKVLGNTDRHSIKKNLIGALLFDSGETAEATRLKRTARRRYTRRKNRICYLQEIFSNEMAKVDDSFFHRLEESFLVEEDKKHERHPIFGNIVDEVAYHEKYPTIYHLRKKLVDSTDKADLRLIYLALAHMIKFRGHFLIEGDLNPDNSDVDKLFIQLVQTYNQLFEENPINASGVDAKAILSARLSKSRRLENLIAQLPGEKKNGLFGNLIALSLGLTPNFKSNFDLAEDAKLQLSKDTYDDDLDNLLAQIGDQYADLFLAAKNLSDAILLSDILRVNTEITKAPLSASMIKRYDEHHQDLTLLKALVRQQLPEKYKEIFFDQSKNGYAGYIDGGASQEEFYKFIKPILEKMDGTEELLVKLNREDLLRKQRTFDNGSIPHQIHLGELHAILRRQEDFYPFLKDNREKIEKILTFRIPYYVGPLARGNSRFAWMTRKSEETITPWNFEEVVDKGASAQSFIERMTNFDKNLPNEKVLPKHSLLYEYFTVYNELTKVKYVTEGMRKPAFLSGEQKKAIVDLLFKTNRKVTVKQLKEDYFKKIECFDSVEISGVEDRFNASLGTYHDLLKIIKDKDFLDNEENEDILEDIVLTLTLFEDREMIEERLKTYAHLFDDKVMKQLKRRRYTGWGRLSRKLINGIRDKQSGKTILDFLKSDGFANRNFMQLIHDDSLTFKEDIQKAQVSGQGDSLHEHIANLAGSPAIKKGILQTVKVVDELVKVMGRHKPENIVIEMARENQTTQKGQKNSRERMKRIEEGIKELGSQILKEHPVENTQLQNEKLYLYYLQNGRDMYVDQELDINRLSDYDVDHIVPQSFLKDDSIDNKVLTRSDKARGKSDNVPSEEVVKKMKNYWRQLLNAKLITQRKFDNLTKAERGGLSELDKAGFIKRQLVETRQITKHVAQILDSRMNTKYDENDKLIREVKVITLKSKLVSDFRKDFQFYKVREINNYHHAHDAYLNAVVGTALIKKYPKLESEFVYGDYKVYDVRKMIAKSEQEIGKATAKYFFYSNIMNFFKTEITLANGEIRKRPLIETNGETGEIVWDKGRDFATVRKVLSMPQVNIVKKTEVQTGGFSKESILPKRNSDKLIARKKDWDPKKYGGFDSPTVAYSVLVVAKVEKGKSKKLKSVKELLGITIMERSSFEKNPIDFLEAKGYKEVKKDLIIKLPKYSLFELENGRKRMLASAGELQKGNELALPSKYVNFLYLASHYEKLKGSPEDNEQKQLFVEQHKHYLDEIIEQISEFSKRVILADANLDKVLSAYNKHRDKPIREQAENIIHLFTLTNLGAPAAFKYFDTTIDRKRYTSTKEVLDATLIHQSITGLYETRIDLSQLGGDGGGGGGSSGGSGGTLGIEDEYRLHETSTEPDVSLGSTWLSDFPQAWAETGGMGLAVRQAPLIIPLKATSTPVSIQQYPMSHEARLGIKPHIQRLLDQGILVPCQSPWNTPLLPVKKPGTNDYRPVQDLREVNKRVEDIHPTVPNPYNLLSGLPPSHQWYTVLDLKDAFFCLRLHPTSQPLFAFEWRDPGMGISGQLTWTRLPQGFKNSPTLFNEALHRDLADFRIQHPDLILLQYVDDILLAATSELDCQQGTRALLQTLGDLGYRASAKKAQICQKQVKYLGYLLREGQRWLTEARKETVMGQPVPKTPRQLREFLGTAGFCRLWIPGFAEMAAPLYPLTKPGTLFSWGPDQQKAYQEIKQALLTAPALGLPDLTKPFELFVDEKQGYAKGVLTQKLGPWRRPVAYLSKKLDPVAAGWPPCLRMVAAIAVLTKDAGKLTMGQPLVILAPHAVEALVKQPPDRWLSNARMTHYQAMLLDTDRVQFGPVVALNPATLLPLPEEGAPHDCLEILAETHGTRPDLTDQPIPDADHTWYTDGSSFLQEGQRKAGAAVTTETEVIWAGALPAGTSAQRAELIALTQALKMAEGKRLNVYTDSRYAFATAHIHGEIYRRRGWLTSEGREIKNKSEILALLKALFLPKRLSIIHCLGHQKGDSAEARGNRLADQAAREAAIKTPPDTSTLLAGKRTADGSEFEKRTADGSEFESPKKKAKVE

SEQ ID NO: 6849 - protein, 2094 aa, synthetic construct
MPAAKRVKLDGGDKKYSIGLDIGTNSVGWAVITDEYKVPSKKFKVLGNTDRHSIKKNLIGALLFDSGETAEATRLKRTARRRYTRRKNRICYLQEIFSNEMAKVDDSFFHRLEESFLVEEDKKHERHPIFGNIVDEVAYHEKYPTIYHLRKKLVDSTDKADLRLIYLALAHMIKFRGHFLIEGDLNPDNSDVDKLFIQLVQTYNQLFEENPINASGVDAKAILSARLSKSRRLENLIAQLPGEKKNGLFGNLIALSLGLTPNFKSNFDLAEDAKLQLSKDTYDDDLDNLLAQIGDQYADLFLAAKNLSDAILLSDILRVNTEITKAPLSASMIKRYDEHHQDLTLLKALVRQQLPEKYKEIFFDQSKNGYAGYIDGGASQEEFYKFIKPILEKMDGTEELLVKLNREDLLRKQRTFDNGSIPHQIHLGELHAILRRQEDFYPFLKDNREKIEKILTFRIPYYVGPLARGNSRFAWMTRKSEETITPWNFEEVVDKGASAQSFIERMTNFDKNLPNEKVLPKHSLLYEYFTVYNELTKVKYVTEGMRKPAFLSGEQKKAIVDLLFKTNRKVTVKQLKEDYFKKIECFDSVEISGVEDRFNASLGTYHDLLKIIKDKDFLDNEENEDILEDIVLTLTLFEDREMIEERLKTYAHLFDDKVMKQLKRRRYTGWGRLSRKLINGIRDKQSGKTILDFLKSDGFANRNFMQLIHDDSLTFKEDIQKAQVSGQGDSLHEHIANLAGSPAIKKGILQTVKVVDELVKVMGRHKPENIVIEMARENQTTQKGQKNSRERMKRIEEGIKELGSQILKEHPVENTQLQNEKLYLYYLQNGRDMYVDQELDINRLSDYDVDHIVPQSFLKDDSIDNKVLTRSDKARGKSDNVPSEEVVKKMKNYWRQLLNAKLITQRKFDNLTKAERGGLSELDKAGFIKRQLVETRQITKHVAQILDSRMNTKYDENDKLIREVKVITLKSKLVSDFRKDFQFYKVREINNYHHAHDAYLNAVVGTALIKKYPKLESEFVYGDYKVYDVRKMIAKSEQEIGKATAKYFFYSNIMNFFKTEITLANGEIRKRPLIETNGETGEIVWDKGRDFATVRKVLSMPQVNIVKKTEVQTGGFSKESILPKRNSDKLIARKKDWDPKKYGGFDSPTVAYSVLVVAKVEKGKSKKLKSVKELLGITIMERSSFEKNPIDFLEAKGYKEVKKDLIIKLPKYSLFELENGRKRMLASAGELQKGNELALPSKYVNFLYLASHYEKLKGSPEDNEQKQLFVEQHKHYLDEIIEQISEFSKRVILADANLDKVLSAYNKHRDKPIREQAENIIHLFTLTNLGAPAAFKYFDTTIDRKRYTSTKEVLDATLIHQSITGLYETRIDLSQLGGDGGGGGGSSGGSGGTLNIEDEYRLHETSKEPDVSLGSTWLSDFPQAWAETGGMGLAVRQAPLIIPLKATSTPVSIKQYPMSQEARLGIKPHIQRLLDQGILVPCQSPWNTPLLPVKKPGTNDYRPVQDLREVNKRVEDIHPTVPNPYNLLSGLPPSHQWYTVLDLKDAFFCLRLHPTSQPLFAFEWRDPEMGISGQLTWTRLPQGFKNSPTLFNEALHRDLAGFRIQHPDLILLQYVDDLLLAATSELDCQQGTRALLQTLGDLGYRASAKKAQICQKQVKYLGYLLKEGQRWLTEARKETVMGQPIPKTPRQLREFLGTAGFCRLWIPGFAEMAAPLYPLTKPGTLFNWGPDQQKAFQEIKQALLTAPALGLPDLTKPFELFVDEKQGYAKGVLTQKLGPWRRPVAYLSKKLDPVAAGWPPCLRMVAAIAVLTKDAGKLTMGQPLVILAPHAVEALVKQPPDRWLSNARMTHYQALLLDTDRVQFGPVVALNPATLLPLPEEGLQHDCLDILAEAHGTRSDLMDQPLPDADHTWYTDGSSFLQEGQRKAGAAVTTETEVIWARALPAGTSAQRAELIALTQALKMAEGKKLNVYTDSRYAFATAHIHGEIYRRRGWLTSEGKEIKNKDEILALLKALFLPKRLSIIHCPGHQKGNSAEARGNRMADQAAREVATRETPETSTLLAGKRTADGSEFEKRTADGSEFESPKKKAKVE

SEQ ID NO: 6850 - protein, 2094 aa, synthetic construct
MPAAKRVKLDGGDKKYSIGLDIGTNSVGWAVITDEYKVPSKKFKVLGNTDRHSIKKNLIGALLFDSGETAEATRLKRTARRRYTRRKNRICYLQEIFSNEMAKVDDSFFHRLEESFLVEEDKKHERHPIFGNIVDEVAYHEKYPTIYHLRKKLVDSTDKADLRLIYLALAHMIKFRGHFLIEGDLNPDNSDVDKLFIQLVQTYNQLFEENPINASGVDAKAILSARLSKSRRLENLIAQLPGEKKNGLFGNLIALSLGLTPNFKSNFDLAEDAKLQLSKDTYDDDLDNLLAQIGDQYADLFLAAKNLSDAILLSDILRVNTEITKAPLSASMIKRYDEHHQDLTLLKALVRQQLPEKYKEIFFDQSKNGYAGYIDGGASQEEFYKFIKPILEKMDGTEELLVKLNREDLLRKQRTFDNGSIPHQIHLGELHAILRRQEDFYPFLKDNREKIEKILTFRIPYYVGPLARGNSRFAWMTRKSEETITPWNFEEVVDKGASAQSFIERMTNFDKNLPNEKVLPKHSLLYEYFTVYNELTKVKYVTEGMRKPAFLSGEQKKAIVDLLFKTNRKVTVKQLKEDYFKKIECFDSVEISGVEDRFNASLGTYHDLLKIIKDKDFLDNEENEDILEDIVLTLTLFEDREMIEERLKTYAHLFDDKVMKQLKRRRYTGWGRLSRKLINGIRDKQSGKTILDFLKSDGFANRNFMQLIHDDSLTFKEDIQKAQVSGQGDSLHEHIANLAGSPAIKKGILQTVKVVDELVKVMGRHKPENIVIEMARENQTTQKGQKNSRERMKRIEEGIKELGSQILKEHPVENTQLQNEKLYLYYLQNGRDMYVDQELDINRLSDYDVDHIVPQSFLKDDSIDNKVLTRSDKARGKSDNVPSEEVVKKMKNYWRQLLNAKLITQRKFDNLTKAERGGLSELDKAGFIKRQLVETRQITKHVAQILDSRMNTKYDENDKLIREVKVITLKSKLVSDFRKDFQFYKVREINNYHHAHDAYLNAVVGTALIKKYPKLESEFVYGDYKVYDVRKMIAKSEQEIGKATAKYFFYSNIMNFFKTEITLANGEIRKRPLIETNGETGEIVWDKGRDFATVRKVLSMPQVNIVKKTEVQTGGFSKESILPKRNSDKLIARKKDWDPKKYGGFDSPTVAYSVLVVAKVEKGKSKKLKSVKELLGITIMERSSFEKNPIDFLEAKGYKEVKKDLIIKLPKYSLFELENGRKRMLASAGELQKGNELALPSKYVNFLYLASHYEKLKGSPEDNEQKQLFVEQHKHYLDEIIEQISEFSKRVILADANLDKVLSAYNKHRDKPIREQAENIIHLFTLTNLGAPAAFKYFDTTIDRKRYTSTKEVLDATLIHQSITGLYETRIDLSQLGGDGGGGGGSSGGSGGTLNIEDEYRLHETSKGPDVPLGSTWLSDFPQAWAETGGMGLAVRQAPLIIPLKATSTPVSIKQYPMSQEARLGIKPHIQRLLDQGILVPCQSPWNTPLLPVKKPGTNDYRPVQDLREVNKRVEDIHPTVPNPYNLLSGLPPSHQWYTVLDLKDAFFCLRLHPTSQSLFAFEWRDPEMGISGQLTWTRLPQGFKNSPTLFNEALHRDLADFRIQHPDLILLQYVDDLLLAATSELDCQQGTRALLQTLGDLGYRASAKKAQICQKQVKYLGYLLKEGQRWLTEARKETVMGQPTPKTPRQLREFLGTAGFCRLWIPGFAEMAAPLYPLTKPGTLFEWGPDQQKAYQEIKQALLTAPALGLPDLTKPFELFVDEKQGYAKGVLTQKLGPWRRPVAYLSKKLDPVAAGWPPCLRMVAAIAVLTKDAGKLTMGQPLVILAPHAVEALVKQPPDRWLSNARMTHYQALLLDTDRVQFGPIVALNPATLLPLPEEGLQHDCLDILAEAHGTRPDLTDQPLPDADHTWYTDGSSFLQEGQRKAGAAVTTETEVVWAKALPAGTSAQRAELIALTQALKMAEGKKLNVYTDSRYAFATAHIHGEIYRRRGWLTSEGKEIKNKDEILALLKALFLPKRLSIIHCPGHQKGNRAEARGNRMADQAAREVATRETPETSTLLAGKRTADGSEFEKRTADGSEFESPKKKAKVE

SEQ ID NO: 6851 - protein, 2114 aa, synthetic construct
MPAAKRVKLDGGDKKYSIGLDIGTNSVGWAVITDEYKVPSKKFKVLGNTDRHSIKKNLIGALLFDSGETAEATRLKRTARRRYTRRKNRICYLQEIFSNEMAKVDDSFFHRLEESFLVEEDKKHERHPIFGNIVDEVAYHEKYPTIYHLRKKLVDSTDKADLRLIYLALAHMIKFRGHFLIEGDLNPDNSDVDKLFIQLVQTYNQLFEENPINASGVDAKAILSARLSKSRRLENLIAQLPGEKKNGLFGNLIALSLGLTPNFKSNFDLAEDAKLQLSKDTYDDDLDNLLAQIGDQYADLFLAAKNLSDAILLSDILRVNTEITKAPLSASMIKRYDEHHQDLTLLKALVRQQLPEKYKEIFFDQSKNGYAGYIDGGASQEEFYKFIKPILEKMDGTEELLVKLNREDLLRKQRTFDNGSIPHQIHLGELHAILRRQEDFYPFLKDNREKIEKILTFRIPYYVGPLARGNSRFAWMTRKSEETITPWNFEEVVDKGASAQSFIERMTNFDKNLPNEKVLPKHSLLYEYFTVYNELTKVKYVTEGMRKPAFLSGEQKKAIVDLLFKTNRKVTVKQLKEDYFKKIECFDSVEISGVEDRFNASLGTYHDLLKIIKDKDFLDNEENEDILEDIVLTLTLFEDREMIEERLKTYAHLFDDKVMKQLKRRRYTGWGRLSRKLINGIRDKQSGKTILDFLKSDGFANRNFMQLIHDDSLTFKEDIQKAQVSGQGDSLHEHIANLAGSPAIKKGILQTVKVVDELVKVMGRHKPENIVIEMARENQTTQKGQKNSRERMKRIEEGIKELGSQILKEHPVENTQLQNEKLYLYYLQNGRDMYVDQELDINRLSDYDVDHIVPQSFLKDDSIDNKVLTRSDKARGKSDNVPSEEVVKKMKNYWRQLLNAKLITQRKFDNLTKAERGGLSELDKAGFIKRQLVETRQITKHVAQILDSRMNTKYDENDKLIREVKVITLKSKLVSDFRKDFQFYKVREINNYHHAHDAYLNAVVGTALIKKYPKLESEFVYGDYKVYDVRKMIAKSEQEIGKATAKYFFYSNIMNFFKTEITLANGEIRKRPLIETNGETGEIVWDKGRDFATVRKVLSMPQVNIVKKTEVQTGGFSKESILPKRNSDKLIARKKDWDPKKYGGFDSPTVAYSVLVVAKVEKGKSKKLKSVKELLGITIMERSSFEKNPIDFLEAKGYKEVKKDLIIKLPKYSLFELENGRKRMLASAGELQKGNELALPSKYVNFLYLASHYEKLKGSPEDNEQKQLFVEQHKHYLDEIIEQISEFSKRVILADANLDKVLSAYNKHRDKPIREQAENIIHLFTLTNLGAPAAFKYFDTTIDRKRYTSTKEVLDATLIHQSITGLYETRIDLSQLGGDGGGGGGSSGGSGGVQEISDSRPMLHIYLNGRRFLGLLDTGADKTCIAGRDWPANWPIHQTESSLQGLGMACGVARSSQPLRWQHEDKSGIIHPFVIPTLPFTLWGRDIMKDIKVRLMTDSPDDSQDLMIGAIESNLFADQISWKSDQPVWLNQWPLKQEKLQALQQLVTEQLQLGHLEESNSPWNTPVFVIKKKSGKWRLLQDLRAVNATMHDMGALQPGLPSPPAVPKGWEIIIIDLQDCFFNIKLHPEDCKRFAFSVPSPNFKRPYQRFQWKVLPQGMKNSPTLCQKFVDKAILTVRDKYQDSYIVHYMDDILLAHPSRSIVDEILTSMIQALNKHGLVVSTEKIQKYDNLKYLGTHIQGDSVSYQKLQIRTDKLRTLNDFQKLLGNINWIRPFLKLTTGELKPLFEILNPDSNPISTRKLTPEACKALQLMNERLSTARVKRLDLSQPWSLCILKTEYTPTACLWQDGVVEWIHLPHISPKVITPYDIFCTQLIIKGRHRSKELFSKDPDYIVVPYTKVQFDLLLQEKEDWPISLLGFLGEVHFHLPKDPLLTFTLQTAIIFPHMTSTTPLEKGIVIFTDGSANGRSVTYIQGREPIIKENTQNTAQQAEIVAVITAFEEVSQPFNLYTDSKYVTGLFPEIETATLSPRTKIYTELKHLQRLIHKRQEKFYIGHIRGHTGLPGPLAQGNAYADSLTRILTAAGKRTADGSEFEKRTADGSEFESPKKKAKVE

SEQ ID NO: 6852 - protein, 2088 aa, synthetic construct
MPAAKRVKLDGGDKKYSIGLDIGTNSVGWAVITDEYKVPSKKFKVLGNTDRHSIKKNLIGALLFDSGETAEATRLKRTARRRYTRRKNRICYLQEIFSNEMAKVDDSFFHRLEESFLVEEDKKHERHPIFGNIVDEVAYHEKYPTIYHLRKKLVDSTDKADLRLIYLALAHMIKFRGHFLIEGDLNPDNSDVDKLFIQLVQTYNQLFEENPINASGVDAKAILSARLSKSRRLENLIAQLPGEKKNGLFGNLIALSLGLTPNFKSNFDLAEDAKLQLSKDTYDDDLDNLLAQIGDQYADLFLAAKNLSDAILLSDILRVNTEITKAPLSASMIKRYDEHHQDLTLLKALVRQQLPEKYKEIFFDQSKNGYAGYIDGGASQEEFYKFIKPILEKMDGTEELLVKLNREDLLRKQRTFDNGSIPHQIHLGELHAILRRQEDFYPFLKDNREKIEKILTFRIPYYVGPLARGNSRFAWMTRKSEETITPWNFEEVVDKGASAQSFIERMTNFDKNLPNEKVLPKHSLLYEYFTVYNELTKVKYVTEGMRKPAFLSGEQKKAIVDLLFKTNRKVTVKQLKEDYFKKIECFDSVEISGVEDRFNASLGTYHDLLKIIKDKDFLDNEENEDILEDIVLTLTLFEDREMIEERLKTYAHLFDDKVMKQLKRRRYTGWGRLSRKLINGIRDKQSGKTILDFLKSDGFANRNFMQLIHDDSLTFKEDIQKAQVSGQGDSLHEHIANLAGSPAIKKGILQTVKVVDELVKVMGRHKPENIVIEMARENQTTQKGQKNSRERMKRIEEGIKELGSQILKEHPVENTQLQNEKLYLYYLQNGRDMYVDQELDINRLSDYDVDHIVPQSFLKDDSIDNKVLTRSDKARGKSDNVPSEEVVKKMKNYWRQLLNAKLITQRKFDNLTKAERGGLSELDKAGFIKRQLVETRQITKHVAQILDSRMNTKYDENDKLIREVKVITLKSKLVSDFRKDFQFYKVREINNYHHAHDAYLNAVVGTALIKKYPKLESEFVYGDYKVYDVRKMIAKSEQEIGKATAKYFFYSNIMNFFKTEITLANGEIRKRPLIETNGETGEIVWDKGRDFATVRKVLSMPQVNIVKKTEVQTGGFSKESILPKRNSDKLIARKKDWDPKKYGGFDSPTVAYSVLVVAKVEKGKSKKLKSVKELLGITIMERSSFEKNPIDFLEAKGYKEVKKDLIIKLPKYSLFELENGRKRMLASAGELQKGNELALPSKYVNFLYLASHYEKLKGSPEDNEQKQLFVEQHKHYLDEIIEQISEFSKRVILADANLDKVLSAYNKHRDKPIREQAENIIHLFTLTNLGAPAAFKYFDTTIDRKRYTSTKEVLDATLIHQSITGLYETRIDLSQLGGDGGGGGGSSGGSGGTLQLDDEYRLYSPLVKPDQNIQFWLEQFPQAWAETAGMGLAKQVPPQVIQLKASATPVSVRQYPLSKEAQEGIRPHVQRLIQQGILVPVQSPWNTPLLPVRKPGTNDYRPVQDLREVNKRVQDIHPTVPNPYNLLCALPPQRSWYTVLDLKDAFFCLRLHPTSQPLFAFEWRDPGTGRTGQLTWTRLPQGFKNSPTIFDEALHRDLANFRIQHPQVTLLQYVDDLLLAGATKQDCLEGTKALLLELSDLGYRASAKKAQICRREVTYLGYSLRDGQRWLTEARKKTVVQIPAPTTAKQVREFLGTAGFCRLWIPGFATLAAPLYPLTKEKGEFSWAPEHQKAFDAIKKALLSAPALALPDVTKPFTLYVDERKGVARGVLTQTLGPWRRPVAYLSKKLDPVASGWPVCLKAIAAVAILVKDADKLTLGQNITVIAPHALENIVRQPPDRWMTNARMTHYQSLLLTERVTFAPPAALNPATLLPEETDEPVTHDCHQLLIEETGVRKDLTDIPLTGEVLTWFTDGSSYVVEGKRMAGAAVVDGTRTIWASSLPEGTSAQKAELMALTQALRLAEGKSINIYTDSRYAFATAHVHGAIYKQRGLLTSAGREIKNKEEILSLLEALHLPKRLAIIHCPGHQKAKDPISRGNQMADRVAKQAAQGVNLLAGKRTADGSEFEKRTADGSEFESPKKKAKVE

SEQ ID NO: 6853 - protein, 2085 aa, synthetic construct
MPAAKRVKLDGGDKKYSIGLDIGTNSVGWAVITDEYKVPSKKFKVLGNTDRHSIKKNLIGALLFDSGETAEATRLKRTARRRYTRRKNRICYLQEIFSNEMAKVDDSFFHRLEESFLVEEDKKHERHPIFGNIVDEVAYHEKYPTIYHLRKKLVDSTDKADLRLIYLALAHMIKFRGHFLIEGDLNPDNSDVDKLFIQLVQTYNQLFEENPINASGVDAKAILSARLSKSRRLENLIAQLPGEKKNGLFGNLIALSLGLTPNFKSNFDLAEDAKLQLSKDTYDDDLDNLLAQIGDQYADLFLAAKNLSDAILLSDILRVNTEITKAPLSASMIKRYDEHHQDLTLLKALVRQQLPEKYKEIFFDQSKNGYAGYIDGGASQEEFYKFIKPILEKMDGTEELLVKLNREDLLRKQRTFDNGSIPHQIHLGELHAILRRQEDFYPFLKDNREKIEKILTFRIPYYVGPLARGNSRFAWMTRKSEETITPWNFEEVVDKGASAQSFIERMTNFDKNLPNEKVLPKHSLLYEYFTVYNELTKVKYVTEGMRKPAFLSGEQKKAIVDLLFKTNRKVTVKQLKEDYFKKIECFDSVEISGVEDRFNASLGTYHDLLKIIKDKDFLDNEENEDILEDIVLTLTLFEDREMIEERLKTYAHLFDDKVMKQLKRRRYTGWGRLSRKLINGIRDKQSGKTILDFLKSDGFANRNFMQLIHDDSLTFKEDIQKAQVSGQGDSLHEHIANLAGSPAIKKGILQTVKVVDELVKVMGRHKPENIVIEMARENQTTQKGQKNSRERMKRIEEGIKELGSQILKEHPVENTQLQNEKLYLYYLQNGRDMYVDQELDINRLSDYDVDHIVPQSFLKDDSIDNKVLTRSDKARGKSDNVPSEEVVKKMKNYWRQLLNAKLITQRKFDNLTKAERGGLSELDKAGFIKRQLVETRQITKHVAQILDSRMNTKYDENDKLIREVKVITLKSKLVSDFRKDFQFYKVREINNYHHAHDAYLNAVVGTALIKKYPKLESEFVYGDYKVYDVRKMIAKSEQEIGKATAKYFFYSNIMNFFKTEITLANGEIRKRPLIETNGETGEIVWDKGRDFATVRKVLSMPQVNIVKKTEVQTGGFSKESILPKRNSDKLIARKKDWDPKKYGGFDSPTVAYSVLVVAKVEKGKSKKLKSVKELLGITIMERSSFEKNPIDFLEAKGYKEVKKDLIIKLPKYSLFELENGRKRMLASAGELQKGNELALPSKYVNFLYLASHYEKLKGSPEDNEQKQLFVEQHKHYLDEIIEQISEFSKRVILADANLDKVLSAYNKHRDKPIREQAENIIHLFTLTNLGAPAAFKYFDTTIDRKRYTSTKEVLDATLIHQSITGLYETRIDLSQLGGDGGGGGGSSGGSGGIPWLMKKPLQLTTLVPLQEYEERLLKQTMLTGSYKEKLQSLFLKYDALWQHWENQVGHRRIKPHHIATGTVNPRPQKQYPINPKAKASIQTVINDLLKQGVLIQQNSIMNTPVYPVPKPDGKWRMVLDYREVNKTIPLIAAQNQHSAGILSSIFRGKYKTTLDLSNGFWAHSITPESYWLTAFTWLGQQYCWTRLPQGFLNSPALFNADVVDLLKEVPNVQVYVDDIYISHDDPREHLEQLEKVFSLLLNAGYVVSLKKSEIAQHEVEFLGFNITKEGRGLTETFKQKLLNITPPRDLKQLQSILGKLNFARNFIPNFSELVKPLYNIIATAPGKYITWTTDNSQQLQNIISMLNSAENLEERNPEVRLIMKVNTSPSAGYIRFYNEFAKRPIMYLNYVYTKAEVKFTNTEKLLTTIHKGLIKALDLGMGQEILVYSPIVSMTKIQKTPLPERKALPIRWITWMSYLEDPRIQFHYDKTLPELQQVPTVTDDIIAKIKHPSEFSMVFYTDGSAIKHPNVNKSHNAGMGIAQVQFKPEFTVINTWSIPLGDHTAQLAEVAAVEFACKKALKIDGPVLIVTDSFYVAESVNKELPYWQSNGFFNNKKKPLKHVSKWKSIADCIQLKPDIIIIHEKGHQPTASTFHTEGNNLADKLATQGSYVVNAGKRTADGSEFEKRTADGSEFESPKKKAKVE

SEQ ID NO: 6854 - protein, 2174 aa, synthetic construct
MPAAKRVKLDGGDKKYSIGLDIGTNSVGWAVITDEYKVPSKKFKVLGNTDRHSIKKNLIGALLFDSGETAEATRLKRTARRRYTRRKNRICYLQEIFSNEMAKVDDSFFHRLEESFLVEEDKKHERHPIFGNIVDEVAYHEKYPTIYHLRKKLVDSTDKADLRLIYLALAHMIKFRGHFLIEGDLNPDNSDVDKLFIQLVQTYNQLFEENPINASGVDAKAILSARLSKSRRLENLIAQLPGEKKNGLFGNLIALSLGLTPNFKSNFDLAEDAKLQLSKDTYDDDLDNLLAQIGDQYADLFLAAKNLSDAILLSDILRVNTEITKAPLSASMIKRYDEHHQDLTLLKALVRQQLPEKYKEIFFDQSKNGYAGYIDGGASQEEFYKFIKPILEKMDGTEELLVKLNREDLLRKQRTFDNGSIPHQIHLGELHAILRRQEDFYPFLKDNREKIEKILTFRIPYYVGPLARGNSRFAWMTRKSEETITPWNFEEVVDKGASAQSFIERMTNFDKNLPNEKVLPKHSLLYEYFTVYNELTKVKYVTEGMRKPAFLSGEQKKAIVDLLFKTNRKVTVKQLKEDYFKKIECFDSVEISGVEDRFNASLGTYHDLLKIIKDKDFLDNEENEDILEDIVLTLTLFEDREMIEERLKTYAHLFDDKVMKQLKRRRYTGWGRLSRKLINGIRDKQSGKTILDFLKSDGFANRNFMQLIHDDSLTFKEDIQKAQVSGQGDSLHEHIANLAGSPAIKKGILQTVKVVDELVKVMGRHKPENIVIEMARENQTTQKGQKNSRERMKRIEEGIKELGSQILKEHPVENTQLQNEKLYLYYLQNGRDMYVDQELDINRLSDYDVDHIVPQSFLKDDSIDNKVLTRSDKARGKSDNVPSEEVVKKMKNYWRQLLNAKLITQRKFDNLTKAERGGLSELDKAGFIKRQLVETRQITKHVAQILDSRMNTKYDENDKLIREVKVITLKSKLVSDFRKDFQFYKVREINNYHHAHDAYLNAVVGTALIKKYPKLESEFVYGDYKVYDVRKMIAKSEQEIGKATAKYFFYSNIMNFFKTEITLANGEIRKRPLIETNGETGEIVWDKGRDFATVRKVLSMPQVNIVKKTEVQTGGFSKESILPKRNSDKLIARKKDWDPKKYGGFDSPTVAYSVLVVAKVEKGKSKKLKSVKELLGITIMERSSFEKNPIDFLEAKGYKEVKKDLIIKLPKYSLFELENGRKRMLASAGELQKGNELALPSKYVNFLYLASHYEKLKGSPEDNEQKQLFVEQHKHYLDEIIEQISEFSKRVILADANLDKVLSAYNKHRDKPIREQAENIIHLFTLTNLGAPAAFKYFDTTIDRKRYTSTKEVLDATLIHQSITGLYETRIDLSQLGGDGGGGGGSSGGSGGMDPLQLLQPLEAEIKGTKLKAHWNSGATITCVPQAFLEEEVPIKNIWIKTIHGEKEQPVYYLTFKIQGRKVEAEVISSPYDYILVSPSDIPWLMKKPLQLTTLVPLQEYEERLLKQTMLTGSYKEKLQSLFLKYDALWQHWENQVGHRRIKPHHIATGTVNPRPQKQYPINPKAKASIQTVINDLLKQGVLIQQNSIMNTPVYPVPKPDGKWRMVLDYREVNKTIPLIAAQNQHSAGILSSIFRGKYKTTLDLSNGFWAHSITPESYWLTAFTWLGQQYCWTRLPQGFLNSPALFNADVVDLLKEVPNVQVYVDDIYISHDDPREHLEQLEKVFSLLLNAGYVVSLKKSEIAQHEVEFLGFNITKEGRGLTETFKQKLLNITPPRDLKQLQSILGLLNFARNFIPNFSELVKPLYNIIATAPGKYITWTTDNSQQLQNIISMLNSAENLEERNPEVRLIMKVNTSPSAGYIRFYNEFAKRPIMYLNYVYTKAEVKFTNTEKLLTTIHKGLIKALDLGMGQEILVYSPIVSMTKIQKTPLPERKALPIRWITWMSYLEDPRIQFHYDKTLPELQQVPTVTDDIIAKIKHPSEFSMVFYTDGSAIKHPNVNKSHNAGMGIAQVQFKPEFTVINTWSIPLGDHTAQLAEVAAVEFACKKALKIDGPVLIVTDSFYVAESVNKELPYWQSNGFFNNKKKPLKHVSKWKSIADCIQLKPDIIIIHEKGHQPTASTFHTEGNNLADKLATQGSYVVNAGKRTADGSEFEKRTADGSEFESPKKKAKVE

SEQ ID NO: 6855 - protein, 2094 aa, synthetic construct
MPAAKRVKLDGGDKKYSIGLDIGTNSVGWAVITDEYKVPSKKFKVLGNTDRHSIKKNLIGALLFDSGETAEATRLKRTARRRYTRRKNRICYLQEIFSNEMAKVDDSFFHRLEESFLVEEDKKHERHPIFGNIVDEVAYHEKYPTIYHLRKKLVDSTDKADLRLIYLALAHMIKFRGHFLIEGDLNPDNSDVDKLFIQLVQTYNQLFEENPINASGVDAKAILSARLSKSRRLENLIAQLPGEKKNGLFGNLIALSLGLTPNFKSNFDLAEDAKLQLSKDTYDDDLDNLLAQIGDQYADLFLAAKNLSDAILLSDILRVNTEITKAPLSASMIKRYDEHHQDLTLLKALVRQQLPEKYKEIFFDQSKNGYAGYIDGGASQEEFYKFIKPILEKMDGTEELLVKLNREDLLRKQRTFDNGSIPHQIHLGELHAILRRQEDFYPFLKDNREKIEKILTFRIPYYVGPLARGNSRFAWMTRKSEETITPWNFEEVVDKGASAQSFIERMTNFDKNLPNEKVLPKHSLLYEYFTVYNELTKVKYVTEGMRKPAFLSGEQKKAIVDLLFKTNRKVTVKQLKEDYFKKIECFDSVEISGVEDRFNASLGTYHDLLKIIKDKDFLDNEENEDILEDIVLTLTLFEDREMIEERLKTYAHLFDDKVMKQLKRRRYTGWGRLSRKLINGIRDKQSGKTILDFLKSDGFANRNFMQLIHDDSLTFKEDIQKAQVSGQGDSLHEHIANLAGSPAIKKGILQTVKVVDELVKVMGRHKPENIVIEMARENQTTQKGQKNSRERMKRIEEGIKELGSQILKEHPVENTQLQNEKLYLYYLQNGRDMYVDQELDINRLSDYDVDHIVPQSFLKDDSIDNKVLTRSDKARGKSDNVPSEEVVKKMKNYWRQLLNAKLITQRKFDNLTKAERGGLSELDKAGFIKRQLVETRQITKHVAQILDSRMNTKYDENDKLIREVKVITLKSKLVSDFRKDFQFYKVREINNYHHAHDAYLNAVVGTALIKKYPKLESEFVYGDYKVYDVRKMIAKSEQEIGKATAKYFFYSNIMNFFKTEITLANGEIRKRPLIETNGETGEIVWDKGRDFATVRKVLSMPQVNIVKKTEVQTGGFSKESILPKRNSDKLIARKKDWDPKKYGGFDSPTVAYSVLVVAKVEKGKSKKLKSVKELLGITIMERSSFEKNPIDFLEAKGYKEVKKDLIIKLPKYSLFELENGRKRMLASAGELQKGNELALPSKYVNFLYLASHYEKLKGSPEDNEQKQLFVEQHKHYLDEIIEQISEFSKRVILADANLDKVLSAYNKHRDKPIREQAENIIHLFTLTNLGAPAAFKYFDTTIDRKRYTSTKEVLDATLIHQSITGLYETRIDLSQLGGDGGGGGGSSGGSGGTLNIEDEYRLHETSKEPDVPLGSTWLSDFPQAWAETGGMGLAVRQAPLIIPLKATSTPVSIKQYPMSQEARLGIKPHIQRLLDQGILVPCQSPWNTPLLPVKKPGTNDYRPVQDLREVNKRVEDIHPTVPNPYNLLSGLPPSHQWYTVLDLKDAFFCLRLHPTSQPLFAFEWRDPEMGISGQLTWTRLPQGFKNSPTLFNEALHRDLADFRIQHPDLILLQYVDDLLLAATSEQDCQRGTRALLQTLGNLGYRASAKKAQICQKQVKYLGYLLKEGQRWLTEARKETVMGQPTPKTPRQLREFLGTAGFCRLWIPGFAEMAAPLYPLTKPGTLFNWGPDQQKAYQEIKQALLTAPALGLPDLTKPFELFVDEKQGYAKGVLTQKLGPWRRPVAYLSKKLDPVAAGWPPCLRMVAAIAVLTKDAGKLTMGQPLVILAPHAVEALVKQPPDRWLSNARMTHYQAMLLDTDRVQFGPVVALNPATLLPLPEKEAPHDCLEILAETHGTRPDLTDQPIPDADYTWYTDGSSFLQEGQRRAGAAVTTETEVIWARALPAGTSAQRAELIALTQALKMAEGKKLNVYTDSRYAFATAHVHGEIYRRRGWLTSEGREIKNKNEILALLKALFLPKRLSIIHCPGHQKGNSAEARGNRMADQAAREAAMKAVLETSTLLAGKRTADGSEFEKRTADGSEFESPKKKAKVE

SEQ ID NO: 6856 - protein, 2171 aa, synthetic construct
MPAAKRVKLDGGDKKYSIGLDIGTNSVGWAVITDEYKVPSKKFKVLGNTDRHSIKKNLIGALLFDSGETAEATRLKRTARRRYTRRKNRICYLQEIFSNEMAKVDDSFFHRLEESFLVEEDKKHERHPIFGNIVDEVAYHEKYPTIYHLRKKLVDSTDKADLRLIYLALAHMIKFRGHFLIEGDLNPDNSDVDKLFIQLVQTYNQLFEENPINASGVDAKAILSARLSKSRRLENLIAQLPGEKKNGLFGNLIALSLGLTPNFKSNFDLAEDAKLQLSKDTYDDDLDNLLAQIGDQYADLFLAAKNLSDAILLSDILRVNTEITKAPLSASMIKRYDEHHQDLTLLKALVRQQLPEKYKEIFFDQSKNGYAGYIDGGASQEEFYKFIKPILEKMDGTEELLVKLNREDLLRKQRTFDNGSIPHQIHLGELHAILRRQEDFYPFLKDNREKIEKILTFRIPYYVGPLARGNSRFAWMTRKSEETITPWNFEEVVDKGASAQSFIERMTNFDKNLPNEKVLPKHSLLYEYFTVYNELTKVKYVTEGMRKPAFLSGEQKKAIVDLLFKTNRKVTVKQLKEDYFKKIECFDSVEISGVEDRFNASLGTYHDLLKIIKDKDFLDNEENEDILEDIVLTLTLFEDREMIEERLKTYAHLFDDKVMKQLKRRRYTGWGRLSRKLINGIRDKQSGKTILDFLKSDGFANRNFMQLIHDDSLTFKEDIQKAQVSGQGDSLHEHIANLAGSPAIKKGILQTVKVVDELVKVMGRHKPENIVIEMARENQTTQKGQKNSRERMKRIEEGIKELGSQILKEHPVENTQLQNEKLYLYYLQNGRDMYVDQELDINRLSDYDVDHIVPQSFLKDDSIDNKVLTRSDKARGKSDNVPSEEVVKKMKNYWRQLLNAKLITQRKFDNLTKAERGGLSELDKAGFIKRQLVETRQITKHVAQILDSRMNTKYDENDKLIREVKVITLKSKLVSDFRKDFQFYKVREINNYHHAHDAYLNAVVGTALIKKYPKLESEFVYGDYKVYDVRKMIAKSEQEIGKATAKYFFYSNIMNFFKTEITLANGEIRKRPLIETNGETGEIVWDKGRDFATVRKVLSMPQVNIVKKTEVQTGGFSKESILPKRNSDKLIARKKDWDPKKYGGFDSPTVAYSVLVVAKVEKGKSKKLKSVKELLGITIMERSSFEKNPIDFLEAKGYKEVKKDLIIKLPKYSLFELENGRKRMLASAGELQKGNELALPSKYVNFLYLASHYEKLKGSPEDNEQKQLFVEQHKHYLDEIIEQISEFSKRVILADANLDKVLSAYNKHRDKPIREQAENIIHLFTLTNLGAPAAFKYFDTTIDRKRYTSTKEVLDATLIHQSITGLYETRIDLSQLGGDGGGSSGGSGGGGGMDLLKPLTVERKGVKIKGYWNSQADITCVPKDLLQGEEPVRQQNVTTIHGTQEGDVYYVNLKIDGRRINTEVIGTTLDYAIITPGDVPWILKKPLELTIKLDLEEQQGTLLNNSILSKKGKEELKQLFEKYSALWQSWENQVGHRRIRPHKIATGTVKPTPQKQYHINPKAKPDIQIVINDLLKQGVLIQKESTMNTPVYPVPKPNGRWRMVLDYRAVNKVTPLIAVQNQHSYGILGSLFKGRYKTTIDLSNGFWAHPIVPEDYWITAFTWQGKQYCWTVLPQGFLNSPGLFTGDVVDLLQGIPNVEVYVDDVYISHDSEKEHLEYLDILFNRLKEAGYIISLKKSNIANSIVDFLGFQITNEGRGLTDTFKEKLENITAPTTLKQLQSILGLLNFARNFIPDFTELIAPLYALIPKSTKNYVPWQIEHSTTLETLITKLNGAEYLQGRKGDKTLIMKVNASYTTGYIRYYNEGEKKPISYVSIVFSKTELKFTELEKLLTTVHKGLLKALDLSMGQNIHVYSPIVSMQNIQKTPQTAKKALASRWLSWLSYLEDPRIRFFYDPQMPALKDLPAVDTGKDNKKHPSNFQHIFYTDGSAITSPTKEGHLNAGMGIVYFINKDGNLQKQQEWSISLGNHTAQFAEIAAFEFALKKCLPLGGNILVVTDSNYVAKAYNEELDVWASNGFVNNRKKPLKHISKWKSVADLKRLRPDVVVTHEPGHQKLDSSPHAYGNNLADQLATQASFKVHAGKRTADGSEFEKRTADGSEFESPKKKAKVE

SEQ ID NO: 6857 - protein, 2093 aa, synthetic construct
MPAAKRVKLDGGDKKYSIGLDIGTNSVGWAVITDEYKVPSKKFKVLGNTDRHSIKKNLIGALLFDSGETAEATRLKRTARRRYTRRKNRICYLQEIFSNEMAKVDDSFFHRLEESFLVEEDKKHERHPIFGNIVDEVAYHEKYPTIYHLRKKLVDSTDKADLRLIYLALAHMIKFRGHFLIEGDLNPDNSDVDKLFIQLVQTYNQLFEENPINASGVDAKAILSARLSKSRRLENLIAQLPGEKKNGLFGNLIALSLGLTPNFKSNFDLAEDAKLQLSKDTYDDDLDNLLAQIGDQYADLFLAAKNLSDAILLSDILRVNTEITKAPLSASMIKRYDEHHQDLTLLKALVRQQLPEKYKEIFFDQSKNGYAGYIDGGASQEEFYKFIKPILEKMDGTEELLVKLNREDLLRKQRTFDNGSIPHQIHLGELHAILRRQEDFYPFLKDNREKIEKILTFRIPYYVGPLARGNSRFAWMTRKSEETITPWNFEEVVDKGASAQSFIERMTNFDKNLPNEKVLPKHSLLYEYFTVYNELTKVKYVTEGMRKPAFLSGEQKKAIVDLLFKTNRKVTVKQLKEDYFKKIECFDSVEISGVEDRFNASLGTYHDLLKIIKDKDFLDNEENEDILEDIVLTLTLFEDREMIEERLKTYAHLFDDKVMKQLKRRRYTGWGRLSRKLINGIRDKQSGKTILDFLKSDGFANRNFMQLIHDDSLTFKEDIQKAQVSGQGDSLHEHIANLAGSPAIKKGILQTVKVVDELVKVMGRHKPENIVIEMARENQTTQKGQKNSRERMKRIEEGIKELGSQILKEHPVENTQLQNEKLYLYYLQNGRDMYVDQELDINRLSDYDVDHIVPQSFLKDDSIDNKVLTRSDKARGKSDNVPSEEVVKKMKNYWRQLLNAKLITQRKFDNLTKAERGGLSELDKAGFIKRQLVETRQITKHVAQILDSRMNTKYDENDKLIREVKVITLKSKLVSDFRKDFQFYKVREINNYHHAHDAYLNAVVGTALIKKYPKLESEFVYGDYKVYDVRKMIAKSEQEIGKATAKYFFYSNIMNFFKTEITLANGEIRKRPLIETNGETGEIVWDKGRDFATVRKVLSMPQVNIVKKTEVQTGGFSKESILPKRNSDKLIARKKDWDPKKYGGFDSPTVAYSVLVVAKVEKGKSKKLKSVKELLGITIMERSSFEKNPIDFLEAKGYKEVKKDLIIKLPKYSLFELENGRKRMLASAGELQKGNELALPSKYVNFLYLASHYEKLKGSPEDNEQKQLFVEQHKHYLDEIIEQISEFSKRVILADANLDKVLSAYNKHRDKPIREQAENIIHLFTLTNLGAPAAFKYFDTTIDRKRYTSTKEVLDATLIHQSITGLYETRIDLSQLGGDGGGSSGGSGGGGGTLQLEEEYRLFEPESTQKQEMDIWLKNFPQAWAETGGMGTAHCQAPVLIQLKATATPISIRQYPMPHEAYQGIKPHIRRMLDQGILKPCQSPWNTPLLPVKKPGTEDYRPVQDLREVNKRVEDIHPTVPNPYNLLSTLPPSHPWYTVLDLKDAFFCLRLHSESQLLFAFEWRDPEIGLSGQLTWTRLPQGFKNSPTLFNEALHSDLADFRVRYPALVLLQYVDDLLLAAATRTECLEGTKALLETLGNKGYRASAKKAQICLQEVTYLGYSLKDGQRWLTKARKEAILSIPVPKNSRQVREFLGKAGYCRLFIPGFAELAAPLYPLTRPGTLFQWGTEQQLAFEDIKKALLSSPALGLPDITKPFELFIDENSGFAKGVLVQKLGPWKRPVAYLSKKLDTVASGWPPCLRMVAAIAILVKDAGKLTLGQPLTILTSHPVEALVRQPPNKWLSNARMTHYQAMLLDAERVHFGPTVSLNPATLLPLPSGGNHHDCLQILAETHGTRPDLTDQPLPDADLTWYTDGSSFIRNGEREAGAAVTTESEVIWAAPLPPGTSAQRAELIALTQALKMAEGKKLTVYTDSRYAFATTHVHGEIYRRRGWLTSEGKEIKNKNEILALLEALFLPKRLSIIHCPGHQKGDSPQAKGNRLADDTAKKAATETHSSLTVLPAGKRTADGSEFEKRTADGSEFESPKKKAKVE

SEQ ID NO: 6858 - protein, 2216 aa, synthetic construct
MPAAKRVKLDGGDKKYSIGLDIGTNSVGWAVITDEYKVPSKKFKVLGNTDRHSIKKNLIGALLFDSGETAEATRLKRTARRRYTRRKNRICYLQEIFSNEMAKVDDSFFHRLEESFLVEEDKKHERHPIFGNIVDEVAYHEKYPTIYHLRKKLVDSTDKADLRLIYLALAHMIKFRGHFLIEGDLNPDNSDVDKLFIQLVQTYNQLFEENPINASGVDAKAILSARLSKSRRLENLIAQLPGEKKNGLFGNLIALSLGLTPNFKSNFDLAEDAKLQLSKDTYDDDLDNLLAQIGDQYADLFLAAKNLSDAILLSDILRVNTEITKAPLSASMIKRYDEHHQDLTLLKALVRQQLPEKYKEIFFDQSKNGYAGYIDGGASQEEFYKFIKPILEKMDGTEELLVKLNREDLLRKQRTFDNGSIPHQIHLGELHAILRRQEDFYPFLKDNREKIEKILTFRIPYYVGPLARGNSRFAWMTRKSEETITPWNFEEVVDKGASAQSFIERMTNFDKNLPNEKVLPKHSLLYEYFTVYNELTKVKYVTEGMRKPAFLSGEQKKAIVDLLFKTNRKVTVKQLKEDYFKKIECFDSVEISGVEDRFNASLGTYHDLLKIIKDKDFLDNEENEDILEDIVLTLTLFEDREMIEERLKTYAHLFDDKVMKQLKRRRYTGWGRLSRKLINGIRDKQSGKTILDFLKSDGFANRNFMQLIHDDSLTFKEDIQKAQVSGQGDSLHEHIANLAGSPAIKKGILQTVKVVDELVKVMGRHKPENIVIEMARENQTTQKGQKNSRERMKRIEEGIKELGSQILKEHPVENTQLQNEKLYLYYLQNGRDMYVDQELDINRLSDYDVDHIVPQSFLKDDSIDNKVLTRSDKARGKSDNVPSEEVVKKMKNYWRQLLNAKLITQRKFDNLTKAERGGLSELDKAGFIKRQLVETRQITKHVAQILDSRMNTKYDENDKLIREVKVITLKSKLVSDFRKDFQFYKVREINNYHHAHDAYLNAVVGTALIKKYPKLESEFVYGDYKVYDVRKMIAKSEQEIGKATAKYFFYSNIMNFFKTEITLANGEIRKRPLIETNGETGEIVWDKGRDFATVRKVLSMPQVNIVKKTEVQTGGFSKESILPKRNSDKLIARKKDWDPKKYGGFDSPTVAYSVLVVAKVEKGKSKKLKSVKELLGITIMERSSFEKNPIDFLEAKGYKEVKKDLIIKLPKYSLFELENGRKRMLASAGELQKGNELALPSKYVNFLYLASHYEKLKGSPEDNEQKQLFVEQHKHYLDEIIEQISEFSKRVILADANLDKVLSAYNKHRDKPIREQAENIIHLFTLTNLGAPAAFKYFDTTIDRKRYTSTKEVLDATLIHQSITGLYETRIDLSQLGGDGGGSSGGSGGGGGTLGDQGSRGSDPLPEPRVTLTVEGIPTEFLVNTGAEHSVLTKPMGKMGSKRTVVAGATGSKVYPWTTKRLLKIGQKQVTHSFLVIPECPAPLLGRDLLTKLKAQIQFSTEGPQVTWEDRPAMCLVLNLEEEYRLHEKPVPPSIDPSWLQLFPMVWAEKAGMGLANQVPPVVVELKSDASPVAVRQYPMSKEAREGIRPHIQRFLDLGILVPCQSPWNTPLLPVKKPGTNDYRPVQDLREVNKRVQDIHPTVPNPYNLLSSLPPSHTWYSVLDLKDAFFCLKLHPNSQPLFAFEWRDPEKGNTGQLTWTRLPQGFKNSPTLFDEALHRDLASFRALNPQVVMLQYVDDLLVAAPTYRDCKEGTRRLLQELSKLGYRVSAKKAQLCREEVTYLGYLLKGGKRWLTPARKATVMKIPTPTTPRQVREFLGTAGFCRLWIPGFASLAAPLYPLTREKVPFTWTEAHQEAFGRIKEALLSAPALALPDLTKPFALYVDEKEGVARGVLTQTLGPWRRPVAYLSKKLDPVASGWPTCLKAIAAVALLLKDADKLTLGQNVLVIAPHNLESIVRQPPDRWMTNARMTHYQSLLLNERVSFAPPAILNPATLLPVESDDTPIHICSEILAEETGTRPDLRDQPLPGVPAWYTDGSSFIMDGRRQAGAAIVDNKRTVWASNLPEGTSAQKAELIALTQALRLAEGKSINIYTDSRYAFATAHVHGAIYKQRGLLTSAGKDIKNKEEILALLEAIHLPKRVAIIHCPGHQRGTDPVATGNRKADEAAKQAAQSTRILTETTKNAGKRTADGSEFEKRTADGSEFESPKKKAKVE

SEQ ID NO: 6859 - protein, 2125 aa, synthetic construct
MPAAKRVKLDGGDKKYSIGLDIGTNSVGWAVITDEYKVPSKKFKVLGNTDRHSIKKNLIGALLFDSGETAEATRLKRTARRRYTRRKNRICYLQEIFSNEMAKVDDSFFHRLEESFLVEEDKKHERHPIFGNIVDEVAYHEKYPTIYHLRKKLVDSTDKADLRLIYLALAHMIKFRGHFLIEGDLNPDNSDVDKLFIQLVQTYNQLFEENPINASGVDAKAILSARLSKSRRLENLIAQLPGEKKNGLFGNLIALSLGLTPNFKSNFDLAEDAKLQLSKDTYDDDLDNLLAQIGDQYADLFLAAKNLSDAILLSDILRVNTEITKAPLSASMIKRYDEHHQDLTLLKALVRQQLPEKYKEIFFDQSKNGYAGYIDGGASQEEFYKFIKPILEKMDGTEELLVKLNREDLLRKQRTFDNGSIPHQIHLGELHAILRRQEDFYPFLKDNREKIEKILTFRIPYYVGPLARGNSRFAWMTRKSEETITPWNFEEVVDKGASAQSFIERMTNFDKNLPNEKVLPKHSLLYEYFTVYNELTKVKYVTEGMRKPAFLSGEQKKAIVDLLFKTNRKVTVKQLKEDYFKKIECFDSVEISGVEDRFNASLGTYHDLLKIIKDKDFLDNEENEDILEDIVLTLTLFEDREMIEERLKTYAHLFDDKVMKQLKRRRYTGWGRLSRKLINGIRDKQSGKTILDFLKSDGFANRNFMQLIHDDSLTFKEDIQKAQVSGQGDSLHEHIANLAGSPAIKKGILQTVKVVDELVKVMGRHKPENIVIEMARENQTTQKGQKNSRERMKRIEEGIKELGSQILKEHPVENTQLQNEKLYLYYLQNGRDMYVDQELDINRLSDYDVDHIVPQSFLKDDSIDNKVLTRSDKARGKSDNVPSEEVVKKMKNYWRQLLNAKLITQRKFDNLTKAERGGLSELDKAGFIKRQLVETRQITKHVAQILDSRMNTKYDENDKLIREVKVITLKSKLVSDFRKDFQFYKVREINNYHHAHDAYLNAVVGTALIKKYPKLESEFVYGDYKVYDVRKMIAKSEQEIGKATAKYFFYSNIMNFFKTEITLANGEIRKRPLIETNGETGEIVWDKGRDFATVRKVLSMPQVNIVKKTEVQTGGFSKESILPKRNSDKLIARKKDWDPKKYGGFDSPTVAYSVLVVAKVEKGKSKKLKSVKELLGITIMERSSFEKNPIDFLEAKGYKEVKKDLIIKLPKYSLFELENGRKRMLASAGELQKGNELALPSKYVNFLYLASHYEKLKGSPEDNEQKQLFVEQHKHYLDEIIEQISEFSKRVILADANLDKVLSAYNKHRDKPIREQAENIIHLFTLTNLGAPAAFKYFDTTIDRKRYTSTKEVLDATLIHQSITGLYETRIDLSQLGGDGGGSSGGSGGGGGLLGRDLLTKLKAQIQFSTEGPQVTWEDRPAMCLVLNLEEEYRLHEKPVPPSIDPSWLQLFPMVWAEKAGMGLANQVPPVVVELKSDASPVAVRQYPMSKEAREGIRPHIQRFLDLGILVPCQSPWNTPLLPVKKPGTNDYRPVQDLREVNKRVQDIHPTVPNPYNLLSSLPPSHTWYSVLDLKDAFFCLKLHPNSQPLFAFEWRDPEKGNTGQLTWTRLPQGFKNSPTLFNEALHRDLASFRALNPQVVMLQYVDDLLVAAPTYRDCKEGTRRLLQELSKLGYRVSAKKAQLCREEVTYLGYLLKGGKRWLTPARKATVMKIPTPTTPRQVREFLGTAGFCRLWIPGFASLAAPLYPLTRPKVPFTWTEAHQEAFGRIKEALLSAPALALPDLTKPFALYVDEKEGVARGVLTQTLGPWRRPVAYLSKKLDPVASGWPTCLKAIAAVALLLKDADKLTLGQNVLVIAPHNLESIVRQPPDRWMTNARMTHYQSLLLNERVSFAPPAILNPATLLPVESDDTPIHICSEILAEETGTRPDLRDQPLPGVPAWYTDGSSFIMDGRRQAGAAIVDNKRTVWASNLPEGTSAQKAELIALTQALRLAEGKSINIYTDSRYAFATAHVHGAIYKQRGWLTSAGKDIKNKEEILALLEAIHLPKRVAIIHCPGHQRGTDPVATGNRKADEAAKQAAQSTRILTETTKNAGKRTADGSEFEKRTADGSEFESPKKKAKVE

SEQ ID NO: 6860 - protein, 2125 aa, synthetic construct
MPAAKRVKLDGGDKKYSIGLDIGTNSVGWAVITDEYKVPSKKFKVLGNTDRHSIKKNLIGALLFDSGETAEATRLKRTARRRYTRRKNRICYLQEIFSNEMAKVDDSFFHRLEESFLVEEDKKHERHPIFGNIVDEVAYHEKYPTIYHLRKKLVDSTDKADLRLIYLALAHMIKFRGHFLIEGDLNPDNSDVDKLFIQLVQTYNQLFEENPINASGVDAKAILSARLSKSRRLENLIAQLPGEKKNGLFGNLIALSLGLTPNFKSNFDLAEDAKLQLSKDTYDDDLDNLLAQIGDQYADLFLAAKNLSDAILLSDILRVNTEITKAPLSASMIKRYDEHHQDLTLLKALVRQQLPEKYKEIFFDQSKNGYAGYIDGGASQEEFYKFIKPILEKMDGTEELLVKLNREDLLRKQRTFDNGSIPHQIHLGELHAILRRQEDFYPFLKDNREKIEKILTFRIPYYVGPLARGNSRFAWMTRKSEETITPWNFEEVVDKGASAQSFIERMTNFDKNLPNEKVLPKHSLLYEYFTVYNELTKVKYVTEGMRKPAFLSGEQKKAIVDLLFKTNRKVTVKQLKEDYFKKIECFDSVEISGVEDRFNASLGTYHDLLKIIKDKDFLDNEENEDILEDIVLTLTLFEDREMIEERLKTYAHLFDDKVMKQLKRRRYTGWGRLSRKLINGIRDKQSGKTILDFLKSDGFANRNFMQLIHDDSLTFKEDIQKAQVSGQGDSLHEHIANLAGSPAIKKGILQTVKVVDELVKVMGRHKPENIVIEMARENQTTQKGQKNSRERMKRIEEGIKELGSQILKEHPVENTQLQNEKLYLYYLQNGRDMYVDQELDINRLSDYDVDHIVPQSFLKDDSIDNKVLTRSDKARGKSDNVPSEEVVKKMKNYWRQLLNAKLITQRKFDNLTKAERGGLSELDKAGFIKRQLVETRQITKHVAQILDSRMNTKYDENDKLIREVKVITLKSKLVSDFRKDFQFYKVREINNYHHAHDAYLNAVVGTALIKKYPKLESEFVYGDYKVYDVRKMIAKSEQEIGKATAKYFFYSNIMNFFKTEITLANGEIRKRPLIETNGETGEIVWDKGRDFATVRKVLSMPQVNIVKKTEVQTGGFSKESILPKRNSDKLIARKKDWDPKKYGGFDSPTVAYSVLVVAKVEKGKSKKLKSVKELLGITIMERSSFEKNPIDFLEAKGYKEVKKDLIIKLPKYSLFELENGRKRMLASAGELQKGNELALPSKYVNFLYLASHYEKLKGSPEDNEQKQLFVEQHKHYLDEIIEQISEFSKRVILADANLDKVLSAYNKHRDKPIREQAENIIHLFTLTNLGAPAAFKYFDTTIDRKRYTSTKEVLDATLIHQSITGLYETRIDLSQLGGDGGGSSGGSGGGGGLLGRDLLTKLKAQIQFSTEGPQVTWEDRPAMCLVLNLEEEYRLHEKPVPPSIDPSWLQLFPMVWAEKAGMGLANQVPPVVVELKSDASPVAVRQYPMSKEAREGIRPHIQRFLDLGILVPCQSPWNTPLLPVKKPGTNDYRPVQDLREVNKRVQDIHPTVPNPYNLLSSLPPSHTWYSVLDLKDAFFCLKLHPNSQPLFAFEWRDPEKGNTGQLTWTRLPQGFKNSPTLFNEALHRDLASFRALNPQVVMLQYVDDLLVAAPTYRDCKEGTRRLLQELSKLGYRVSAKKAQLCREEVTYLGYLLKGGKRWLTPARKATVMKIPTPTTPRQVREFLGKAGFCRLFIPGFASLAAPLYPLTRPKVPFTWTEAHQEAFGRIKEALLSAPALALPDLTKPFALYVDEKEGVARGVLTQTLGPWRRPVAYLSKKLDPVASGWPTCLKAIAAVALLLKDADKLTLGQNVLVIAPHNLESIVRQPPDRWMTNARMTHYQSLLLNERVSFAPPAILNPATLLPVESDDTPIHICSEILAEETGTRPDLRDQPLPGVPAWYTDGSSFIMDGRRQAGAAIVDNKRTVWASNLPEGTSAQKAELIALTQALRLAEGKSINIYTDSRYAFATAHVHGAIYKQRGWLTSAGKDIKNKEEILALLEAIHLPKRVAIIHCPGHQRGTDPVATGNRKADEAAKQAAQSTRILTETTKNAGKRTADGSEFEKRTADGSEFESPKKKAKVE

SEQ ID NO: 6861 - protein, 2216 aa, synthetic construct
MPAAKRVKLDGGDKKYSIGLDIGTNSVGWAVITDEYKVPSKKFKVLGNTDRHSIKKNLIGALLFDSGETAEATRLKRTARRRYTRRKNRICYLQEIFSNEMAKVDDSFFHRLEESFLVEEDKKHERHPIFGNIVDEVAYHEKYPTIYHLRKKLVDSTDKADLRLIYLALAHMIKFRGHFLIEGDLNPDNSDVDKLFIQLVQTYNQLFEENPINASGVDAKAILSARLSKSRRLENLIAQLPGEKKNGLFGNLIALSLGLTPNFKSNFDLAEDAKLQLSKDTYDDDLDNLLAQIGDQYADLFLAAKNLSDAILLSDILRVNTEITKAPLSASMIKRYDEHHQDLTLLKALVRQQLPEKYKEIFFDQSKNGYAGYIDGGASQEEFYKFIKPILEKMDGTEELLVKLNREDLLRKQRTFDNGSIPHQIHLGELHAILRRQEDFYPFLKDNREKIEKILTFRIPYYVGPLARGNSRFAWMTRKSEETITPWNFEEVVDKGASAQSFIERMTNFDKNLPNEKVLPKHSLLYEYFTVYNELTKVKYVTEGMRKPAFLSGEQKKAIVDLLFKTNRKVTVKQLKEDYFKKIECFDSVEISGVEDRFNASLGTYHDLLKIIKDKDFLDNEENEDILEDIVLTLTLFEDREMIEERLKTYAHLFDDKVMKQLKRRRYTGWGRLSRKLINGIRDKQSGKTILDFLKSDGFANRNFMQLIHDDSLTFKEDIQKAQVSGQGDSLHEHIANLAGSPAIKKGILQTVKVVDELVKVMGRHKPENIVIEMARENQTTQKGQKNSRERMKRIEEGIKELGSQILKEHPVENTQLQNEKLYLYYLQNGRDMYVDQELDINRLSDYDVDHIVPQSFLKDDSIDNKVLTRSDKARGKSDNVPSEEVVKKMKNYWRQLLNAKLITQRKFDNLTKAERGGLSELDKAGFIKRQLVETRQITKHVAQILDSRMNTKYDENDKLIREVKVITLKSKLVSDFRKDFQFYKVREINNYHHAHDAYLNAVVGTALIKKYPKLESEFVYGDYKVYDVRKMIAKSEQEIGKATAKYFFYSNIMNFFKTEITLANGEIRKRPLIETNGETGEIVWDKGRDFATVRKVLSMPQVNIVKKTEVQTGGFSKESILPKRNSDKLIARKKDWDPKKYGGFDSPTVAYSVLVVAKVEKGKSKKLKSVKELLGITIMERSSFEKNPIDFLEAKGYKEVKKDLIIKLPKYSLFELENGRKRMLASAGELQKGNELALPSKYVNFLYLASHYEKLKGSPEDNEQKQLFVEQHKHYLDEIIEQISEFSKRVILADANLDKVLSAYNKHRDKPIREQAENIIHLFTLTNLGAPAAFKYFDTTIDRKRYTSTKEVLDATLIHQSITGLYETRIDLSQLGGDGGGSSGGSGGGGGTLGDQGSRGSDPLPEPRVTLTVEGIPTEFLVNTGAEHSVLTKPMGKMGSKRTVVAGATGSKVYPWTTKRLLKIGQKQVTHSFLVIPECPAPLLGRDLLTKLKAQIQFSTEGPQVTWEDRPAMCLVLNLEEEYRLHEKPVPPSIDPSWLQLFPMVWAEKAGMGLANQVPPVVVELKSDASPVAVRQYPMSKEAREGIRPHIQRFLDLGILVPCQSPWNTPLLPVKKPGTNDYRPVQDLREVNKRVQDIHPTVPNPYNLLSSLPPSHTWYSVLDLKDAFFCLKLHPNSQPLFAFEWRDPEKGNTGQLTWTRLPQGFKNSPTLFNEALHRDLASFRALNPQVVMLQYVDDLLVAAPTYRDCKEGTRRLLQELSKLGYRVSAKKAQLCREEVTYLGYLLKGGKRWLTPARKATVMKIPTPTTPRQVREFLGTAGFCRLWIPGFASLAAPLYPLTRPKVPFTWTEAHQEAFGRIKEALLSAPALALPDLTKPFALYVDEKEGVARGVLTQTLGPWRRPVAYLSKKLDPVASGWPTCLKAIAAVALLLKDADKLTLGQNVLVIAPHNLESIVRQPPDRWMTNARMTHYQSLLLNERVSFAPPAILNPATLLPVESDDTPIHICSEILAEETGTRPDLRDQPLPGVPAWYTDGSSFIMDGRRQAGAAIVDNKRTVWASNLPEGTSAQKAELIALTQALRLAEGKSINIYTDSRYAFATAHVHGAIYKQRGWLTSAGKDIKNKEEILALLEAIHLPKRVAIIHCPGHQRGTDPVATGNRKADEAAKQAAQSTRILTETTKNAGKRTADGSEFEKRTADGSEFESPKKKAKVE

SEQ ID NO: 6862 - protein, 2216 aa, synthetic construct
MPAAKRVKLDGGDKKYSIGLDIGTNSVGWAVITDEYKVPSKKFKVLGNTDRHSIKKNLIGALLFDSGETAEATRLKRTARRRYTRRKNRICYLQEIFSNEMAKVDDSFFHRLEESFLVEEDKKHERHPIFGNIVDEVAYHEKYPTIYHLRKKLVDSTDKADLRLIYLALAHMIKFRGHFLIEGDLNPDNSDVDKLFIQLVQTYNQLFEENPINASGVDAKAILSARLSKSRRLENLIAQLPGEKKNGLFGNLIALSLGLTPNFKSNFDLAEDAKLQLSKDTYDDDLDNLLAQIGDQYADLFLAAKNLSDAILLSDILRVNTEITKAPLSASMIKRYDEHHQDLTLLKALVRQQLPEKYKEIFFDQSKNGYAGYIDGGASQEEFYKFIKPILEKMDGTEELLVKLNREDLLRKQRTFDNGSIPHQIHLGELHAILRRQEDFYPFLKDNREKIEKILTFRIPYYVGPLARGNSRFAWMTRKSEETITPWNFEEVVDKGASAQSFIERMTNFDKNLPNEKVLPKHSLLYEYFTVYNELTKVKYVTEGMRKPAFLSGEQKKAIVDLLFKTNRKVTVKQLKEDYFKKIECFDSVEISGVEDRFNASLGTYHDLLKIIKDKDFLDNEENEDILEDIVLTLTLFEDREMIEERLKTYAHLFDDKVMKQLKRRRYTGWGRLSRKLINGIRDKQSGKTILDFLKSDGFANRNFMQLIHDDSLTFKEDIQKAQVSGQGDSLHEHIANLAGSPAIKKGILQTVKVVDELVKVMGRHKPENIVIEMARENQTTQKGQKNSRERMKRIEEGIKELGSQILKEHPVENTQLQNEKLYLYYLQNGRDMYVDQELDINRLSDYDVDHIVPQSFLKDDSIDNKVLTRSDKARGKSDNVPSEEVVKKMKNYWRQLLNAKLITQRKFDNLTKAERGGLSELDKAGFIKRQLVETRQITKHVAQILDSRMNTKYDENDKLIREVKVITLKSKLVSDFRKDFQFYKVREINNYHHAHDAYLNAVVGTALIKKYPKLESEFVYGDYKVYDVRKMIAKSEQEIGKATAKYFFYSNIMNFFKTEITLANGEIRKRPLIETNGETGEIVWDKGRDFATVRKVLSMPQVNIVKKTEVQTGGFSKESILPKRNSDKLIARKKDWDPKKYGGFDSPTVAYSVLVVAKVEKGKSKKLKSVKELLGITIMERSSFEKNPIDFLEAKGYKEVKKDLIIKLPKYSLFELENGRKRMLASAGELQKGNELALPSKYVNFLYLASHYEKLKGSPEDNEQKQLFVEQHKHYLDEIIEQISEFSKRVILADANLDKVLSAYNKHRDKPIREQAENIIHLFTLTNLGAPAAFKYFDTTIDRKRYTSTKEVLDATLIHQSITGLYETRIDLSQLGGDGGGSSGGSGGGGGTLGDQGSRGSDPLPEPRVTLTVEGIPTEFLVNTGAEHSVLTKPMGKMGSKRTVVAGATGSKVYPWTTKRLLKIGQKQVTHSFLVIPECPAPLLGRDLLTKLKAQIQFSTEGPQVTWEDRPAMCLVLNLEEEYRLHEKPVPPSIDPSWLQLFPMVWAEKAGMGLANQVPPVVVELKSDASPVAVRQYPMSKEAREGIRPHIQRFLDLGILVPCQSPWNTPLLPVKKPGTNDYRPVQDLREVNKRVQDIHPTVPNPYNLLSSLPPSHTWYSVLDLKDAFFCLKLHPNSQPLFAFEWRDPEKGNTGQLTWTRLPQGFKNSPTLFNEALHRDLASFRALNPQVVMLQYVDDLLVAAPTYRDCKEGTRRLLQELSKLGYRVSAKKAQLCREEVTYLGYLLKGGKRWLTPARKATVMKIPTPTTPRQVREFLGKAGFCRLFIPGFASLAAPLYPLTRPKVPFTWTEAHQEAFGRIKEALLSAPALALPDLTKPFALYVDEKEGVARGVLTQTLGPWRRPVAYLSKKLDPVASGWPTCLKAIAAVALLLKDADKLTLGQNVLVIAPHNLESIVRQPPDRWMTNARMTHYQSLLLNERVSFAPPAILNPATLLPVESDDTPIHICSEILAEETGTRPDLRDQPLPGVPAWYTDGSSFIMDGRRQAGAAIVDNKRTVWASNLPEGTSAQKAELIALTQALRLAEGKSINIYTDSRYAFATAHVHGAIYKQRGWLTSAGKDIKNKEEILALLEAIHLPKRVAIIHCPGHQRGTDPVATGNRKADEAAKQAAQSTRILTETTKNAGKRTADGSEFEKRTADGSEFESPKKKAKVE

SEQ ID NO: 6863 - protein, 2094 aa, synthetic construct
MPAAKRVKLDGGDKKYSIGLDIGTNSVGWAVITDEYKVPSKKFKVLGNTDRHSIKKNLIGALLFDSGETAEATRLKRTARRRYTRRKNRICYLQEIFSNEMAKVDDSFFHRLEESFLVEEDKKHERHPIFGNIVDEVAYHEKYPTIYHLRKKLVDSTDKADLRLIYLALAHMIKFRGHFLIEGDLNPDNSDVDKLFIQLVQTYNQLFEENPINASGVDAKAILSARLSKSRRLENLIAQLPGEKKNGLFGNLIALSLGLTPNFKSNFDLAEDAKLQLSKDTYDDDLDNLLAQIGDQYADLFLAAKNLSDAILLSDILRVNTEITKAPLSASMIKRYDEHHQDLTLLKALVRQQLPEKYKEIFFDQSKNGYAGYIDGGASQEEFYKFIKPILEKMDGTEELLVKLNREDLLRKQRTFDNGSIPHQIHLGELHAILRRQEDFYPFLKDNREKIEKILTFRIPYYVGPLARGNSRFAWMTRKSEETITPWNFEEVVDKGASAQSFIERMTNFDKNLPNEKVLPKHSLLYEYFTVYNELTKVKYVTEGMRKPAFLSGEQKKAIVDLLFKTNRKVTVKQLKEDYFKKIECFDSVEISGVEDRFNASLGTYHDLLKIIKDKDFLDNEENEDILEDIVLTLTLFEDREMIEERLKTYAHLFDDKVMKQLKRRRYTGWGRLSRKLINGIRDKQSGKTILDFLKSDGFANRNFMQLIHDDSLTFKEDIQKAQVSGQGDSLHEHIANLAGSPAIKKGILQTVKVVDELVKVMGRHKPENIVIEMARENQTTQKGQKNSRERMKRIEEGIKELGSQILKEHPVENTQLQNEKLYLYYLQNGRDMYVDQELDINRLSDYDVDHIVPQSFLKDDSIDNKVLTRSDKARGKSDNVPSEEVVKKMKNYWRQLLNAKLITQRKFDNLTKAERGGLSELDKAGFIKRQLVETRQITKHVAQILDSRMNTKYDENDKLIREVKVITLKSKLVSDFRKDFQFYKVREINNYHHAHDAYLNAVVGTALIKKYPKLESEFVYGDYKVYDVRKMIAKSEQEIGKATAKYFFYSNIMNFFKTEITLANGEIRKRPLIETNGETGEIVWDKGRDFATVRKVLSMPQVNIVKKTEVQTGGFSKESILPKRNSDKLIARKKDWDPKKYGGFDSPTVAYSVLVVAKVEKGKSKKLKSVKELLGITIMERSSFEKNPIDFLEAKGYKEVKKDLIIKLPKYSLFELENGRKRMLASAGELQKGNELALPSKYVNFLYLASHYEKLKGSPEDNEQKQLFVEQHKHYLDEIIEQISEFSKRVILADANLDKVLSAYNKHRDKPIREQAENIIHLFTLTNLGAPAAFKYFDTTIDRKRYTSTKEVLDATLIHQSITGLYETRIDLSQLGGDGGGSSGGSGGGGGTLNLEDEYRLYETSAEPEVSPGSTWLSDFPQAWAETGGMGLAVRQAPLIIPLKATSTPVSIKQYPMSQEAKLGIKPHIQRLLDQGILVPCQSPWNTPLLPVKKPGTNDYRPVQDLREVNKRVEDIHPTVPNPYNLLSGLPPSHRWYTVLDLKDAFFCLRLHPTSQPLFAFEWRDPGMGISGQLTWTRLPQGFKNSPTLFNEALHRDLADFRIQHPDLILLQYVDDILLAATSELDCQQGTRALLLTLGNLGYRASAKKAQLCQKQVKYLGYLLKEGQRWLTEARKETVMGQPTPKTPRQLREFLGTAGFCRLWIPGFAEMAAPLYPLTKPGTLFNWGPDQQKAYQEIKQALLTAPALGLPDLTKPFELFVDEKQGYAKGVLTQKLGPWRRPVAYLSKKLDPVAAGWPPCLRMVAAIAVLRKDAGKLTMGQPLVILAPHAVEALVKQPPDRWLSNARMTHYQAMLLDTDRVQFGPVVALNPATLLPLPEEGAPHDCLEILAETHGTRPDLTDQPIPDADHTWYTDGSSFLQEGQRKAGAAVTTETEVIWARALPAGTSAQRAELIALTQALKMAEGKRLNVYTDSRYAFATAHIHGEIYRRRGWLTSEGREIKNKSEILALLKALFLPKRLSIIHCLGHQKGDSAEARGNRLADQAAREAAIKTPPDTSTLLAGKRTADGSEFEKRTADGSEFESPKKKAKVE

SEQ ID NO: 6864 - protein, 2094 aa, synthetic construct
MPAAKRVKLDGGDKKYSIGLDIGTNSVGWAVITDEYKVPSKKFKVLGNTDRHSIKKNLIGALLFDSGETAEATRLKRTARRRYTRRKNRICYLQEIFSNEMAKVDDSFFHRLEESFLVEEDKKHERHPIFGNIVDEVAYHEKYPTIYHLRKKLVDSTDKADLRLIYLALAHMIKFRGHFLIEGDLNPDNSDVDKLFIQLVQTYNQLFEENPINASGVDAKAILSARLSKSRRLENLIAQLPGEKKNGLFGNLIALSLGLTPNFKSNFDLAEDAKLQLSKDTYDDDLDNLLAQIGDQYADLFLAAKNLSDAILLSDILRVNTEITKAPLSASMIKRYDEHHQDLTLLKALVRQQLPEKYKEIFFDQSKNGYAGYIDGGASQEEFYKFIKPILEKMDGTEELLVKLNREDLLRKQRTFDNGSIPHQIHLGELHAILRRQEDFYPFLKDNREKIEKILTFRIPYYVGPLARGNSRFAWMTRKSEETITPWNFEEVVDKGASAQSFIERMTNFDKNLPNEKVLPKHSLLYEYFTVYNELTKVKYVTEGMRKPAFLSGEQKKAIVDLLFKTNRKVTVKQLKEDYFKKIECFDSVEISGVEDRFNASLGTYHDLLKIIKDKDFLDNEENEDILEDIVLTLTLFEDREMIEERLKTYAHLFDDKVMKQLKRRRYTGWGRLSRKLINGIRDKQSGKTILDFLKSDGFANRNFMQLIHDDSLTFKEDIQKAQVSGQGDSLHEHIANLAGSPAIKKGILQTVKVVDELVKVMGRHKPENIVIEMARENQTTQKGQKNSRERMKRIEEGIKELGSQILKEHPVENTQLQNEKLYLYYLQNGRDMYVDQELDINRLSDYDVDHIVPQSFLKDDSIDNKVLTRSDKARGKSDNVPSEEVVKKMKNYWRQLLNAKLITQRKFDNLTKAERGGLSELDKAGFIKRQLVETRQITKHVAQILDSRMNTKYDENDKLIREVKVITLKSKLVSDFRKDFQFYKVREINNYHHAHDAYLNAVVGTALIKKYPKLESEFVYGDYKVYDVRKMIAKSEQEIGKATAKYFFYSNIMNFFKTEITLANGEIRKRPLIETNGETGEIVWDKGRDFATVRKVLSMPQVNIVKKTEVQTGGFSKESILPKRNSDKLIARKKDWDPKKYGGFDSPTVAYSVLVVAKVEKGKSKKLKSVKELLGITIMERSSFEKNPIDFLEAKGYKEVKKDLIIKLPKYSLFELENGRKRMLASAGELQKGNELALPSKYVNFLYLASHYEKLKGSPEDNEQKQLFVEQHKHYLDEIIEQISEFSKRVILADANLDKVLSAYNKHRDKPIREQAENIIHLFTLTNLGAPAAFKYFDTTIDRKRYTSTKEVLDATLIHQSITGLYETRIDLSQLGGDGGGSSGGSGGGGGTLNIEDEHRLHETSKEPDVSLGSTWLSDFPQAWAETGGMGLAVRQAPLIIPLKATSTPVSIKQYPMSQEARLGIKPHIQRLLDQGILVPCQSPWNTPLLPVKKPGTNDYRPVQDLREVNKRVEDIHPTVPNPYNLLSGLPPSHQWYTVLDLKDAFFCLRLHPTSQPLFAFEWRDPEMGISGQLTWTRLPQGFKNSPTLFNEALHRDLADFRIQHPDLILLQYVDDLLLAATSELDCQQGTRALLQTLGNLGYRASAKKAQICQKQVKYLGYLLKEGQRWLTEARKETVMGQPTPKTPRQLREFLGTAGFCRLWIPGFAEMAAPLYPLTKPGTLFNWGPDQQKAYQEIKQALLTAPALGLPDLTKPFELFVDEKQGYAKGVLTQKLGPWRRPVAYLSKKLDPVAAGWPPCLRMVAAIAVLTKDAGKLTMGQPLVILAPHAVEALVKQPPDRWLSNARMTHYQALLLDTDRVQFGPVVALNPATLLPLPEEGLQHNCLDILAEAHGTRPDLTDQPLPDADHTWYTDGSSLLQEGQRKAGAAVTTETEVIWAKALPAGTSAQRAELIALTQALKMAEGKKLNVYTDSRYAFATAHIHGEIYRRRGWLTSEGKEIKNKDEILALLKALFLPKRLSIIHCPGHQKGHSAEARGNRMADQAARKAAITETPDTSTLLAGKRTADGSEFEKRTADGSEFESPKKKAKVE

SEQ ID NO: 6865 - protein, 2094 aa, synthetic construct
MPAAKRVKLDGGDKKYSIGLDIGTNSVGWAVITDEYKVPSKKFKVLGNTDRHSIKKNLIGALLFDSGETAEATRLKRTARRRYTRRKNRICYLQEIFSNEMAKVDDSFFHRLEESFLVEEDKKHERHPIFGNIVDEVAYHEKYPTIYHLRKKLVDSTDKADLRLIYLALAHMIKFRGHFLIEGDLNPDNSDVDKLFIQLVQTYNQLFEENPINASGVDAKAILSARLSKSRRLENLIAQLPGEKKNGLFGNLIALSLGLTPNFKSNFDLAEDAKLQLSKDTYDDDLDNLLAQIGDQYADLFLAAKNLSDAILLSDILRVNTEITKAPLSASMIKRYDEHHQDLTLLKALVRQQLPEKYKEIFFDQSKNGYAGYIDGGASQEEFYKFIKPILEKMDGTEELLVKLNREDLLRKQRTFDNGSIPHQIHLGELHAILRRQEDFYPFLKDNREKIEKILTFRIPYYVGPLARGNSRFAWMTRKSEETITPWNFEEVVDKGASAQSFIERMTNFDKNLPNEKVLPKHSLLYEYFTVYNELTKVKYVTEGMRKPAFLSGEQKKAIVDLLFKTNRKVTVKQLKEDYFKKIECFDSVEISGVEDRFNASLGTYHDLLKIIKDKDFLDNEENEDILEDIVLTLTLFEDREMIEERLKTYAHLFDDKVMKQLKRRRYTGWGRLSRKLINGIRDKQSGKTILDFLKSDGFANRNFMQLIHDDSLTFKEDIQKAQVSGQGDSLHEHIANLAGSPAIKKGILQTVKVVDELVKVMGRHKPENIVIEMARENQTTQKGQKNSRERMKRIEEGIKELGSQILKEHPVENTQLQNEKLYLYYLQNGRDMYVDQELDINRLSDYDVDHIVPQSFLKDDSIDNKVLTRSDKARGKSDNVPSEEVVKKMKNYWRQLLNAKLITQRKFDNLTKAERGGLSELDKAGFIKRQLVETRQITKHVAQILDSRMNTKYDENDKLIREVKVITLKSKLVSDFRKDFQFYKVREINNYHHAHDAYLNAVVGTALIKKYPKLESEFVYGDYKVYDVRKMIAKSEQEIGKATAKYFFYSNIMNFFKTEITLANGEIRKRPLIETNGETGEIVWDKGRDFATVRKVLSMPQVNIVKKTEVQTGGFSKESILPKRNSDKLIARKKDWDPKKYGGFDSPTVAYSVLVVAKVEKGKSKKLKSVKELLGITIMERSSFEKNPIDFLEAKGYKEVKKDLIIKLPKYSLFELENGRKRMLASAGELQKGNELALPSKYVNFLYLASHYEKLKGSPEDNEQKQLFVEQHKHYLDEIIEQISEFSKRVILADANLDKVLSAYNKHRDKPIREQAENIIHLFTLTNLGAPAAFKYFDTTIDRKRYTSTKEVLDATLIHQSITGLYETRIDLSQLGGDGGGSSGGSGGGGGTLNIEDEHRLHETSKEPDVSLGSTWLSDFPQAWAETGGMGLAVRQAPLIIPLKATSTPVSIKQYPMSQEARLGIKPHIQRLLDQGILVPCQSPWNTPLLPVKKPGTNDYRPVQDLREVNKRVEDIHPTVPNPYNLLSGLPPSHQWYTVLDLKDAFFCLRLHPTSQPLFAFEWRDPEMGISGQLTWTRLPQGFKNSPTLFDEALHRDLADFRIQHPDLILLQYVDDLLLAATSELDCQQGTRALLQTLGNLGYRASAKKAQICQKQVKYLGYLLKEGQRWLTEARKETVMGQPTPKTPRQLREFLGTAGFCRLWIPGFAEMAAPLYPLTKTGTLFNWGPDQQKAYQEIKQALLTAPALGLPDLTKPFELFVDEKQGYAKGVLTQKLGPWRRPVAYLSKKLDPVAAGWPPCLRMVAAIAVLTKDAGKLTMGQPLVILAPHAVEALVKQPPDRWLSNARMTHYQALLLDTDRVQFGPVVALNPATLLPLPEEGLQHNCLDILAEAHGTRPDLTDQPLPDADHTWYTDGSSLLQEGQRKAGAAVTTETEVIWAKALPAGTSAQRAELIALTQALKMAEGKKLNVYTDSRYAFATAHIHGEIYRRRGLLTSEGKEIKNKDEILALLKALFLPKRLSIIHCPGHQKGHSAEARGNRMADQAARKAAITETPDTSTLLAGKRTADGSEFEKRTADGSEFESPKKKAKVE

SEQ ID NO: 6866 - protein, 2094 aa, synthetic construct; identical to SEQ ID NO: 6864

SEQ ID NO: 6867 - protein, 2088 aa, synthetic construct
MPAAKRVKLDGGDKKYSIGLDIGTNSVGWAVITDEYKVPSKKFKVLGNTDRHSIKKNLIGALLFDSGETAEATRLKRTARRRYTRRKNRICYLQEIFSNEMAKVDDSFFHRLEESFLVEEDKKHERHPIFGNIVDEVAYHEKYPTIYHLRKKLVDSTDKADLRLIYLALAHMIKFRGHFLIEGDLNPDNSDVDKLFIQLVQTYNQLFEENPINASGVDAKAILSARLSKSRRLENLIAQLPGEKKNGLFGNLIALSLGLTPNFKSNFDLAEDAKLQLSKDTYDDDLDNLLAQIGDQYADLFLAAKNLSDAILLSDILRVNTEITKAPLSASMIKRYDEHHQDLTLLKALVRQQLPEKYKEIFFDQSKNGYAGYIDGGASQEEFYKFIKPILEKMDGTEELLVKLNREDLLRKQRTFDNGSIPHQIHLGELHAILRRQEDFYPFLKDNREKIEKILTFRIPYYVGPLARGNSRFAWMTRKSEETITPWNFEEVVDKGASAQSFIERMTNFDKNLPNEKVLPKHSLLYEYFTVYNELTKVKYVTEGMRKPAFLSGEQKKAIVDLLFKTNRKVTVKQLKEDYFKKIECFDSVEISGVEDRFNASLGTYHDLLKIIKDKDFLDNEENEDILEDIVLTLTLFEDREMIEERLKTYAHLFDDKVMKQLKRRRYTGWGRLSRKLINGIRDKQSGKTILDFLKSDGFANRNFMQLIHDDSLTFKEDIQKAQVSGQGDSLHEHIANLAGSPAIKKGILQTVKVVDELVKVMGRHKPENIVIEMARENQTTQKGQKNSRERMKRIEEGIKELGSQILKEHPVENTQLQNEKLYLYYLQNGRDMYVDQELDINRLSDYDVDHIVPQSFLKDDSIDNKVLTRSDKARGKSDNVPSEEVVKKMKNYWRQLLNAKLITQRKFDNLTKAERGGLSELDKAGFIKRQLVETRQITKHVAQILDSRMNTKYDENDKLIREVKVITLKSKLVSDFRKDFQFYKVREINNYHHAHDAYLNAVVGTALIKKYPKLESEFVYGDYKVYDVRKMIAKSEQEIGKATAKYFFYSNIMNFFKTEITLANGEIRKRPLIETNGETGEIVWDKGRDFATVRKVLSMPQVNIVKKTEVQTGGFSKESILPKRNSDKLIARKKDWDPKKYGGFDSPTVAYSVLVVAKVEKGKSKKLKSVKELLGITIMERSSFEKNPIDFLEAKGYKEVKKDLIIKLPKYSLFELENGRKRMLASAGELQKGNELALPSKYVNFLYLASHYEKLKGSPEDNEQKQLFVEQHKHYLDEIIEQISEFSKRVILADANLDKVLSAYNKHRDKPIREQAENIIHLFTLTNLGAPAAFKYFDTTIDRKRYTSTKEVLDATLIHQSITGLYETRIDLSQLGGDGGGSSGGSGGGGGTLQLDDEYRLYSPLVKPDQNIQFWLEQFPQAWAETAGMGLAKQVPPQVIQLKASATPVSVRQYPLSKEAQEGIRPHVQRLIQQGILVPVQSPWNTPLLPVRKPGTNDYRPVQDLREVNKRVQDIHPTVPNPYNLLCALPPQRSWYTVLDLKDAFFCLRLHPTSQPLFAFEWRDPGTGRTGQLTWTRLPQGFKNSPTIFDEALHRDLANFRIQHPQVTLLQYVDDLLLAGATKQDCLEGTKALLLELSDLGYRASAKKAQICRREVTYLGYSLRDGQRWLTEARKKTVVQIPAPTTAKQVREFLGTAGFCRLWIPGFATLAAPLYPLTKEKGEFSWAPEHQKAFDAIKKALLSAPALALPDVTKPFTLYVDERKGVARGVLTQTLGPWRRPVAYLSKKLDPVASGWPVCLKAIAAVAILVKDADKLTLGQNITVIAPHALENIVRQPPDRWMTNARMTHYQSLLLTERVTFAPPAALNPATLLPEETDEPVTHDCHQLLIEETGVRKDLTDIPLTGEVLTWFTDGSSYVVEGKRMAGAAVVDGTRTIWASSLPEGTSAQKAELMALTQALRLAEGKSINIYTDSRYAFATAHVHGAIYKQRGLLTSAGREIKNKEEILSLLEALHLPKRLAIIHCPGHQKAKDPISRGNQMADRVAKQAAQGVNLLAGKRTADGSEFEKRTADGSEFESPKKKAKVE

SEQ ID NO: 6868 - protein, 2088 aa, synthetic construct; identical to SEQ ID NO: 6867

SEQ ID NO: 6869 - protein, 2092 aa, synthetic construct
MPAAKRVKLDGGDKKYSIGLDIGTNSVGWAVITDEYKVPSKKFKVLGNTDRHSIKKNLIGALLFDSGETAEATRLKRTARRRYTRRKNRICYLQEIFSNEMAKVDDSFFHRLEESFLVEEDKKHERHPIFGNIVDEVAYHEKYPTIYHLRKKLVDSTDKADLRLIYLALAHMIKFRGHFLIEGDLNPDNSDVDKLFIQLVQTYNQLFEENPINASGVDAKAILSARLSKSRRLENLIAQLPGEKKNGLFGNLIALSLGLTPNFKSNFDLAEDAKLQLSKDTYDDDLDNLLAQIGDQYADLFLAAKNLSDAILLSDILRVNTEITKAPLSASMIKRYDEHHQDLTLLKALVRQQLPEKYKEIFFDQSKNGYAGYIDGGASQEEFYKFIKPILEKMDGTEELLVKLNREDLLRKQRTFDNGSIPHQIHLGELHAILRRQEDFYPFLKDNREKIEKILTFRIPYYVGPLARGNSRFAWMTRKSEETITPWNFEEVVDKGASAQSFIERMTNFDKNLPNEKVLPKHSLLYEYFTVYNELTKVKYVTEGMRKPAFLSGEQKKAIVDLLFKTNRKVTVKQLKEDYFKKIECFDSVEISGVEDRFNASLGTYHDLLKIIKDKDFLDNEENEDILEDIVLTLTLFEDREMIEERLKTYAHLFDDKVMKQLKRRRYTGWGRLSRKLINGIRDKQSGKTILDFLKSDGFANRNFMQLIHDDSLTFKEDIQKAQVSGQGDSLHEHIANLAGSPAIKKGILQTVKVVDELVKVMGRHKPENIVIEMARENQTTQKGQKNSRERMKRIEEGIKELGSQILKEHPVENTQLQNEKLYLYYLQNGRDMYVDQELDINRLSDYDVDHIVPQSFLKDDSIDNKVLTRSDKARGKSDNVPSEEVVKKMKNYWRQLLNAKLITQRKFDNLTKAERGGLSELDKAGFIKRQLVETRQITKHVAQILDSRMNTKYDENDKLIREVKVITLKSKLVSDFRKDFQFYKVREINNYHHAHDAYLNAVVGTALIKKYPKLESEFVYGDYKVYDVRKMIAKSEQEIGKATAKYFFYSNIMNFFKTEITLANGEIRKRPLIETNGETGEIVWDKGRDFATVRKVLSMPQVNIVKKTEVQTGGFSKESILPKRNSDKLIARKKDWDPKKYGGFDSPTVAYSVLVVAKVEKGKSKKLKSVKELLGITIMERSSFEKNPIDFLEAKGYKEVKKDLIIKLPKYSLFELENGRKRMLASAGELQKGNELALPSKYVNFLYLASHYEKLKGSPEDNEQKQLFVEQHKHYLDEIIEQISEFSKRVILADANLDKVLSAYNKHRDKPIREQAENIIHLFTLTNLGAPAAFKYFDTTIDRKRYTSTKEVLDATLIHQSITGLYETRIDLSQLGGDGGGSSGGSGGGGGVLNLEEEYRLHEKPVPSSIDPSWLQLFPTVWAERAGMGLANQVPPVVVELRSGASPVAVRQYPMSKEAREGIRPHIQRFLDLGVLVPCQSPWNTPLLPVKKPGTNDYRPVQDLREINKRVQDIHPTVPNPYNLLSSLPPSHTWYSVLDLKDAFFCLKLHPNSQPLFAFEWRDPEKGNTGQLTWTRLPQGFKNSPTLFNEALHRDLAPFRALNPQVVLLQYVDDLLVAAPTYRDCKEGTQKLLQELSKLGYRVSAKKAQLCQKEVTYLGYLLKEGKRWLTPARKATVMKIPPPTTPRQVREFLGTAGFCRLWIPGFASLAAPLYPLTKPSIPFIWTEEHQKAFDRIKEALLSAPALALPDLTKPFTLYVDERAGVARGVLTQTLGPWRRPVAYLSKKLDPVASGWPTCLKAVAAVALLLKDADKLTLGQNVTVIASHSLESIVRQPPDRWMTNARMTHYQSLLLNERVSFAPPAVLNPATLLPVESEATPVHRCSEILAEETGTRRDLKDQPLPGVPAWYTDGSSFIAEGKRRAGAAIVDGKRTVWASSLPEGTSAQKAELVALTQALRLAEGKDINIYTDSRYAFATAHIHGAIYKQRGWLTSAGKDIKNKEEILALLEAIHLPKRVAIIHCPGHQKGNDPVATGNRRADEAAKQAALSTRVLAETTKPAGKRTADGSEFEKRTADGSEFESPKKKAKVE

SEQ ID NO: 6870 - protein, 2092 aa, synthetic construct
MPAAKRVKLDGGDKKYSIGLDIGTNSVGWAVITDEYKVPSKKFKVLGNTDRHSIKKNLIGALLFDSGETAEATRLKRTARRRYTRRKNRICYLQEIFSNEMAKVDDSFFHRLEESFLVEEDKKHERHPIFGNIVDEVAYHEKYPTIYHLRKKLVDSTDKADLRLIYLALAHMIKFRGHFLIEGDLNPDNSDVDKLFIQLVQTYNQLFEENPINASGVDAKAILSARLSKSRRLENLIAQLPGEKKNGLFGNLIALSLGLTPNFKSNFDLAEDAKLQLSKDTYDDDLDNLLAQIGDQYADLFLAAKNLSDAILLSDILRVNTEITKAPLSASMIKRYDEHHQDLTLLKALVRQQLPEKYKEIFFDQSKNGYAGYIDGGASQEEFYKFIKPILEKMDGTEELLVKLNREDLLRKQRTFDNGSIPHQIHLGELHAILRRQEDFYPFLKDNREKIEKILTFRIPYYVGPLARGNSRFAWMTRKSEETITPWNFEEVVDKGASAQSFIERMTNFDKNLPNEKVLPKHSLLYEYFTVYNELTKVKYVTEGMRKPAFLSGEQKKAIVDLLFKTNRKVTVKQLKEDYFKKIECFDSVEISGVEDRFNASLGTYHDLLKIIKDKDFLDNEENEDILEDIVLTLTLFEDREMIEERLKTYAHLFDDKVMKQLKRRRYTGWGRLSRKLINGIRDKQSGKTILDFLKSDGFANRNFMQLIHDDSLTFKEDIQKAQVSGQGDSLHEHIANLAGSPAIKKGILQTVKVVDELVKVMGRHKPENIVIEMARENQTTQKGQKNSRERMKRIEEGIKELGSQILKEHPVENTQLQNEKLYLYYLQNGRDMYVDQELDINRLSDYDVDHIVPQSFLKDDSIDNKVLTRSDKARGKSDNVPSEEVVKKMKNYWRQLLNAKLITQRKFDNLTKAERGGLSELDKAGFIKRQLVETRQITKHVAQILDSRMNTKYDENDKLIREVKVITLKSKLVSDFRKDFQFYKVREINNYHHAHDAYLNAVVGTALIKKYPKLESEFVYGDYKVYDVRKMIAKSEQEIGKATAKYFFYSNIMNFFKTEITLANGEIRKRPLIETNGETGEIVWDKGRDFATVRKVLSMPQVNIVKKTEVQTGGFSKESILPKRNSDKLIARKKDWDPKKYGGFDSPTVAYSVLVVAKVEKGKSKKLKSVKELLGITIMERSSFEKNPIDFLEAKGYKEVKKDLIIKLPKYSLFELENGRKRMLASAGELQKGNELALPSKYVNFLYLASHYEKLKGSPEDNEQKQLFVEQHKHYLDEIIEQISEFSKRVILADANLDKVLSAYNKHRDKPIREQAENIIHLFTLTNLGAPAAFKYFDTTIDRKRYTSTKEVLDATLIHQSITGLYETRIDLSQLGGDGGGSSGGSGGGGGVLNLEEEYRLHEKPVPSSIDPSWLQLFPTVWAERAGMGLANQVPPVVVELRSGASPVAVRQYPMSKEAREGIRPHIQRFLDLGVLVPCQSPWNTPLLPVKKPGTNDYRPVQDLREINKRVQDIHPTVPNPYNLLSSLPPSHTWYSVLDLKDAFFCLKLHPNSQPLFAFEWRDPEKGNTGQLTWTRLPQGFKNSPTLFNEALHRDLAPFRALNPQVVLLQYVDDLLVAAPTYRDCKEGTQKLLQELSKLGYRVSAKKAQLCQKEVTYLGYLLKEGKRWLTPARKATVMKIPPPTTPRQVREFLGKAGFCRLFIPGFASLAAPLYPLTKPSIPFIWTEEHQKAFDRIKEALLSAPALALPDLTKPFTLYVDERAGVARGVLTQTLGPWRRPVAYLSKKLDPVASGWPTCLKAVAAVALLLKDADKLTLGQNVTVIASHSLESIVRQPPDRWMTNARMTHYQSLLLNERVSFAPPAVLNPATLLPVESEATPVHRCSEILAEETGTRRDLKDQPLPGVPAWYTDGSSFIAEGKRRAGAAIVDGKRTVWASSLPEGTSAQKAELVALTQALRLAEGKDINIYTDSRYAFATAHIHGAIYKQRGWLTSAGKDIKNKEEILALLEAIHLPKRVAIIHCPGHQKGNDPVATGNRRADEAAKQAALSTRVLAETTKPAGKRTADGSEFEKRTADGSEFESPKKKAKVE

SEQ ID NO: 6871 - protein, 2096 aa, synthetic construct
MPAAKRVKLDGGDKKYSIGLDIGTNSVGWAVITDEYKVPSKKFKVLGNTDRHSIKKNLIGALLFDSGETAEATRLKRTARRRYTRRKNRICYLQEIFSNEMAKVDDSFFHRLEESFLVEEDKKHERHPIFGNIVDEVAYHEKYPTIYHLRKKLVDSTDKADLRLIYLALAHMIKFRGHFLIEGDLNPDNSDVDKLFIQLVQTYNQLFEENPINASGVDAKAILSARLSKSRRLENLIAQLPGEKKNGLFGNLIALSLGLTPNFKSNFDLAEDAKLQLSKDTYDDDLDNLLAQIGDQYADLFLAAKNLSDAILLSDILRVNTEITKAPLSASMIKRYDEHHQDLTLLKALVRQQLPEKYKEIFFDQSKNGYAGYIDGGASQEEFYKFIKPILEKMDGTEELLVKLNREDLLRKQRTFDNGSIPHQIHLGELHAILRRQEDFYPFLKDNREKIEKILTFRIPYYVGPLARGNSRFAWMTRKSEETITPWNFEEVVDKGASAQSFIERMTNFDKNLPNEKVLPKHSLLYEYFTVYNELTKVKYVTEGMRKPAFLSGEQKKAIVDLLFKTNRKVTVKQLKEDYFKKIECFDSVEISGVEDRFNASLGTYHDLLKIIKDKDFLDNEENEDILEDIVLTLTLFEDREMIEERLKTYAHLFDDKVMKQLKRRRYTGWGRLSRKLINGIRDKQSGKTILDFLKSDGFANRNFMQLIHDDSLTFKEDIQKAQVSGQGDSLHEHIANLAGSPAIKKGILQTVKVVDELVKVMGRHKPENIVIEMARENQTTQKGQKNSRERMKRIEEGIKELGSQILKEHPVENTQLQNEKLYLYYLQNGRDMYVDQELDINRLSDYDVDHIVPQSFLKDDSIDNKVLTRSDKARGKSDNVPSEEVVKKMKNYWRQLLNAKLITQRKFDNLTKAERGGLSELDKAGFIKRQLVETRQITKHVAQILDSRMNTKYDENDKLIREVKVITLKSKLVSDFRKDFQFYKVREINNYHHAHDAYLNAVVGTALIKKYPKLESEFVYGDYKVYDVRKMIAKSEQEIGKATAKYFFYSNIMNFFKTEITLANGEIRKRPLIETNGETGEIVWDKGRDFATVRKVLSMPQVNIVKKTEVQTGGFSKESILPKRNSDKLIARKKDWDPKKYGGFDSPTVAYSVLVVAKVEKGKSKKLKSVKELLGITIMERSSFEKNPIDFLEAKGYKEVKKDLIIKLPKYSLFELENGRKRMLASAGELQKGNELALPSKYVNFLYLASHYEKLKGSPEDNEQKQLFVEQHKHYLDEIIEQISEFSKRVILADANLDKVLSAYNKHRDKPIREQAENIIHLFTLTNLGAPAAFKYFDTTIDRKRYTSTKEVLDATLIHQSITGLYETRIDLSQLGGDGGGSSGGGGGSGGTAPLEEEYRLFLEAPIQNVTLLEQWKREIPKVWAEINPPGLASTQAPIHVQLLSTALPVRVRQYPITLEAKRSLRETIRKFRAAGILRPVHSPWNTPLLPVRKSGTSEYRMVQDLREVNKRVETIHPTVPNPYTLLSLLPPDRIWYSVLDLKDAFFCIPLAPESQLIFAFEWADAEEGESGQLTWTRLPQGFKNSPTLFNEALNRDLQGFRLDHPSVSLLQYVDDLLIAADTQAACLSATRDLLMTLAELGYRVSGKKAQLCQEEVTYLGFKIHKGSRSLSNSRTQAILQIPVPKTKRQVREFLGTIGYCRLWIPGFAELAQPLYAATRPGNDPLVWGEKEEEAFQSLKLALTQPPALALPSLDKPFQLFVEETSGAAKGVLTQALGPWKRPVAYLSKRLDPVAAGWPRCLRAIAAAALLTREASKLTFGQDIEITSSHNLESLLRSPPDKWLTNARITQYQVLLLDPPRVRFKQTAALNPATLLPETDDTLPIHHCLDTLDSLTSTRPDLTDQPLAQAEATLFTDGSSYIRDGKRYAGAAVVTLDSVIWAEPLPIGTSAQKAELIALTKALEWSKDKSVNIYTDSRYAFATLHVHGMIYRERGWLTAGGKAIKNAPEILALLTAVWLPKRVAVMHCKGHQKDDAPTSTGNRRADEVAREVAIRPLSTQATISAGKRTADGSEFEKRTADGSEFESPKKKAKVE

SEQ ID NO: 6872 - protein, 2100 aa, synthetic construct
MPAAKRVKLDGGDKKYSIGLDIGTNSVGWAVITDEYKVPSKKFKVLGNTDRHSIKKNLIGALLFDSGETAEATRLKRTARRRYTRRKNRICYLQEIFSNEMAKVDDSFFHRLEESFLVEEDKKHERHPIFGNIVDEVAYHEKYPTIYHLRKKLVDSTDKADLRLIYLALAHMIKFRGHFLIEGDLNPDNSDVDKLFIQLVQTYNQLFEENPINASGVDAKAILSARLSKSRRLENLIAQLPGEKKNGLFGNLIALSLGLTPNFKSNFDLAEDAKLQLSKDTYDDDLDNLLAQIGDQYADLFLAAKNLSDAILLSDILRVNTEITKAPLSASMIKRYDEHHQDLTLLKALVRQQLPEKYKEIFFDQSKNGYAGYIDGGASQEEFYKFIKPILEKMDGTEELLVKLNREDLLRKQRTFDNGSIPHQIHLGELHAILRRQEDFYPFLKDNREKIEKILTFRIPYYVGPLARGNSRFAWMTRKSEETITPWNFEEVVDKGASAQSFIERMTNFDKNLPNEKVLPKHSLLYEYFTVYNELTKVKYVTEGMRKPAFLSGEQKKAIVDLLFKTNRKVTVKQLKEDYFKKIECFDSVEISGVEDRFNASLGTYHDLLKIIKDKDFLDNEENEDILEDIVLTLTLFEDREMIEERLKTYAHLFDDKVMKQLKRRRYTGWGRLSRKLINGIRDKQSGKTILDFLKSDGFANRNFMQLIHDDSLTFKEDIQKAQVSGQGDSLHEHIANLAGSPAIKKGILQTVKVVDELVKVMGRHKPENIVIEMARENQTTQKGQKNSRERMKRIEEGIKELGSQILKEHPVENTQLQNEKLYLYYLQNGRDMYVDQELDINRLSDYDVDHIVPQSFLKDDSIDNKVLTRSDKARGKSDNVPSEEVVKKMKNYWRQLLNAKLITQRKFDNLTKAERGGLSELDKAGFIKRQLVETRQITKHVAQILDSRMNTKYDENDKLIREVKVITLKSKLVSDFRKDFQFYKVREINNYHHAHDAYLNAVVGTALIKKYPKLESEFVYGDYKVYDVRKMIAKSEQEIGKATAKYFFYSNIMNFFKTEITLANGEIRKRPLIETNGETGEIVWDKGRDFATVRKVLSMPQVNIVKKTEVQTGGFSKESILPKRNSDKLIARKKDWDPKKYGGFDSPTVAYSVLVVAKVEKGKSKKLKSVKELLGITIMERSSFEKNPIDFLEAKGYKEVKKDLIIKLPKYSLFELENGRKRMLASAGELQKGNELALPSKYVNFLYLASHYEKLKGSPEDNEQKQLFVEQHKHYLDEIIEQISEFSKRVILADANLDKVLSAYNKHRDKPIREQAENIIHLFTLTNLGAPAAFKYFDTTIDRKRYTSTKEVLDATLIHQSITGLYETRIDLSQLGGDGGGSSGGGGGSGGTVSLQDEHRLFDIPVTTSLPDVWLQDFPQAWAETGGLGRAKCQAPIIIDLKPTAVPVSIKQYPMSLEAHMGIRQHIIKFLELGVLRPCRSPWNTPLLPVKKPGTQDYRPVQDLREINKRTVDIHPTVPNPYNLLSTLKPDYSWYTVLDLKDAFFCLPLAPQSQELFAFEWKDPERGISGQLTWTRLPQGFKNSPTLFNEALHRDLTDFRTQHPEVTLLQYVDDLLLAAPTKKACTQGTRHLLQELGEKGYRASAKKAQICQTKVTYLGYILSEGKRWLTPGRIETVARIPPPRNPREVREFLGTAGFCRLWIPGFAELAAPLYALTKPSTPFTWQTEHQLAFEALKKALLSAPALGLPDTSKPFTLFLDERQGIAKGVLTQKLGPWKRPVAYLSKKLDPVAAGWPPCLRIMAATAMLVKDSAKLTLGQPLTVITPHTLEAIVRQPPDRWITNARLTHYQALLLDTDRVQFGPPVTLNPATLLPVPENQPSPHDCRQVLAETHGTREDLKDQELPDADHTWYTDGSSYLDSGTRRAGAAVVDGHNTIWAQSLPPGTSAQKAELIALTKALELSKGKKANIYTDSRYAFATAHTHGSIYERRGWLTSEGKEIKNKAEIIALLKALFLPQEVAIIHCPGHQKGQDPVAVGNRQADRVARQAAMAEVLTLATEPDNTSHITAGKRTADGSEFEKRTADGSEFESPKKKAKVE

SEQ ID NO: 6873 - protein, 2216 aa, synthetic construct
MPAAKRVKLDGGDKKYSIGLDIGTNSVGWAVITDEYKVPSKKFKVLGNTDRHSIKKNLIGALLFDSGETAEATRLKRTARRRYTRRKNRICYLQEIFSNEMAKVDDSFFHRLEESFLVEEDKKHERHPIFGNIVDEVAYHEKYPTIYHLRKKLVDSTDKADLRLIYLALAHMIKFRGHFLIEGDLNPDNSDVDKLFIQLVQTYNQLFEENPINASGVDAKAILSARLSKSRRLENLIAQLPGEKKNGLFGNLIALSLGLTPNFKSNFDLAEDAKLQLSKDTYDDDLDNLLAQIGDQYADLFLAAKNLSDAILLSDILRVNTEITKAPLSASMIKRYDEHHQDLTLLKALVRQQLPEKYKEIFFDQSKNGYAGYIDGGASQEEFYKFIKPILEKMDGTEELLVKLNREDLLRKQRTFDNGSIPHQIHLGELHAILRRQEDFYPFLKDNREKIEKILTFRIPYYVGPLARGNSRFAWMTRKSEETITPWNFEEVVDKGASAQSFIERMTNFDKNLPNEKVLPKHSLLYEYFTVYNELTKVKYVTEGMRKPAFLSGEQKKAIVDLLFKTNRKVTVKQLKEDYFKKIECFDSVEISGVEDRFNASLGTYHDLLKIIKDKDFLDNEENEDILEDIVLTLTLFEDREMIEERLKTYAHLFDDKVMKQLKRRRYTGWGRLSRKLINGIRDKQSGKTILDFLKSDGFANRNFMQLIHDDSLTFKEDIQKAQVSGQGDSLHEHIANLAGSPAIKKGILQTVKVVDELVKVMGRHKPENIVIEMARENQTTQKGQKNSRERMKRIEEGIKELGSQILKEHPVENTQLQNEKLYLYYLQNGRDMYVDQELDINRLSDYDVDHIVPQSFLKDDSIDNKVLTRSDKARGKSDNVPSEEVVKKMKNYWRQLLNAKLITQRKFDNLTKAERGGLSELDKAGFIKRQLVETRQITKHVAQILDSRMNTKYDENDKLIREVKVITLKSKLVSDFRKDFQFYKVREINNYHHAHDAYLNAVVGTALIKKYPKLESEFVYGDYKVYDVRKMIAKSEQEIGKATAKYFFYSNIMNFFKTEITLANGEIRKRPLIETNGETGEIVWDKGRDFATVRKVLSMPQVNIVKKTEVQTGGFSKESILPKRNSDKLIARKKDWDPKKYGGFDSPTVAYSVLVVAKVEKGKSKKLKSVKELLGITIMERSSFEKNPIDFLEAKGYKEVKKDLIIKLPKYSLFELENGRKRMLASAGELQKGNELALPSKYVNFLYLASHYEKLKGSPEDNEQKQLFVEQHKHYLDEIIEQISEFSKRVILADANLDKVLSAYNKHRDKPIREQAENIIHLFTLTNLGAPAAFKYFDTTIDRKRYTSTKEVLDATLIHQSITGLYETRIDLSQLGGDGGGSSGGGGGSGGTLGDQGSRGSDPLPEPRVTLTVEGIPTEFLVNTGAEHSVLTKPMGKMGSKRTVVAGATGSKVYPWTTKRLLKIGQKQVTHSFLVIPECPAPLLGRDLLTKLKAQIQFSTEGPQVTWEDRPAMCLVLNLEEEYRLHEKPVPPSIDPSWLQLFPMVWAEKAGMGLANQVPPVVVELKSDASPVAVRQYPMSKEAREGIRPHIQRFLDLGILVPCQSPWNTPLLPVKKPGTNDYRPVQDLREVNKRVQDIHPTVPNPYNLLSSLPPSHTWYSVLDLKDAFFCLKLHPNSQPLFAFEWRDPEKGNTGQLTWTRLPQGFKNSPTLFDEALHRDLASFRALNPQVVMLQYVDDLLVAAPTYRDCKEGTRRLLQELSKLGYRVSAKKAQLCREEVTYLGYLLKGGKRWLTPARKATVMKIPTPTTPRQVREFLGTAGFCRLWIPGFASLAAPLYPLTREKVPFTWTEAHQEAFGRIKEALLSAPALALPDLTKPFALYVDEKEGVARGVLTQTLGPWRRPVAYLSKKLDPVASGWPTCLKAIAAVALLLKDADKLTLGQNVLVIAPHNLESIVRQPPDRWMTNARMTHYQSLLLNERVSFAPPAILNPATLLPVESDDTPIHICSEILAEETGTRPDLRDQPLPGVPAWYTDGSSFIMDGRRQAGAAIVDNKRTVWASNLPEGTSAQKAELIALTQALRLAEGKSINIYTDSRYAFATAHVHGAIYKQRGLLTSAGKDIKNKEEILALLEAIHLPKRVAIIHCPGHQRGTDPVATGNRKADEAAKQAAQSTRILTETTKNAGKRTADGSEFEKRTADGSEFESPKKKAKVE

SEQ ID NO: 6874 - protein, 2125 aa, synthetic construct
MPAAKRVKLDGGDKKYSIGLDIGTNSVGWAVITDEYKVPSKKFKVLGNTDRHSIKKNLIGALLFDSGETAEATRLKRTARRRYTRRKNRICYLQEIFSNEMAKVDDSFFHRLEESFLVEEDKKHERHPIFGNIVDEVAYHEKYPTIYHLRKKLVDSTDKADLRLIYLALAHMIKFRGHFLIEGDLNPDNSDVDKLFIQLVQTYNQLFEENPINASGVDAKAILSARLSKSRRLENLIAQLPGEKKNGLFGNLIALSLGLTPNFKSNFDLAEDAKLQLSKDTYDDDLDNLLAQIGDQYADLFLAAKNLSDAILLSDILRVNTEITKAPLSASMIKRYDEHHQDLTLLKALVRQQLPEKYKEIFFDQSKNGYAGYIDGGASQEEFYKFIKPILEKMDGTEELLVKLNREDLLRKQRTFDNGSIPHQIHLGELHAILRRQEDFYPFLKDNREKIEKILTFRIPYYVGPLARGNSRFAWMTRKSEETITPWNFEEVVDKGASAQSFIERMTNFDKNLPNEKVLPKHSLLYEYFTVYNELTKVKYVTEGMRKPAFLSGEQKKAIVDLLFKTNRKVTVKQLKEDYFKKIECFDSVEISGVEDRFNASLGTYHDLLKIIKDKDFLDNEENEDILEDIVLTLTLFEDREMIEERLKTYAHLFDDKVMKQLKRRRYTGWGRLSRKLINGIRDKQSGKTILDFLKSDGFANRNFMQLIHDDSLTFKEDIQKAQVSGQGDSLHEHIANLAGSPAIKKGILQTVKVVDELVKVMGRHKPENIVIEMARENQTTQKGQKNSRERMKRIEEGIKELGSQILKEHPVENTQLQNEKLYLYYLQNGRDMYVDQELDINRLSDYDVDHIVPQSFLKDDSIDNKVLTRSDKARGKSDNVPSEEVVKKMKNYWRQLLNAKLITQRKFDNLTKAERGGLSELDKAGFIKRQLVETRQITKHVAQILDSRMNTKYDENDKLIREVKVITLKSKLVSDFRKDFQFYKVREINNYHHAHDAYLNAVVGTALIKKYPKLESEFVYGDYKVYDVRKMIAKSEQEIGKATAKYFFYSNIMNFFKTEITLANGEIRKRPLIETNGETGEIVWDKGRDFATVRKVLSMPQVNIVKKTEVQTGGFSKESILPKRNSDKLIARKKDWDPKKYGGFDSPTVAYSVLVVAKVEKGKSKKLKSVKELLGITIMERSSFEKNPIDFLEAKGYKEVKKDLIIKLPKYSLFELENGRKRMLASAGELQKGNELALPSKYVNFLYLASHYEKLKGSPEDNEQKQLFVEQHKHYLDEIIEQISEFSKRVILADANLDKVLSAYNKHRDKPIREQAENIIHLFTLTNLGAPAAFKYFDTTIDRKRYTSTKEVLDATLIHQSITGLYETRIDLSQLGGDGGGSSGGGGGSGGLLGRDLLTKLKAQIQFSTEGPQVTWEDRPAMCLVLNLEEEYRLHEKPVPPSIDPSWLQLFPMVWAEKAGMGLANQVPPVVVELKSDASPVAVRQYPMSKEAREGIRPHIQRFLDLGILVPCQSPWNTPLLPVKKPGTNDYRPVQDLREVNKRVQDIHPTVPNPYNLLSSLPPSHTWYSVLDLKDAFFCLKLHPNSQPLFAFEWRDPEKGNTGQLTWTRLPQGFKNSPTLFNEALHRDLASFRALNPQVVMLQYVDDLLVAAPTYRDCKEGTRRLLQELSKLGYRVSAKKAQLCREEVTYLGYLLKGGKRWLTPARKATVMKIPTPTTPRQVREFLGTAGFCRLWIPGFASLAAPLYPLTRPKVPFTWTEAHQEAFGRIKEALLSAPALALPDLTKPFALYVDEKEGVARGVLTQTLGPWRRPVAYLSKKLDPVASGWPTCLKAIAAVALLLKDADKLTLGQNVLVIAPHNLESIVRQPPDRWMTNARMTHYQSLLLNERVSFAPPAILNPATLLPVESDDTPIHICSEILAEETGTRPDLRDQPLPGVPAWYTDGSSFIMDGRRQAGAAIVDNKRTVWASNLPEGTSAQKAELIALTQALRLAEGKSINIYTDSRYAFATAHVHGAIYKQRGWLTSAGKDIKNKEEILALLEAIHLPKRVAIIHCPGHQRGTDPVATGNRKADEAAKQAAQSTRILTETTKNAGKRTADGSEFEKRTADGSEFESPKKKAKVE

SEQ ID NO: 6875 - protein, 2094 aa, synthetic construct; identical to SEQ ID NO: 4517

SEQ ID NO: 6876 - protein, 2094 aa, synthetic construct; identical to SEQ ID NO: 4517

SEQ ID NO: 6877 - protein, 2094 aa, synthetic construct
MPAAKRVKLDGGDKKYSIGLDIGTNSVGWAVITDEYKVPSKKFKVLGNTDRHSIKKNLIGALLFDSGETAEATRLKRTARRRYTRRKNRICYLQEIFSNEMAKVDDSFFHRLEESFLVEEDKKHERHPIFGNIVDEVAYHEKYPTIYHLRKKLVDSTDKADLRLIYLALAHMIKFRGHFLIEGDLNPDNSDVDKLFIQLVQTYNQLFEENPINASGVDAKAILSARLSKSRRLENLIAQLPGEKKNGLFGNLIALSLGLTPNFKSNFDLAEDAKLQLSKDTYDDDLDNLLAQIGDQYADLFLAAKNLSDAILLSDILRVNTEITKAPLSASMIKRYDEHHQDLTLLKALVRQQLPEKYKEIFFDQSKNGYAGYIDGGASQEEFYKFIKPILEKMDGTEELLVKLNREDLLRKQRTFDNGSIPHQIHLGELHAILRRQEDFYPFLKDNREKIEKILTFRIPYYVGPLARGNSRFAWMTRKSEETITPWNFEEVVDKGASAQSFIERMTNFDKNLPNEKVLPKHSLLYEYFTVYNELTKVKYVTEGMRKPAFLSGEQKKAIVDLLFKTNRKVTVKQLKEDYFKKIECFDSVEISGVEDRFNASLGTYHDLLKIIKDKDFLDNEENEDILEDIVLTLTLFEDREMIEERLKTYAHLFDDKVMKQLKRRRYTGWGRLSRKLINGIRDKQSGKTILDFLKSDGFANRNFMQLIHDDSLTFKEDIQKAQVSGQGDSLHEHIANLAGSPAIKKGILQTVKVVDELVKVMGRHKPENIVIEMARENQTTQKGQKNSRERMKRIEEGIKELGSQILKEHPVENTQLQNEKLYLYYLQNGRDMYVDQELDINRLSDYDVDHIVPQSFLKDDSIDNKVLTRSDKARGKSDNVPSEEVVKKMKNYWRQLLNAKLITQRKFDNLTKAERGGLSELDKAGFIKRQLVETRQITKHVAQILDSRMNTKYDENDKLIREVKVITLKSKLVSDFRKDFQFYKVREINNYHHAHDAYLNAVVGTALIKKYPKLESEFVYGDYKVYDVRKMIAKSEQEIGKATAKYFFYSNIMNFFKTEITLANGEIRKRPLIETNGETGEIVWDKGRDFATVRKVLSMPQVNIVKKTEVQTGGFSKESILPKRNSDKLIARKKDWDPKKYGGFDSPTVAYSVLVVAKVEKGKSKKLKSVKELLGITIMERSSFEKNPIDFLEAKGYKEVKKDLIIKLPKYSLFELENGRKRMLASAGELQKGNELALPSKYVNFLYLASHYEKLKGSPEDNEQKQLFVEQHKHYLDEIIEQISEFSKRVILADANLDKVLSAYNKHRDKPIREQAENIIHLFTLTNLGAPAAFKYFDTTIDRKRYTSTKEVLDATLIHQSITGLYETRIDLSQLGGDGGGSSGGGGGSGGTLGIEDEYRLHETSTEPDVSLGSTWLSDFPQAWAETGGMGLAVRQAPLIIPLKATSTPVSIQQYPMSHEARLGIKPHIQRLLDQGILVPCQSPWNTPLLPVKKPGTNDYRPVQDLREVNKRVEDIHPTVPNPYNLLSGLPPSHQWYTVLDLKDAFFCLRLHPTSQPLFAFEWRDPGMGISGQLTWTRLPQGFKNSPTLFNEALHRDLADFRIQHPDLILLQYVDDILLAATSELDCQQGTRALLQTLGDLGYRASAKKAQICQKQVKYLGYLLREGQRWLTEARKETVMGQPVPKTPRQLREFLGTAGFCRLWIPGFAEMAAPLYPLTKPGTLFSWGPDQQKAYQEIKQALLTAPALGLPDLTKPFELFVDEKQGYAKGVLTQKLGPWRRPVAYLSKKLDPVAAGWPPCLRMVAAIAVLTKDAGKLTMGQPLVILAPHAVEALVKQPPDRWLSNARMTHYQAMLLDTDRVQFGPVVALNPATLLPLPEEGAPHDCLEILAETHGTRPDLTDQPIPDADHTWYTDGSSFLQEGQRKAGAAVTTETEVIWAGALPAGTSAQRAELIALTQALKMAEGKRLNVYTDSRYAFATAHIHGEIYRRRGWLTSEGREIKNKSEILALLKALFLPKRLSIIHCLGHQKGDSAEARGNRLADQAAREAAIKTPPDTSTLLAGKRTADGSEFEKRTADGSEFESPKKKAKVE

SEQ ID NO: 6878 - protein, 2094 aa, synthetic construct
MPAAKRVKLDGGDKKYSIGLDIGTNSVGWAVITDEYKVPSKKFKVLGNTDRHSIKKNLIGALLFDSGETAEATRLKRTARRRYTRRKNRICYLQEIFSNEMAKVDDSFFHRLEESFLVEEDKKHERHPIFGNIVDEVAYHEKYPTIYHLRKKLVDSTDKADLRLIYLALAHMIKFRGHFLIEGDLNPDNSDVDKLFIQLVQTYNQLFEENPINASGVDAKAILSARLSKSRRLENLIAQLPGEKKNGLFGNLIALSLGLTPNFKSNFDLAEDAKLQLSKDTYDDDLDNLLAQIGDQYADLFLAAKNLSDAILLSDILRVNTEITKAPLSASMIKRYDEHHQDLTLLKALVRQQLPEKYKEIFFDQSKNGYAGYIDGGASQEEFYKFIKPILEKMDGTEELLVKLNREDLLRKQRTFDNGSIPHQIHLGELHAILRRQEDFYPFLKDNREKIEKILTFRIPYYVGPLARGNSRFAWMTRKSEETITPWNFEEVVDKGASAQSFIERMTNFDKNLPNEKVLPKHSLLYEYFTVYNELTKVKYVTEGMRKPAFLSGEQKKAIVDLLFKTNRKVTVKQLKEDYFKKIECFDSVEISGVEDRFNASLGTYHDLLKIIKDKDFLDNEENEDILEDIVLTLTLFEDREMIEERLKTYAHLFDDKVMKQLKRRRYTGWGRLSRKLINGIRDKQSGKTILDFLKSDGFANRNFMQLIHDDSLTFKEDIQKAQVSGQGDSLHEHIANLAGSPAIKKGILQTVKVVDELVKVMGRHKPENIVIEMARENQTTQKGQKNSRERMKRIEEGIKELGSQILKEHPVENTQLQNEKLYLYYLQNGRDMYVDQELDINRLSDYDVDHIVPQSFLKDDSIDNKVLTRSDKARGKSDNVPSEEVVKKMKNYWRQLLNAKLITQRKFDNLTKAERGGLSELDKAGFIKRQLVETRQITKHVAQILDSRMNTKYDENDKLIREVKVITLKSKLVSDFRKDFQFYKVREINNYHHAHDAYLNAVVGTALIKKYPKLESEFVYGDYKVYDVRKMIAKSEQEIGKATAKYFFYSNIMNFFKTEITLANGEIRKRPLIETNGETGEIVWDKGRDFATVRKVLSMPQVNIVKKTEVQTGGFSKESILPKRNSDKLIARKKDWDPKKYGGFDSPTVAYSVLVVAKVEKGKSKKLKSVKELLGITIMERSSFEKNPIDFLEAKGYKEVKKDLIIKLPKYSLFELENGRKRMLASAGELQKGNELALPSKYVNFLYLASHYEKLKGSPEDNEQKQLFVEQHKHYLDEIIEQISEFSKRVILADANLDKVLSAYNKHRDKPIREQAENIIHLFTLTNLGAPAAFKYFDTTIDRKRYTSTKEVLDATLIHQSITGLYETRIDLSQLGGDGGGSSGGGGGSGGTLNIEDEYRLHETSKEPDVSLGSTWLSDFPQAWAETGGMGLAVRQAPLIIPLKATSTPVSIKQYPMSQEARLGIKPHIQRLLDQGILVPCQSPWNTPLLPVKKPGTNDYRPVQDLREVNKRVEDIHPTVPNPYNLLSGLPPSHQWYTVLDLKDAFFCLRLHPTSQPLFAFEWRDPEMGISGQLTWTRLPQGFKNSPTLFNEALHRDLAGFRIQHPDLILLQYVDDLLLAATSELDCQQGTRALLQTLGDLGYRASAKKAQICQKQVKYLGYLLKEGQRWLTEARKETVMGQPIPKTPRQLREFLGTAGFCRLWIPGFAEMAAPLYPLTKPGTLFNWGPDQQKAFQEIKQALLTAPALGLPDLTKPFELFVDEKQGYAKGVLTQKLGPWRRPVAYLSKKLDPVAAGWPPCLRMVAAIAVLTKDAGKLTMGQPLVILAPHAVEALVKQPPDRWLSNARMTHYQALLLDTDRVQFGPVVALNPATLLPLPEEGLQHDCLDILAEAHGTRSDLMDQPLPDADHTWYTDGSSFLQEGQRKAGAAVTTETEVIWARALPAGTSAQRAELIALTQALKMAEGKKLNVYTDSRYAFATAHIHGEIYRRRGWLTSEGKEIKNKDEILALLKALFLPKRLSIIHCPGHQKGNSAEARGNRMADQAAREVATRETPETSTLLAGKRTADGSEFEKRTADGSEFESPKKKAKVE

SEQ ID NO: 6879 - protein, 2094 aa, synthetic construct
MPAAKRVKLDGGDKKYSIGLDIGTNSVGWAVITDEYKVPSKKFKVLGNTDRHSIKKNLIGALLFDSGETAEATRLKRTARRRYTRRKNRICYLQEIFSNEMAKVDDSFFHRLEESFLVEEDKKHERHPIFGNIVDEVAYHEKYPTIYHLRKKLVDSTDKADLRLIYLALAHMIKFRGHFLIEGDLNPDNSDVDKLFIQLVQTYNQLFEENPINASGVDAKAILSARLSKSRRLENLIAQLPGEKKNGLFGNLIALSLGLTPNFKSNFDLAEDAKLQLSKDTYDDDLDNLLAQIGDQYADLFLAAKNLSDAILLSDILRVNTEITKAPLSASMIKRYDEHHQDLTLLKALVRQQLPEKYKEIFFDQSKNGYAGYIDGGASQEEFYKFIKPILEKMDGTEELLVKLNREDLLRKQRTFDNGSIPHQIHLGELHAILRRQEDFYPFLKDNREKIEKILTFRIPYYVGPLARGNSRFAWMTRKSEETITPWNFEEVVDKGASAQSFIERMTNFDKNLPNEKVLPKHSLLYEYFTVYNELTKVKYVTEGMRKPAFLSGEQKKAIVDLLFKTNRKVTVKQLKEDYFKKIECFDSVEISGVEDRFNASLGTYHDLLKIIKDKDFLDNEENEDILEDIVLTLTLFEDREMIEERLKTYAHLFDDKVMKQLKRRRYTGWGRLSRKLINGIRDKQSGKTILDFLKSDGFANRNFMQLIHDDSLTFKEDIQKAQVSGQGDSLHEHIANLAGSPAIKKGILQTVKVVDELVKVMGRHKPENIVIEMARENQTTQKGQKNSRERMKRIEEGIKELGSQILKEHPVENTQLQNEKLYLYYLQNGRDMYVDQELDINRLSDYDVDHIVPQSFLKDDSIDNKVLTRSDKARGKSDNVPSEEVVKKMKNYWRQLLNAKLITQRKFDNLTKAERGGLSELDKAGFIKRQLVETRQITKHVAQILDSRMNTKYDENDKLIREVKVITLKSKLVSDFRKDFQFYKVREINNYHHAHDAYLNAVVGTALIKKYPKLESEFVYGDYKVYDVRKMIAKSEQEIGKATAKYFFYSNIMNFFKTEITLANGEIRKRPLIETNGETGEIVWDKGRDFATVRKVLSMPQVNIVKKTEVQTGGFSKESILPKRNSDKLIARKKDWDPKKYGGFDSPTVAYSVLVVAKVEKGKSKKLKSVKELLGITIMERSSFEKNPIDFLEAKGYKEVKKDLIIKLPKYSLFELENGRKRMLASAGELQKGNELALPSKYVNFLYLASHYEKLKGSPEDNEQKQLFVEQHKHYLDEIIEQISEFSKRVILADANLDKVLSAYNKHRDKPIREQAENIIHLFTLTNLGAPAAFKYFDTTIDRKRYTSTKEVLDATLIHQSITGLYETRIDLSQLGGDGGGSSGGGGGSGGTLNIEDEYRLHETSKEPDVSLGSTWLSDFPQAWAETGGMGLAVRQAPLIIPLKATSTPVSIKQYPMSQEARLGIKPHIQRLLDQGILVPCQSPWNTPLLPVKKPGTNDYRPVQDLREVNKRVEDIHPTVPNPYNLLSGLPPSHQWYTVLDLKDAFFCLRLHPTSQPLFAFEWRDPEMGISGQLTWTRLPQGFKNSPTLFNEALHRDLAGFRIQHPDLILLQYVDDLLLAATSELDCQQGTRALLQTLGDLGYRASAKKAQICQKQVKYLGYLLKEGQRWLTEARKETVMGQPIPKTPRQLREFLGKAGFCRLFIPGFAEMAAPLYPLTKPGTLFNWGPDQQKAFQEIKQALLTAPALGLPDLTKPFELFVDEKQGYAKGVLTQKLGPWRRPVAYLSKKLDPVAAGWPPCLRMVAAIAVLTKDAGKLTMGQPLVILAPHAVEALVKQPPDRWLSNARMTHYQALLLDTDRVQFGPVVALNPATLLPLPEEGLQHDCLDILAEAHGTRSDLMDQPLPDADHTWYTDGSSFLQEGQRKAGAAVTTETEVIWARALPAGTSAQRAELIALTQALKMAEGKKLNVYTDSRYAFATAHIHGEIYRRRGWLTSEGKEIKNKDEILALLKALFLPKRLSIIHCPGHQKGNSAEARGNRMADQAAREVATRETPETSTLLAGKRTADGSEFEKRTADGSEFESPKKKAKVE

SEQ ID NO: 6880 - protein, 2114 aa, synthetic construct
MPAAKRVKLDGGDKKYSIGLDIGTNSVGWAVITDEYKVPSKKFKVLGNTDRHSIKKNLIGALLFDSGETAEATRLKRTARRRYTRRKNRICYLQEIFSNEMAKVDDSFFHRLEESFLVEEDKKHERHPIFGNIVDEVAYHEKYPTIYHLRKKLVDSTDKADLRLIYLALAHMIKFRGHFLIEGDLNPDNSDVDKLFIQLVQTYNQLFEENPINASGVDAKAILSARLSKSRRLENLIAQLPGEKKNGLFGNLIALSLGLTPNFKSNFDLAEDAKLQLSKDTYDDDLDNLLAQIGDQYADLFLAAKNLSDAILLSDILRVNTEITKAPLSASMIKRYDEHHQDLTLLKALVRQQLPEKYKEIFFDQSKNGYAGYIDGGASQEEFYKFIKPILEKMDGTEELLVKLNREDLLRKQRTFDNGSIPHQIHLGELHAILRRQEDFYPFLKDNREKIEKILTFRIPYYVGPLARGNSRFAWMTRKSEETITPWNFEEVVDKGASAQSFIERMTNFDKNLPNEKVLPKHSLLYEYFTVYNELTKVKYVTEGMRKPAFLSGEQKKAIVDLLFKTNRKVTVKQLKEDYFKKIECFDSVEISGVEDRFNASLGTYHDLLKIIKDKDFLDNEENEDILEDIVLTLTLFEDREMIEERLKTYAHLFDDKVMKQLKRRRYTGWGRLSRKLINGIRDKQSGKTILDFLKSDGFANRNFMQLIHDDSLTFKEDIQKAQVSGQGDSLHEHIANLAGSPAIKKGILQTVKVVDELVKVMGRHKPENIVIEMARENQTTQKGQKNSRERMKRIEEGIKELGSQILKEHPVENTQLQNEKLYLYYLQNGRDMYVDQELDINRLSDYDVDHIVPQSFLKDDSIDNKVLTRSDKARGKSDNVPSEEVVKKMKNYWRQLLNAKLITQRKFDNLTKAERGGLSELDKAGFIKRQLVETRQITKHVAQILDSRMNTKYDENDKLIREVKVITLKSKLVSDFRKDFQFYKVREINNYHHAHDAYLNAVVGTALIKKYPKLESEFVYGDYKVYDVRKMIAKSEQEIGKATAKYFFYSNIMNFFKTEITLANGEIRKRPLIETNGETGEIVWDKGRDFATVRKVLSMPQVNIVKKTEVQTGGFSKESILPKRNSDKLIARKKDWDPKKYGGFDSPTVAYSVLVVAKVEKGKSKKLKSVKELLGITIMERSSFEKNPIDFLEAKGYKEVKKDLIIKLPKYSLFELENGRKRMLASAGELQKGNELALPSKYVNFLYLASHYEKLKGSPEDNEQKQLFVEQHKHYLDEIIEQISEFSKRVILADANLDKVLSAYNKHRDKPIREQAENIIHLFTLTNLGAPAAFKYFDTTIDRKRYTSTKEVLDATLIHQSITGLYETRIDLSQLGGDGGGSSGGGGGSGGVQEISDSRPMLHIYLNGRRFLGLLDTGADKTCIAGRDWPANWPIHQTESSLQGLGMACGVARSSQPLRWQHEDKSGIIHPFVIPTLPFTLWGRDIMKDIKVRLMTDSPDDSQDLMIGAIESNLFADQISWKSDQPVWLNQWPLKQEKLQALQQLVTEQLQLGHLEESNSPWNTPVFVIKKKSGKWRLLQDLRAVNATMHDMGALQPGLPSPVAVPKGWEIIIIDLQDCFFNIKLHPEDCKRFAFSVPSPNFKRPYQRFQWKVLPQGMKNSPTLCQKFVDKAILTVRDKYQDSYIVHYMDDILLAHPSRSIVDEILTSMIQALNKHGLVVSTEKIQKYDNLKYLGTHIQGDSVSYQKLQIRTDKLRTLNDFQKLLGNINWIRPFLKLTTGELKPLFEILNGDSNPISTRKLTPEACKALQLMNERLSTARVKRLDLSQPWSLCILKTEYTPTACLWQDGVVEWIHLPHISPKVITPYDIFCTQLIIKGRHRSKELFSKDPDYIVVPYTKVQFDLLLQEKEDWPISLLGFLGEVHFHLPKDPLLTFTLQTAIIFPHMTSTTPLEKGIVIFTDGSANGRSVTYIQGREPIIKENTQNTAQQAEIVAVITAFEEVSQPFNLYTDSKYVTGLFPEIETATLSPRTKIYTELKHLQRLIHKRQEKFYIGHIRGHTGLPGPLAQGNAYADSLTRILTAAGKRTADGSEFEKRTADGSEFESPKKKAKVE

SEQ ID NO: 6881 - protein, 2086 aa, synthetic construct
MPAAKRVKLDGGDKKYSIGLDIGTNSVGWAVITDEYKVPSKKFKVLGNTDRHSIKKNLIGALLFDSGETAEATRLKRTARRRYTRRKNRICYLQEIFSNEMAKVDDSFFHRLEESFLVEEDKKHERHPIFGNIVDEVAYHEKYPTIYHLRKKLVDSTDKADLRLIYLALAHMIKFRGHFLIEGDLNPDNSDVDKLFIQLVQTYNQLFEENPINASGVDAKAILSARLSKSRRLENLIAQLPGEKKNGLFGNLIALSLGLTPNFKSNFDLAEDAKLQLSKDTYDDDLDNLLAQIGDQYADLFLAAKNLSDAILLSDILRVNTEITKAPLSASMIKRYDEHHQDLTLLKALVRQQLPEKYKEIFFDQSKNGYAGYIDGGASQEEFYKFIKPILEKMDGTEELLVKLNREDLLRKQRTFDNGSIPHQIHLGELHAILRRQEDFYPFLKDNREKIEKILTFRIPYYVGPLARGNSRFAWMTRKSEETITPWNFEEVVDKGASAQSFIERMTNFDKNLPNEKVLPKHSLLYEYFTVYNELTKVKYVTEGMRKPAFLSGEQKKAIVDLLFKTNRKVTVKQLKEDYFKKIECFDSVEISGVEDRFNASLGTYHDLLKIIKDKDFLDNEENEDILEDIVLTLTLFEDREMIEERLKTYAHLFDDKVMKQLKRRRYTGWGRLSRKLINGIRDKQSGKTILDFLKSDGFANRNFMQLIHDDSLTFKEDIQKAQVSGQGDSLHEHIANLAGSPAIKKGILQTVKVVDELVKVMGRHKPENIVIEMARENQTTQKGQKNSRERMKRIEEGIKELGSQILKEHPVENTQLQNEKLYLYYLQNGRDMYVDQELDINRLSDYDVDHIVPQSFLKDDSIDNKVLTRSDKARGKSDNVPSEEVVKKMKNYWRQLLNAKLITQRKFDNLTKAERGGLSELDKAGFIKRQLVETRQITKHVAQILDSRMNTKYDENDKLIREVKVITLKSKLVSDFRKDFQFYKVREINNYHHAHDAYLNAVVGTALIKKYPKLESEFVYGDYKVYDVRKMIAKSEQEIGKATAKYFFYSNIMNFFKTEITLANGEIRKRPLIETNGETGEIVWDKGRDFATVRKVLSMPQVNIVKKTEVQTGGFSKESILPKRNSDKLIARKKDWDPKKYGGFDSPTVAYSVLVVAKVEKGKSKKLKSVKELLGITIMERSSFEKNPIDFLEAKGYKEVKKDLIIKLPKYSLFELENGRKRMLASAGELQKGNELALPSKYVNFLYLASHYEKLKGSPEDNEQKQLFVEQHKHYLDEIIEQISEFSKRVILADANLDKVLSAYNKHRDKPIREQAENIIHLFTLTNLGAPAAFKYFDTTIDRKRYTSTKEVLDATLIHQSITGLYETRIDLSQLGGDGGGSSGGGGGSGGLDDEYRLYSPLVKPDQNIQFWLEQFPQAWAETAGMGLAKQVPPQVIQLKASATPVSVRQYPLSKEAQEGIRPHVQRLIQQGILVPVQSPWNTPLLPVRKPGTNDYRPVQDLREVNKRVQDIHPTVPNPYNLLCALPPQRSWYTVLDLKDAFFCLRLHPTSQPLFAFEWRDPGTGRTGQLTWTRLPQGFKNSPTIFNEALHRDLANFRIQHPQVTLLQYVDDLLLAGATKQDCLEGTKALLLELSDLGYRASAKKAQICRREVTYLGYSLRDGQRWLTEARKKTVVQIPAPTTAKQVREFLGKAGFCRLFIPGFATLAAPLYPLTKPKGEFSWAPEHQKAFDAIKKALLSAPALALPDVTKPFTLYVDERKGVARGVLTQTLGPWRRPVAYLSKKLDPVASGWPVCLKAIAAVAILVKDADKLTLGQNITVIAPHALENIVRQPPDRWMTNARMTHYQSLLLTERVTFAPPAALNPATLLPEETDEPVTHDCHQLLIEETGVRKDLTDIPLTGEVLTWFTDGSSYVVEGKRMAGAAVVDGTRTIWASSLPEGTSAQKAELMALTQALRLAEGKSINIYTDSRYAFATAHVHGAIYKQRGWLTSAGREIKNKEEILSLLEALHLPKRLAIIHCPGHQKAKDPISRGNQMADRVAKQAAQGVNLLPAGKRTADGSEFEKRTADGSEFESPKKKAKVE

SEQ ID NO: 6882 - protein, 2094 aa, synthetic construct
MPAAKRVKLDGGDKKYSIGLDIGTNSVGWAVITDEYKVPSKKFKVLGNTDRHSIKKNLIGALLFDSGETAEATRLKRTARRRYTRRKNRICYLQEIFSNEMAKVDDSFFHRLEESFLVEEDKKHERHPIFGNIVDEVAYHEKYPTIYHLRKKLVDSTDKADLRLIYLALAHMIKFRGHFLIEGDLNPDNSDVDKLFIQLVQTYNQLFEENPINASGVDAKAILSARLSKSRRLENLIAQLPGEKKNGLFGNLIALSLGLTPNFKSNFDLAEDAKLQLSKDTYDDDLDNLLAQIGDQYADLFLAAKNLSDAILLSDILRVNTEITKAPLSASMIKRYDEHHQDLTLLKALVRQQLPEKYKEIFFDQSKNGYAGYIDGGASQEEFYKFIKPILEKMDGTEELLVKLNREDLLRKQRTFDNGSIPHQIHLGELHAILRRQEDFYPFLKDNREKIEKILTFRIPYYVGPLARGNSRFAWMTRKSEETITPWNFEEVVDKGASAQSFIERMTNFDKNLPNEKVLPKHSLLYEYFTVYNELTKVKYVTEGMRKPAFLSGEQKKAIVDLLFKTNRKVTVKQLKEDYFKKIECFDSVEISGVEDRFNASLGTYHDLLKIIKDKDFLDNEENEDILEDIVLTLTLFEDREMIEERLKTYAHLFDDKVMKQLKRRRYTGWGRLSRKLINGIRDKQSGKTILDFLKSDGFANRNFMQLIHDDSLTFKEDIQKAQVSGQGDSLHEHIANLAGSPAIKKGILQTVKVVDELVKVMGRHKPENIVIEMARENQTTQKGQKNSRERMKRIEEGIKELGSQILKEHPVENTQLQNEKLYLYYLQNGRDMYVDQELDINRLSDYDVDHIVPQSFLKDDSIDNKVLTRSDKARGKSDNVPSEEVVKKMKNYWRQLLNAKLITQRKFDNLTKAERGGLSELDKAGFIKRQLVETRQITKHVAQILDSRMNTKYDENDKLIREVKVITLKSKLVSDFRKDFQFYKVREINNYHHAHDAYLNAVVGTALIKKYPKLESEFVYGDYKVYDVRKMIAKSEQEIGKATAKYFFYSNIMNFFKTEITLANGEIRKRPLIETNGETGEIVWDKGRDFATVRKVLSMPQVNIVKKTEVQTGGFSKESILPKRNSDKLIARKKDWDPKKYGGFDSPTVAYSVLVVAKVEKGKSKKLKSVKELLGITIMERSSFEKNPIDFLEAKGYKEVKKDLIIKLPKYSLFELENGRKRMLASAGELQKGNELALPSKYVNFLYLASHYEKLKGSPEDNEQKQLFVEQHKHYLDEIIEQISEFSKRVILADANLDKVLSAYNKHRDKPIREQAENIIHLFTLTNLGAPAAFKYFDTTIDRKRYTSTKEVLDATLIHQSITGLYETRIDLSQLGGDGGGSSGGGGGSGGTLNIEDEYRLHETSKEPDVPLGSTWLSDFPQAWAETGGMGLAVRQAPLIIPLKATSTPVSIKQYPMSQEARLGIKPHIQRLLDQGILVPCQSPWNTPLLPVKKPGTNDYRPVQDLREVNKRVEDIHPTVPNPYNLLSGLPPSHQWYTVLDLKDAFFCLRLHPTSQPLFAFEWRDPEMGISGQLTWTRLPQGFKNSPTLFNEALHRDLADFRIQHPDLILLQYVDDLLLAATSEQDCQRGTRALLQTLGNLGYRASAKKAQICQKQVKYLGYLLKEGQRWLTEARKETVMGQPTPKTPRQLREFLGTAGFCRLWIPGFAEMAAPLYPLTKPGTLFNWGPDQQKAYQEIKQALLTAPALGLPDLTKPFELFVDEKQGYAKGVLTQKLGPWRRPVAYLSKKLDPVAAGWPPCLRMVAAIAVLTKDAGKLTMGQPLVILAPHAVEALVKQPPDRWLSNARMTHYQAMLLDTDRVQFGPVVALNPATLLPLPEKEAPHDCLEILAETHGTRPDLTDQPIPDADYTWYTDGSSFLQEGQRRAGAAVTTETEVIWARALPAGTSAQRAELIALTQALKMAEGKKLNVYTDSRYAFATAHVHGEIYRRRGWLTSEGREIKNKNEILALLKALFLPKRLSIIHCPGHQKGNSAEARGNRMADQAAREAAMKAVLETSTLLAGKRTADGSEFEKRTADGSEFESPKKKAKVE

SEQ ID NO: 6883 - protein, 2094 aa, synthetic construct; identical to SEQ ID NO: 4518

SEQ ID NO: 6884 - protein, 2098 aa, synthetic construct
MPAAKRVKLDGGDKKYSIGLDIGTNSVGWAVITDEYKVPSKKFKVLGNTDRHSIKKNLIGALLFDSGETAEATRLKRTARRRYTRRKNRICYLQEIFSNEMAKVDDSFFHRLEESFLVEEDKKHERHPIFGNIVDEVAYHEKYPTIYHLRKKLVDSTDKADLRLIYLALAHMIKFRGHFLIEGDLNPDNSDVDKLFIQLVQTYNQLFEENPINASGVDAKAILSARLSKSRRLENLIAQLPGEKKNGLFGNLIALSLGLTPNFKSNFDLAEDAKLQLSKDTYDDDLDNLLAQIGDQYADLFLAAKNLSDAILLSDILRVNTEITKAPLSASMIKRYDEHHQDLTLLKALVRQQLPEKYKEIFFDQSKNGYAGYIDGGASQEEFYKFIKPILEKMDGTEELLVKLNREDLLRKQRTFDNGSIPHQIHLGELHAILRRQEDFYPFLKDNREKIEKILTFRIPYYVGPLARGNSRFAWMTRKSEETITPWNFEEVVDKGASAQSFIERMTNFDKNLPNEKVLPKHSLLYEYFTVYNELTKVKYVTEGMRKPAFLSGEQKKAIVDLLFKTNRKVTVKQLKEDYFKKIECFDSVEISGVEDRFNASLGTYHDLLKIIKDKDFLDNEENEDILEDIVLTLTLFEDREMIEERLKTYAHLFDDKVMKQLKRRRYTGWGRLSRKLINGIRDKQSGKTILDFLKSDGFANRNFMQLIHDDSLTFKEDIQKAQVSGQGDSLHEHIANLAGSPAIKKGILQTVKVVDELVKVMGRHKPENIVIEMARENQTTQKGQKNSRERMKRIEEGIKELGSQILKEHPVENTQLQNEKLYLYYLQNGRDMYVDQELDINRLSDYDVDHIVPQSFLKDDSIDNKVLTRSDKARGKSDNVPSEEVVKKMKNYWRQLLNAKLITQRKFDNLTKAERGGLSELDKAGFIKRQLVETRQITKHVAQILDSRMNTKYDENDKLIREVKVITLKSKLVSDFRKDFQFYKVREINNYHHAHDAYLNAVVGTALIKKYPKLESEFVYGDYKVYDVRKMIAKSEQEIGKATAKYFFYSNIMNFFKTEITLANGEIRKRPLIETNGETGEIVWDKGRDFATVRKVLSMPQVNIVKKTEVQTGGFSKESILPKRNSDKLIARKKDWDPKKYGGFDSPTVAYSVLVVAKVEKGKSKKLKSVKELLGITIMERSSFEKNPIDFLEAKGYKEVKKDLIIKLPKYSLFELENGRKRMLASAGELQKGNELALPSKYVNFLYLASHYEKLKGSPEDNEQKQLFVEQHKHYLDEIIEQISEFSKRVILADANLDKVLSAYNKHRDKPIREQAENIIHLFTLTNLGAPAAFKYFDTTIDRKRYTSTKEVLDATLIHQSITGLYETRIDLSQLGGDGGGGSGGGEAAAKGGTAPLEEEYRLFLEAPIQNVTLLEQWKREIPKVWAEINPPGLASTQAPIHVQLLSTALPVRVRQYPITLEAKRSLRETIRKFRAAGILRPVHSPWNTPLLPVRKSGTSEYRMVQDLREVNKRVETIHPTVPNPYTLLSLLPPDRIWYSVLDLKDAFFCIPLAPESQLIFAFEWADAEEGESGQLTWTRLPQGFKNSPTLFDEALNRDLQGFRLDHPSVSLLQYVDDLLIAADTQAACLSATRDLLMTLAELGYRVSGKKAQLCQEEVTYLGFKIHKGSRSLSNSRTQAILQIPVPKTKRQVREFLGTIGYCRLWIPGFAELAQPLYAATRGGNDPLVWGEKEEEAFQSLKLALTQPPALALPSLDKPFQLFVEETSGAAKGVLTQALGPWKRPVAYLSKRLDPVAAGWPRCLRAIAAAALLTREASKLTFGQDIEITSSHNLESLLRSPPDKWLTNARITQYQVLLLDPPRVRFKQTAALNPATLLPETDDTLPIHHCLDTLDSLTSTRPDLTDQPLAQAEATLFTDGSSYIRDGKRYAGAAVVTLDSVIWAEPLPIGTSAQKAELIALTKALEWSKDKSVNIYTDSRYAFATLHVHGMIYRERGLLTAGGKAIKNAPEILALLTAVWLPKRVAVMHCKGHQKDDAPTSTGNRRADEVAREVAIRPLSTQATISAGKRTADGSEFEKRTADGSEFESPKKKAKVE

SEQ ID NO: 6885 - protein, 2098 aa, synthetic construct
MPAAKRVKLDGGDKKYSIGLDIGTNSVGWAVITDEYKVPSKKFKVLGNTDRHSIKKNLIGALLFDSGETAEATRLKRTARRRYTRRKNRICYLQEIFSNEMAKVDDSFFHRLEESFLVEEDKKHERHPIFGNIVDEVAYHEKYPTIYHLRKKLVDSTDKADLRLIYLALAHMIKFRGHFLIEGDLNPDNSDVDKLFIQLVQTYNQLFEENPINASGVDAKAILSARLSKSRRLENLIAQLPGEKKNGLFGNLIALSLGLTPNFKSNFDLAEDAKLQLSKDTYDDDLDNLLAQIGDQYADLFLAAKNLSDAILLSDILRVNTEITKAPLSASMIKRYDEHHQDLTLLKALVRQQLPEKYKEIFFDQSKNGYAGYIDGGASQEEFYKFIKPILEKMDGTEELLVKLNREDLLRKQRTFDNGSIPHQIHLGELHAILRRQEDFYPFLKDNREKIEKILTFRIPYYVGPLARGNSRFAWMTRKSEETITPWNFEEVVDKGASAQSFIERMTNFDKNLPNEKVLPKHSLLYEYFTVYNELTKVKYVTEGMRKPAFLSGEQKKAIVDLLFKTNRKVTVKQLKEDYFKKIECFDSVEISGVEDRFNASLGTYHDLLKIIKDKDFLDNEENEDILEDIVLTLTLFEDREMIEERLKTYAHLFDDKVMKQLKRRRYTGWGRLSRKLINGIRDKQSGKTILDFLKSDGFANRNFMQLIHDDSLTFKEDIQKAQVSGQGDSLHEHIANLAGSPAIKKGILQTVKVVDELVKVMGRHKPENIVIEMARENQTTQKGQKNSRERMKRIEEGIKELGSQILKEHPVENTQLQNEKLYLYYLQNGRDMYVDQELDINRLSDYDVDHIVPQSFLKDDSIDNKVLTRSDKARGKSDNVPSEEVVKKMKNYWRQLLNAKLITQRKFDNLTKAERGGLSELDKAGFIKRQLVETRQITKHVAQILDSRMNTKYDENDKLIREVKVITLKSKLVSDFRKDFQFYKVREINNYHHAHDAYLNAVVGTALIKKYPKLESEFVYGDYKVYDVRKMIAKSEQEIGKATAKYFFYSNIMNFFKTEITLANGEIRKRPLIETNGETGEIVWDKGRDFATVRKVLSMPQVNIVKKTEVQTGGFSKESILPKRNSDKLIARKKDWDPKKYGGFDSPTVAYSVLVVAKVEKGKSKKLKSVKELLGITIMERSSFEKNPIDFLEAKGYKEVKKDLIIKLPKYSLFELENGRKRMLASAGELQKGNELALPSKYVNFLYLASHYEKLKGSPEDNEQKQLFVEQHKHYLDEIIEQISEFSKRVILADANLDKVLSAYNKHRDKPIREQAENIIHLFTLTNLGAPAAFKYFDTTIDRKRYTSTKEVLDATLIHQSITGLYETRIDLSQLGGDGGGGSGGGEAAAKGGTAPLEEEYRLFLEAPIQNVTLLEQWKREIPKVWAEINPPGLASTQAPIHVQLLSTALPVRVRQYPITLEAKRSLRETIRKFRAAGILRPVHSPWNTPLLPVRKSGTSEYRMVQDLREVNKRVETIHPTVPNPYTLLSLLPPDRIWYSVLDLKDAFFCIPLAPESQLIFAFEWADAEEGESGQLTWTRLPQGFKNSPTLFNEALNRDLQGFRLDHPSVSLLQYVDDLLIAADTQAACLSATRDLLMTLAELGYRVSGKKAQLCQEEVTYLGFKIHKGSRSLSNSRTQAILQIPVPKTKRQVREFLGTIGYCRLWIPGFAELAQPLYAATRPGNDPLVWGEKEEEAFQSLKLALTQPPALALPSLDKPFQLFVEETSGAAKGVLTQALGPWKRPVAYLSKRLDPVAAGWPRCLRAIAAAALLTREASKLTFGQDIEITSSHNLESLLRSPPDKWLTNARITQYQVLLLDPPRVRFKQTAALNPATLLPETDDTLPIHHCLDTLDSLTSTRPDLTDQPLAQAEATLFTDGSSYIRDGKRYAGAAVVTLDSVIWAEPLPIGTSAQKAELIALTKALEWSKDKSVNIYTDSRYAFATLHVHGMIYRERGWLTAGGKAIKNAPEILALLTAVWLPKRVAVMHCKGHQKDDAPTSTGNRRADEVAREVAIRPLSTQATISAGKRTADGSEFEKRTADGSEFESPKKKAKVE

SEQ ID NO: 6886 - protein, 2102 aa, synthetic construct
MPAAKRVKLDGGDKKYSIGLDIGTNSVGWAVITDEYKVPSKKFKVLGNTDRHSIKKNLIGALLFDSGETAEATRLKRTARRRYTRRKNRICYLQEIFSNEMAKVDDSFFHRLEESFLVEEDKKHERHPIFGNIVDEVAYHEKYPTIYHLRKKLVDSTDKADLRLIYLALAHMIKFRGHFLIEGDLNPDNSDVDKLFIQLVQTYNQLFEENPINASGVDAKAILSARLSKSRRLENLIAQLPGEKKNGLFGNLIALSLGLTPNFKSNFDLAEDAKLQLSKDTYDDDLDNLLAQIGDQYADLFLAAKNLSDAILLSDILRVNTEITKAPLSASMIKRYDEHHQDLTLLKALVRQQLPEKYKEIFFDQSKNGYAGYIDGGASQEEFYKFIKPILEKMDGTEELLVKLNREDLLRKQRTFDNGSIPHQIHLGELHAILRRQEDFYPFLKDNREKIEKILTFRIPYYVGPLARGNSRFAWMTRKSEETITPWNFEEVVDKGASAQSFIERMTNFDKNLPNEKVLPKHSLLYEYFTVYNELTKVKYVTEGMRKPAFLSGEQKKAIVDLLFKTNRKVTVKQLKEDYFKKIECFDSVEISGVEDRFNASLGTYHDLLKIIKDKDFLDNEENEDILEDIVLTLTLFEDREMIEERLKTYAHLFDDKVMKQLKRRRYTGWGRLSRKLINGIRDKQSGKTILDFLKSDGFANRNFMQLIHDDSLTFKEDIQKAQVSGQGDSLHEHIANLAGSPAIKKGILQTVKVVDELVKVMGRHKPENIVIEMARENQTTQKGQKNSRERMKRIEEGIKELGSQILKEHPVENTQLQNEKLYLYYLQNGRDMYVDQELDINRLSDYDVDHIVPQSFLKDDSIDNKVLTRSDKARGKSDNVPSEEVVKKMKNYWRQLLNAKLITQRKFDNLTKAERGGLSELDKAGFIKRQLVETRQITKHVAQILDSRMNTKYDENDKLIREVKVITLKSKLVSDFRKDFQFYKVREINNYHHAHDAYLNAVVGTALIKKYPKLESEFVYGDYKVYDVRKMIAKSEQEIGKATAKYFFYSNIMNFFKTEITLANGEIRKRPLIETNGETGEIVWDKGRDFATVRKVLSMPQVNIVKKTEVQTGGFSKESILPKRNSDKLIARKKDWDPKKYGGFDSPTVAYSVLVVAKVEKGKSKKLKSVKELLGITIMERSSFEKNPIDFLEAKGYKEVKKDLIIKLPKYSLFELENGRKRMLASAGELQKGNELALPSKYVNFLYLASHYEKLKGSPEDNEQKQLFVEQHKHYLDEIIEQISEFSKRVILADANLDKVLSAYNKHRDKPIREQAENIIHLFTLTNLGAPAAFKYFDTTIDRKRYTSTKEVLDATLIHQSITGLYETRIDLSQLGGDGGGGSGGGEAAAKGGTVSLQDEHRLFDIPVTTSLPDVWLQDFPQAWAETGGLGRAKCQAPIIIDLKPTAVPVSIKQYPMSLEAHMGIRQHIIKFLELGVLRPCRSPWNTPLLPVKKPGTQDYRPVQDLREINKRTVDIHPTVPNPYNLLSTLKPDYSWYTVLDLKDAFFCLPLAPQSQELFAFEWKDPERGISGQLTWTRLPQGFKNSPTLFNEALHRDLTDFRTQHPEVTLLQYVDDLLLAAPTKKACTQGTRHLLQELGEKGYRASAKKAQICQTKVTYLGYILSEGKRWLTPGRIETVARIPPPRNPREVREFLGTAGFCRLWIPGFAELAAPLYALTKPSTPFTWQTEHQLAFEALKKALLSAPALGLPDTSKPFTLFLDERQGIAKGVLTQKLGPWKRPVAYLSKKLDPVAAGWPPCLRIMAATAMLVKDSAKLTLGQPLTVITPHTLEAIVRQPPDRWITNARLTHYQALLLDTDRVQFGPPVTLNPATLLPVPENQPSPHDCRQVLAETHGTREDLKDQELPDADHTWYTDGSSYLDSGTRRAGAAVVDGHNTIWAQSLPPGTSAQKAELIALTKALELSKGKKANIYTDSRYAFATAHTHGSIYERRGWLTSEGKEIKNKAEIIALLKALFLPQEVAIIHCPGHQKGQDPVAVGNRQADRVARQAAMAEVLTLATEPDNTSHITAGKRTADGSEFEKRTADGSEFESPKKKAKVE

SEQ ID NO: 6887 - protein, 2173 aa, synthetic construct
MPAAKRVKLDGGDKKYSIGLDIGTNSVGWAVITDEYKVPSKKFKVLGNTDRHSIKKNLIGALLFDSGETAEATRLKRTARRRYTRRKNRICYLQEIFSNEMAKVDDSFFHRLEESFLVEEDKKHERHPIFGNIVDEVAYHEKYPTIYHLRKKLVDSTDKADLRLIYLALAHMIKFRGHFLIEGDLNPDNSDVDKLFIQLVQTYNQLFEENPINASGVDAKAILSARLSKSRRLENLIAQLPGEKKNGLFGNLIALSLGLTPNFKSNFDLAEDAKLQLSKDTYDDDLDNLLAQIGDQYADLFLAAKNLSDAILLSDILRVNTEITKAPLSASMIKRYDEHHQDLTLLKALVRQQLPEKYKEIFFDQSKNGYAGYIDGGASQEEFYKFIKPILEKMDGTEELLVKLNREDLLRKQRTFDNGSIPHQIHLGELHAILRRQEDFYPFLKDNREKIEKILTFRIPYYVGPLARGNSRFAWMTRKSEETITPWNFEEVVDKGASAQSFIERMTNFDKNLPNEKVLPKHSLLYEYFTVYNELTKVKYVTEGMRKPAFLSGEQKKAIVDLLFKTNRKVTVKQLKEDYFKKIECFDSVEISGVEDRFNASLGTYHDLLKIIKDKDFLDNEENEDILEDIVLTLTLFEDREMIEERLKTYAHLFDDKVMKQLKRRRYTGWGRLSRKLINGIRDKQSGKTILDFLKSDGFANRNFMQLIHDDSLTFKEDIQKAQVSGQGDSLHEHIANLAGSPAIKKGILQTVKVVDELVKVMGRHKPENIVIEMARENQTTQKGQKNSRERMKRIEEGIKELGSQILKEHPVENTQLQNEKLYLYYLQNGRDMYVDQELDINRLSDYDVDHIVPQSFLKDDSIDNKVLTRSDKARGKSDNVPSEEVVKKMKNYWRQLLNAKLITQRKFDNLTKAERGGLSELDKAGFIKRQLVETRQITKHVAQILDSRMNTKYDENDKLIREVKVITLKSKLVSDFRKDFQFYKVREINNYHHAHDAYLNAVVGTALIKKYPKLESEFVYGDYKVYDVRKMIAKSEQEIGKATAKYFFYSNIMNFFKTEITLANGEIRKRPLIETNGETGEIVWDKGRDFATVRKVLSMPQVNIVKKTEVQTGGFSKESILPKRNSDKLIARKKDWDPKKYGGFDSPTVAYSVLVVAKVEKGKSKKLKSVKELLGITIMERSSFEKNPIDFLEAKGYKEVKKDLIIKLPKYSLFELENGRKRMLASAGELQKGNELALPSKYVNFLYLASHYEKLKGSPEDNEQKQLFVEQHKHYLDEIIEQISEFSKRVILADANLDKVLSAYNKHRDKPIREQAENIIHLFTLTNLGAPAAFKYFDTTIDRKRYTSTKEVLDATLIHQSITGLYETRIDLSQLGGDGGGGSGGGEAAAKGGMDLLKPLTVERKGVKIKGYWNSQADITCVPKDLLQGEEPVRQQNVTTIHGTQEGDVYYVNLKIDGRRINTEVIGTTLDYAIITPGDVPWILKKPLELTIKLDLEEQQGTLLNNSILSKKGKEELKQLFEKYSALWQSWENQVGHRRIRPHKIATGTVKPTPQKQYHINPKAKPDIQIVINDLLKQGVLIQKESTMNTPVYPVPKPNGRWRMVLDYRAVNKVTPLIAVQNQHSYGILGSLFKGRYKTTIDLSNGFWAHPIVPEDYWITAFTWQGKQYCWTVLPQGFLNSPGLFTGDVVDLLQGIPNVEVYVDDVYISHDSEKEHLEYLDILFNRLKEAGYIISLKKSNIANSIVDFLGFQITNEGRGLTDTFKEKLENITAPTTLKQLQSILGLLNFARNFIPDFTELIAPLYALIPKSTKNYVPWQIEHSTTLETLITKLNGAEYLQGRKGDKTLIMKVNASYTTGYIRYYNEGEKKPISYVSIVFSKTELKFTELEKLLTTVHKGLLKALDLSMGQNIHVYSPIVSMQNIQKTPQTAKKALASRWLSWLSYLEDPRIRFFYDPQMPALKDLPAVDTGKDNKKHPSNFQHIFYTDGSAITSPTKEGHLNAGMGIVYFINKDGNLQKQQEWSISLGNHTAQFAEIAAFEFALKKCLPLGGNILVVTDSNYVAKAYNEELDVWASNGFVNNRKKPLKHISKWKSVADLKRLRPDVVVTHEPGHQKLDSSPHAYGNNLADQLATQASFKVHAGKRTADGSEFEKRTADGSEFESPKKKAKVE

SEQ ID NO: 6888 - protein, 2173 aa, synthetic construct
MPAAKRVKLDGGDKKYSIGLDIGTNSVGWAVITDEYKVPSKKFKVLGNTDRHSIKKNLIGALLFDSGETAEATRLKRTARRRYTRRKNRICYLQEIFSNEMAKVDDSFFHRLEESFLVEEDKKHERHPIFGNIVDEVAYHEKYPTIYHLRKKLVDSTDKADLRLIYLALAHMIKFRGHFLIEGDLNPDNSDVDKLFIQLVQTYNQLFEENPINASGVDAKAILSARLSKSRRLENLIAQLPGEKKNGLFGNLIALSLGLTPNFKSNFDLAEDAKLQLSKDTYDDDLDNLLAQIGDQYADLFLAAKNLSDAILLSDILRVNTEITKAPLSASMIKRYDEHHQDLTLLKALVRQQLPEKYKEIFFDQSKNGYAGYIDGGASQEEFYKFIKPILEKMDGTEELLVKLNREDLLRKQRTFDNGSIPHQIHLGELHAILRRQEDFYPFLKDNREKIEKILTFRIPYYVGPLARGNSRFAWMTRKSEETITPWNFEEVVDKGASAQSFIERMTNFDKNLPNEKVLPKHSLLYEYFTVYNELTKVKYVTEGMRKPAFLSGEQKKAIVDLLFKTNRKVTVKQLKEDYFKKIECFDSVEISGVEDRFNASLGTYHDLLKIIKDKDFLDNEENEDILEDIVLTLTLFEDREMIEERLKTYAHLFDDKVMKQLKRRRYTGWGRLSRKLINGIRDKQSGKTILDFLKSDGFANRNFMQLIHDDSLTFKEDIQKAQVSGQGDSLHEHIANLAGSPAIKKGILQTVKVVDELVKVMGRHKPENIVIEMARENQTTQKGQKNSRERMKRIEEGIKELGSQILKEHPVENTQLQNEKLYLYYLQNGRDMYVDQELDINRLSDYDVDHIVPQSFLKDDSIDNKVLTRSDKARGKSDNVPSEEVVKKMKNYWRQLLNAKLITQRKFDNLTKAERGGLSELDKAGFIKRQLVETRQITKHVAQILDSRMNTKYDENDKLIREVKVITLKSKLVSDFRKDFQFYKVREINNYHHAHDAYLNAVVGTALIKKYPKLESEFVYGDYKVYDVRKMIAKSEQEIGKATAKYFFYSNIMNFFKTEITLANGEIRKRPLIETNGETGEIVWDKGRDFATVRKVLSMPQVNIVKKTEVQTGGFSKESILPKRNSDKLIARKKDWDPKKYGGFDSPTVAYSVLVVAKVEKGKSKKLKSVKELLGITIMERSSFEKNPIDFLEAKGYKEVKKDLIIKLPKYSLFELENGRKRMLASAGELQKGNELALPSKYVNFLYLASHYEKLKGSPEDNEQKQLFVEQHKHYLDEIIEQISEFSKRVILADANLDKVLSAYNKHRDKPIREQAENIIHLFTLTNLGAPAAFKYFDTTIDRKRYTSTKEVLDATLIHQSITGLYETRIDLSQLGGDGGGGSGGGEAAAKGGMDLLKPLTVERKGVKIKGYWNSQADITCVPKDLLQGEEPVRQQNVTTIHGTQEGDVYYVNLKIDGRRINTEVIGTTLDYAIITPGDVPWILKKPLELTIKLDLEEQQGTLLNNSILSKKGKEELKQLFEKYSALWQSWENQVGHRRIRPHKIATGTVKPTPQKQYHINPKAKPDIQIVINDLLKQGVLIQKESTMNTPVYPVPKPNGRWRMVLDYRAVNKVTPLIAVQNQHSYGILGSLFKGRYKTTIDLSNGFWAHPIVPEDYWITAFTWQGKQYCWTVLPQGFLNSPGLFNGDVVDLLQGIPNVEVYVDDVYISHDSEKEHLEYLDILFNRLKEAGYIISLKKSNIANSIVDFLGFQITNEGRGLTDTFKEKLENITAPTTLKQLQSILGLLNFARNFIPDFTELIAPLYALIPKSPKNYVPWQIEHSTTLETLITKLNGAEYLQGRKGDKTLIMKVNASYTTGYIRYYNEGEKKPISYVSIVFSKTELKFTELEKLLTTVHKGLLKALDLSMGQNIHVYSPIVSMQNIQKTPQTAKKALASRWLSWLSYLEDPRIRFFYDPQMPALKDLPAVDTGKDNKKHPSNFQHIFYTDGSAITSPTKEGHLNAGMGIVYFINKDGNLQKQQEWSISLGNHTAQFAEIAAFEFALKKCLPLGGNILVVTDSNYVAKAYNEELDVWASNGFVNNRKKPLKHISKWKSVADLKRLRPDVVVTHEPGHQKLDSSPHAYGNNLADQLATQASFKVHAGKRTADGSEFEKRTADGSEFESPKKKAKVE

SEQ ID NO: 6889 - protein, 2095 aa, synthetic construct
MPAAKRVKLDGGDKKYSIGLDIGTNSVGWAVITDEYKVPSKKFKVLGNTDRHSIKKNLIGALLFDSGETAEATRLKRTARRRYTRRKNRICYLQEIFSNEMAKVDDSFFHRLEESFLVEEDKKHERHPIFGNIVDEVAYHEKYPTIYHLRKKLVDSTDKADLRLIYLALAHMIKFRGHFLIEGDLNPDNSDVDKLFIQLVQTYNQLFEENPINASGVDAKAILSARLSKSRRLENLIAQLPGEKKNGLFGNLIALSLGLTPNFKSNFDLAEDAKLQLSKDTYDDDLDNLLAQIGDQYADLFLAAKNLSDAILLSDILRVNTEITKAPLSASMIKRYDEHHQDLTLLKALVRQQLPEKYKEIFFDQSKNGYAGYIDGGASQEEFYKFIKPILEKMDGTEELLVKLNREDLLRKQRTFDNGSIPHQIHLGELHAILRRQEDFYPFLKDNREKIEKILTFRIPYYVGPLARGNSRFAWMTRKSEETITPWNFEEVVDKGASAQSFIERMTNFDKNLPNEKVLPKHSLLYEYFTVYNELTKVKYVTEGMRKPAFLSGEQKKAIVDLLFKTNRKVTVKQLKEDYFKKIECFDSVEISGVEDRFNASLGTYHDLLKIIKDKDFLDNEENEDILEDIVLTLTLFEDREMIEERLKTYAHLFDDKVMKQLKRRRYTGWGRLSRKLINGIRDKQSGKTILDFLKSDGFANRNFMQLIHDDSLTFKEDIQKAQVSGQGDSLHEHIANLAGSPAIKKGILQTVKVVDELVKVMGRHKPENIVIEMARENQTTQKGQKNSRERMKRIEEGIKELGSQILKEHPVENTQLQNEKLYLYYLQNGRDMYVDQELDINRLSDYDVDHIVPQSFLKDDSIDNKVLTRSDKARGKSDNVPSEEVVKKMKNYWRQLLNAKLITQRKFDNLTKAERGGLSELDKAGFIKRQLVETRQITKHVAQILDSRMNTKYDENDKLIREVKVITLKSKLVSDFRKDFQFYKVREINNYHHAHDAYLNAVVGTALIKKYPKLESEFVYGDYKVYDVRKMIAKSEQEIGKATAKYFFYSNIMNFFKTEITLANGEIRKRPLIETNGETGEIVWDKGRDFATVRKVLSMPQVNIVKKTEVQTGGFSKESILPKRNSDKLIARKKDWDPKKYGGFDSPTVAYSVLVVAKVEKGKSKKLKSVKELLGITIMERSSFEKNPIDFLEAKGYKEVKKDLIIKLPKYSLFELENGRKRMLASAGELQKGNELALPSKYVNFLYLASHYEKLKGSPEDNEQKQLFVEQHKHYLDEIIEQISEFSKRVILADANLDKVLSAYNKHRDKPIREQAENIIHLFTLTNLGAPAAFKYFDTTIDRKRYTSTKEVLDATLIHQSITGLYETRIDLSQLGGDGGGGSGGGEAAAKGGTLQLEEEYRLFEPESTQKQEMDIWLKNFPQAWAETGGMGTAHCQAPVLIQLKATATPISIRQYPMPHEAYQGIKPHIRRMLDQGILKPCQSPWNTPLLPVKKPGTEDYRPVQDLREVNKRVEDIHPTVPNPYNLLSTLPPSHPWYTVLDLKDAFFCLRLHSESQLLFAFEWRDPEIGLSGQLTWTRLPQGFKNSPTLFNEALHSDLADFRVRYPALVLLQYVDDLLLAAATRTECLEGTKALLETLGNKGYRASAKKAQICLQEVTYLGYSLKDGQRWLTKARKEAILSIPVPKNSRQVREFLGTAGYCRLWIPGFAELAAPLYPLTRPGTLFQWGTEQQLAFEDIKKALLSSPALGLPDITKPFELFIDENSGFAKGVLVQKLGPWKRPVAYLSKKLDTVASGWPPCLRMVAAIAILVKDAGKLTLGQPLTILTSHPVEALVRQPPNKWLSNARMTHYQAMLLDAERVHFGPTVSLNPATLLPLPSGGNHHDCLQILAETHGTRPDLTDQPLPDADLTWYTDGSSFIRNGEREAGAAVTTESEVIWAAPLPPGTSAQRAELIALTQALKMAEGKKLTVYTDSRYAFATTHVHGEIYRRRGWLTSEGKEIKNKNEILALLEALFLPKRLSIIHCPGHQKGDSPQAKGNRLADDTAKKAATETHSSLTVLPAGKRTADGSEFEKRTADGSEFESPKKKAKVE

SEQ ID NO: 6890 - protein, 2127 aa, synthetic construct
MPAAKRVKLDGGDKKYSIGLDIGTNSVGWAVITDEYKVPSKKFKVLGNTDRHSIKKNLIGALLFDSGETAEATRLKRTARRRYTRRKNRICYLQEIFSNEMAKVDDSFFHRLEESFLVEEDKKHERHPIFGNIVDEVAYHEKYPTIYHLRKKLVDSTDKADLRLIYLALAHMIKFRGHFLIEGDLNPDNSDVDKLFIQLVQTYNQLFEENPINASGVDAKAILSARLSKSRRLENLIAQLPGEKKNGLFGNLIALSLGLTPNFKSNFDLAEDAKLQLSKDTYDDDLDNLLAQIGDQYADLFLAAKNLSDAILLSDILRVNTEITKAPLSASMIKRYDEHHQDLTLLKALVRQQLPEKYKEIFFDQSKNGYAGYIDGGASQEEFYKFIKPILEKMDGTEELLVKLNREDLLRKQRTFDNGSIPHQIHLGELHAILRRQEDFYPFLKDNREKIEKILTFRIPYYVGPLARGNSRFAWMTRKSEETITPWNFEEVVDKGASAQSFIERMTNFDKNLPNEKVLPKHSLLYEYFTVYNELTKVKYVTEGMRKPAFLSGEQKKAIVDLLFKTNRKVTVKQLKEDYFKKIECFDSVEISGVEDRFNASLGTYHDLLKIIKDKDFLDNEENEDILEDIVLTLTLFEDREMIEERLKTYAHLFDDKVMKQLKRRRYTGWGRLSRKLINGIRDKQSGKTILDFLKSDGFANRNFMQLIHDDSLTFKEDIQKAQVSGQGDSLHEHIANLAGSPAIKKGILQTVKVVDELVKVMGRHKPENIVIEMARENQTTQKGQKNSRERMKRIEEGIKELGSQILKEHPVENTQLQNEKLYLYYLQNGRDMYVDQELDINRLSDYDVDHIVPQSFLKDDSIDNKVLTRSDKARGKSDNVPSEEVVKKMKNYWRQLLNAKLITQRKFDNLTKAERGGLSELDKAGFIKRQLVETRQITKHVAQILDSRMNTKYDENDKLIREVKVITLKSKLVSDFRKDFQFYKVREINNYHHAHDAYLNAVVGTALIKKYPKLESEFVYGDYKVYDVRKMIAKSEQEIGKATAKYFFYSNIMNFFKTEITLANGEIRKRPLIETNGETGEIVWDKGRDFATVRKVLSMPQVNIVKKTEVQTGGFSKESILPKRNSDKLIARKKDWDPKKYGGFDSPTVAYSVLVVAKVEKGKSKKLKSVKELLGITIMERSSFEKNPIDFLEAKGYKEVKKDLIIKLPKYSLFELENGRKRMLASAGELQKGNELALPSKYVNFLYLASHYEKLKGSPEDNEQKQLFVEQHKHYLDEIIEQISEFSKRVILADANLDKVLSAYNKHRDKPIREQAENIIHLFTLTNLGAPAAFKYFDTTIDRKRYTSTKEVLDATLIHQSITGLYETRIDLSQLGGDGGGGSGGGEAAAKGGLLGRDLLTKLKAQIQFSTEGPQVTWEDRPAMCLVLNLEEEYRLHEKPVPPSIDPSWLQLFPMVWAEKAGMGLANQVPPVVVELKSDASPVAVRQYPMSKEAREGIRPHIQRFLDLGILVPCQSPWNTPLLPVKKPGTNDYRPVQDLREVNKRVQDIHPTVPNPYNLLSSLPPSHTWYSVLDLKDAFFCLKLHPNSQPLFAFEWRDPEKGNTGQLTWTRLPQGFKNSPTLFDEALHRDLASFRALNPQVVMLQYVDDLLVAAPTYRDCKEGTRRLLQELSKLGYRVSAKKAQLCREEVTYLGYLLKGGKRWLTPARKATVMKIPTPTTPRQVREFLGTAGFCRLWIPGFASLAAPLYPLTREKVPFTWTEAHQEAFGRIKEALLSAPALALPDLTKPFALYVDEKEGVARGVLTQTLGPWRRPVAYLSKKLDPVASGWPTCLKAIAAVALLLKDADKLTLGQNVLVIAPHNLESIVRQPPDRWMTNARMTHYQSLLLNERVSFAPPAILNPATLLPVESDDTPIHICSEILAEETGTRPDLRDQPLPGVPAWYTDGSSFIMDGRRQAGAAIVDNKRTVWASNLPEGTSAQKAELIALTQALRLAEGKSINIYTDSRYAFATAHVHGAIYKQRGLLTSAGKDIKNKEEILALLEAIHLPKRVAIIHCPGHQRGTDPVATGNRKADEAAKQAAQSTRILTETTKNAGKRTADGSEFEKRTADGSEFESPKKKAKVE

SEQ ID NO: 6891 - protein, 2218 aa, synthetic construct
MPAAKRVKLDGGDKKYSIGLDIGTNSVGWAVITDEYKVPSKKFKVLGNTDRHSIKKNLIGALLFDSGETAEATRLKRTARRRYTRRKNRICYLQEIFSNEMAKVDDSFFHRLEESFLVEEDKKHERHPIFGNIVDEVAYHEKYPTIYHLRKKLVDSTDKADLRLIYLALAHMIKFRGHFLIEGDLNPDNSDVDKLFIQLVQTYNQLFEENPINASGVDAKAILSARLSKSRRLENLIAQLPGEKKNGLFGNLIALSLGLTPNFKSNFDLAEDAKLQLSKDTYDDDLDNLLAQIGDQYADLFLAAKNLSDAILLSDILRVNTEITKAPLSASMIKRYDEHHQDLTLLKALVRQQLPEKYKEIFFDQSKNGYAGYIDGGASQEEFYKFIKPILEKMDGTEELLVKLNREDLLRKQRTFDNGSIPHQIHLGELHAILRRQEDFYPFLKDNREKIEKILTFRIPYYVGPLARGNSRFAWMTRKSEETITPWNFEEVVDKGASAQSFIERMTNFDKNLPNEKVLPKHSLLYEYFTVYNELTKVKYVTEGMRKPAFLSGEQKKAIVDLLFKTNRKVTVKQLKEDYFKKIECFDSVEISGVEDRFNASLGTYHDLLKIIKDKDFLDNEENEDILEDIVLTLTLFEDREMIEERLKTYAHLFDDKVMKQLKRRRYTGWGRLSRKLINGIRDKQSGKTILDFLKSDGFANRNFMQLIHDDSLTFKEDIQKAQVSGQGDSLHEHIANLAGSPAIKKGILQTVKVVDELVKVMGRHKPENIVIEMARENQTTQKGQKNSRERMKRIEEGIKELGSQILKEHPVENTQLQNEKLYLYYLQNGRDMYVDQELDINRLSDYDVDHIVPQSFLKDDSIDNKVLTRSDKARGKSDNVPSEEVVKKMKNYWRQLLNAKLITQRKFDNLTKAERGGLSELDKAGFIKRQLVETRQITKHVAQILDSRMNTKYDENDKLIREVKVITLKSKLVSDFRKDFQFYKVREINNYHHAHDAYLNAVVGTALIKKYPKLESEFVYGDYKVYDVRKMIAKSEQEIGKATAKYFFYSNIMNFFKTEITLANGEIRKRPLIETNGETGEIVWDKGRDFATVRKVLSMPQVNIVKKTEVQTGGFSKESILPKRNSDKLIARKKDWDPKKYGGFDSPTVAYSVLVVAKVEKGKSKKLKSVKELLGITIMERSSFEKNPIDFLEAKGYKEVKKDLIIKLPKYSLFELENGRKRMLASAGELQKGNELALPSKYVNFLYLASHYEKLKGSPEDNEQKQLFVEQHKHYLDEIIEQISEFSKRVILADANLDKVLSAYNKHRDKPIREQAENIIHLFTLTNLGAPAAFKYFDTTIDRKRYTSTKEVLDATLIHQSITGLYETRIDLSQLGGDGGGGSGGGEAAAKGGTLGDQGSRGSDPLPEPRVTLTVEGIPTEFLVNTGAEHSVLTKPMGKMGSKRTVVAGATGSKVYPWTTKRLLKIGQKQVTHSFLVIPECPAPLLGRDLLTKLKAQIQFSTEGPQVTWEDRPAMCLVLNLEEEYRLHEKPVPPSIDPSWLQLFPMVWAEKAGMGLANQVPPVVVELKSDASPVAVRQYPMSKEAREGIRPHIQRFLDLGILVPCQSPWNTPLLPVKKPGTNDYRPVQDLREVNKRVQDIHPTVPNPYNLLSSLPPSHTWYSVLDLKDAFFCLKLHPNSQPLFAFEWRDPEKGNTGQLTWTRLPQGFKNSPTLFNEALHRDLASFRALNPQVVMLQYVDDLLVAAPTYRDCKEGTRRLLQELSKLGYRVSAKKAQLCREEVTYLGYLLKGGKRWLTPARKATVMKIPTPTTPRQVREFLGKAGFCRLFIPGFASLAAPLYPLTRPKVPFTWTEAHQEAFGRIKEALLSAPALALPDLTKPFALYVDEKEGVARGVLTQTLGPWRRPVAYLSKKLDPVASGWPTCLKAIAAVALLLKDADKLTLGQNVLVIAPHNLESIVRQPPDRWMTNARMTHYQSLLLNERVSFAPPAILNPATLLPVESDDTPIHICSEILAEETGTRPDLRDQPLPGVPAWYTDGSSFIMDGRRQAGAAIVDNKRTVWASNLPEGTSAQKAELIALTQALRLAEGKSINIYTDSRYAFATAHVHGAIYKQRGWLTSAGKDIKNKEEILALLEAIHLPKRVAIIHCPGHQRGTDPVATGNRKADEAAKQAAQSTRILTETTKNAGKRTADGSEFEKRTADGSEFESPKKKAKVE

SEQ ID NO: 6892 - protein, 2096 aa, synthetic construct
MPAAKRVKLDGGDKKYSIGLDIGTNSVGWAVITDEYKVPSKKFKVLGNTDRHSIKKNLIGALLFDSGETAEATRLKRTARRRYTRRKNRICYLQEIFSNEMAKVDDSFFHRLEESFLVEEDKKHERHPIFGNIVDEVAYHEKYPTIYHLRKKLVDSTDKADLRLIYLALAHMIKFRGHFLIEGDLNPDNSDVDKLFIQLVQTYNQLFEENPINASGVDAKAILSARLSKSRRLENLIAQLPGEKKNGLFGNLIALSLGLTPNFKSNFDLAEDAKLQLSKDTYDDDLDNLLAQIGDQYADLFLAAKNLSDAILLSDILRVNTEITKAPLSASMIKRYDEHHQDLTLLKALVRQQLPEKYKEIFFDQSKNGYAGYIDGGASQEEFYKFIKPILEKMDGTEELLVKLNREDLLRKQRTFDNGSIPHQIHLGELHAILRRQEDFYPFLKDNREKIEKILTFRIPYYVGPLARGNSRFAWMTRKSEETITPWNFEEVVDKGASAQSFIERMTNFDKNLPNEKVLPKHSLLYEYFTVYNELTKVKYVTEGMRKPAFLSGEQKKAIVDLLFKTNRKVTVKQLKEDYFKKIECFDSVEISGVEDRFNASLGTYHDLLKIIKDKDFLDNEENEDILEDIVLTLTLFEDREMIEERLKTYAHLFDDKVMKQLKRRRYTGWGRLSRKLINGIRDKQSGKTILDFLKSDGFANRNFMQLIHDDSLTFKEDIQKAQVSGQGDSLHEHIANLAGSPAIKKGILQTVKVVDELVKVMGRHKPENIVIEMARENQTTQKGQKNSRERMKRIEEGIKELGSQILKEHPVENTQLQNEKLYLYYLQNGRDMYVDQELDINRLSDYDVDHIVPQSFLKDDSIDNKVLTRSDKARGKSDNVPSEEVVKKMKNYWRQLLNAKLITQRKFDNLTKAERGGLSELDKAGFIKRQLVETRQITKHVAQILDSRMNTKYDENDKLIREVKVITLKSKLVSDFRKDFQFYKVREINNYHHAHDAYLNAVVGTALIKKYPKLESEFVYGDYKVYDVRKMIAKSEQEIGKATAKYFFYSNIMNFFKTEITLANGEIRKRPLIETNGETGEIVWDKGRDFATVRKVLSMPQVNIVKKTEVQTGGFSKESILPKRNSDKLIARKKDWDPKKYGGFDSPTVAYSVLVVAKVEKGKSKKLKSVKELLGITIMERSSFEKNPIDFLEAKGYKEVKKDLIIKLPKYSLFELENGRKRMLASAGELQKGNELALPSKYVNFLYLASHYEKLKGSPEDNEQKQLFVEQHKHYLDEIIEQISEFSKRVILADANLDKVLSAYNKHRDKPIREQAENIIHLFTLTNLGAPAAFKYFDTTIDRKRYTSTKEVLDATLIHQSITGLYETRIDLSQLGGDGGGGSGGGEAAAKGGTLNLEDEYRLYETSAEPEVSPGSTWLSDFPQAWAETGGMGLAVRQAPLIIPLKATSTPVSIKQYPMSQEAKLGIKPHIQRLLDQGILVPCQSPWNTPLLPVKKPGTNDYRPVQDLREVNKRVEDIHPTVPNPYNLLSGLPPSHRWYTVLDLKDAFFCLRLHPTSQPLFAFEWRDPGMGISGQLTWTRLPQGFKNSPTLFNEALHRDLADFRIQHPDLILLQYVDDILLAATSELDCQQGTRALLLTLGNLGYRASAKKAQLCQKQVKYLGYLLKEGQRWLTEARKETVMGQPTPKTPRQLREFLGKAGFCRLFIPGFAEMAAPLYPLTKPGTLFNWGPDQQKAYQEIKQALLTAPALGLPDLTKPFELFVDEKQGYAKGVLTQKLGPWRRPVAYLSKKLDPVAAGWPPCLRMVAAIAVLRKDAGKLTMGQPLVILAPHAVEALVKQPPDRWLSNARMTHYQAMLLDTDRVQFGPVVALNPATLLPLPEEGAPHDCLEILAETHGTRPDLTDQPIPDADHTWYTDGSSFLQEGQRKAGAAVTTETEVIWARALPAGTSAQRAELIALTQALKMAEGKRLNVYTDSRYAFATAHIHGEIYRRRGWLTSEGREIKNKSEILALLKALFLPKRLSIIHCLGHQKGDSAEARGNRLADQAAREAAIKTPPDTSTLLAGKRTADGSEFEKRTADGSEFESPKKKAKVE

SEQ ID NO: 6893 - protein, 2096 aa, synthetic construct
MPAAKRVKLDGGDKKYSIGLDIGTNSVGWAVITDEYKVPSKKFKVLGNTDRHSIKKNLIGALLFDSGETAEATRLKRTARRRYTRRKNRICYLQEIFSNEMAKVDDSFFHRLEESFLVEEDKKHERHPIFGNIVDEVAYHEKYPTIYHLRKKLVDSTDKADLRLIYLALAHMIKFRGHFLIEGDLNPDNSDVDKLFIQLVQTYNQLFEENPINASGVDAKAILSARLSKSRRLENLIAQLPGEKKNGLFGNLIALSLGLTPNFKSNFDLAEDAKLQLSKDTYDDDLDNLLAQIGDQYADLFLAAKNLSDAILLSDILRVNTEITKAPLSASMIKRYDEHHQDLTLLKALVRQQLPEKYKEIFFDQSKNGYAGYIDGGASQEEFYKFIKPILEKMDGTEELLVKLNREDLLRKQRTFDNGSIPHQIHLGELHAILRRQEDFYPFLKDNREKIEKILTFRIPYYVGPLARGNSRFAWMTRKSEETITPWNFEEVVDKGASAQSFIERMTNFDKNLPNEKVLPKHSLLYEYFTVYNELTKVKYVTEGMRKPAFLSGEQKKAIVDLLFKTNRKVTVKQLKEDYFKKIECFDSVEISGVEDRFNASLGTYHDLLKIIKDKDFLDNEENEDILEDIVLTLTLFEDREMIEERLKTYAHLFDDKVMKQLKRRRYTGWGRLSRKLINGIRDKQSGKTILDFLKSDGFANRNFMQLIHDDSLTFKEDIQKAQVSGQGDSLHEHIANLAGSPAIKKGILQTVKVVDELVKVMGRHKPENIVIEMARENQTTQKGQKNSRERMKRIEEGIKELGSQILKEHPVENTQLQNEKLYLYYLQNGRDMYVDQELDINRLSDYDVDHIVPQSFLKDDSIDNKVLTRSDKARGKSDNVPSEEVVKKMKNYWRQLLNAKLITQRKFDNLTKAERGGLSELDKAGFIKRQLVETRQITKHVAQILDSRMNTKYDENDKLIREVKVITLKSKLVSDFRKDFQFYKVREINNYHHAHDAYLNAVVGTALIKKYPKLESEFVYGDYKVYDVRKMIAKSEQEIGKATAKYFFYSNIMNFFKTEITLANGEIRKRPLIETNGETGEIVWDKGRDFATVRKVLSMPQVNIVKKTEVQTGGFSKESILPKRNSDKLIARKKDWDPKKYGGFDSPTVAYSVLVVAKVEKGKSKKLKSVKELLGITIMERSSFEKNPIDFLEAKGYKEVKKDLIIKLPKYSLFELENGRKRMLASAGELQKGNELALPSKYVNFLYLASHYEKLKGSPEDNEQKQLFVEQHKHYLDEIIEQISEFSKRVILADANLDKVLSAYNKHRDKPIREQAENIIHLFTLTNLGAPAAFKYFDTTIDRKRYTSTKEVLDATLIHQSITGLYETRIDLSQLGGDGGGGSGGGEAAAKGGTLNIEDEYRLHEISTEPDVSPGSTWLSDFPQAWAETGGMGLAVRQAPLIIPLKATSTPVSIKQYPMSQEAKLGIKPHIQRLLDQGILVPCQSPWNTPLLPVKKPGTNDYRPVQGLREVNKRVEDIHPTVPNPYNLLSGLPTSHRWYTVLDLKDAFFCLRLHPTSQPLFASEWRDPGMGISGQLTWTRLPQGFKNSPTLFNEALHRGLADFRIQHPDLILLQYVDDLLLAATSELDCQQGTRALLKTLGNLGYRASAKKAQICQKQVKYLGYLLREGQRWLTEARKETVMGQPTPKTPRQLREFLGTAGFCRLWIPRFAEMAAPLYPLTKPGTLFNWGPDQQKAYHEIKQALLTAPALGLPDLTKPFELFVDEKQGYAKGVLTQKLGPWRRPVAYLSKKLDPVAAGWPPCLRMVAAIAVLTKDAGKLTMGQPLVILAPHAVEALVKQPPDRWLSNARMTHYQAMLLDTDRVQFGPVVALNPATLLPLPEEGAPHDCLEILAETHGTEPDLTDQPIPDADHTWYTDGSSFLQEGQRKAGAAVTTETEVIWARALPAGTSAQRAELIALTQALKMAEGKRLNVYTDSRYAFATAHIHGEIYKRRGWLTSEGREIKNKSEILALLKALFLPKRLSIIHCLGHQKGDSAEARGNRLADQAAREAAIKTPPDTSTLLAGKRTADGSEFEKRTADGSEFESPKKKAKVE
